United States Patent Application Publication US 2004/0031072 A1 - sequence listing, part 21

SEQ ID NO: 95422 - DNA, 467 bp, Glycine max
  Clone ID: PAT_MRT3847_57178C.1
aaatcgaacaaaaaaaatataatccactcttcgaatctgaagcaagggaagggttacatcacaagatcctttatactatcacaataatgtacaattgcgcagcactcttttgttggggtacgtgtggcaggtgaacataaatgataggaaatcagaaagcagaggaaagatataaataaagggacccaaattacttttgggactactttaatcgaaaagattctctgtacgaaattgtttccttcaccttatcctagacttccttgatctccaaataattggagatgggttaggacagattcggtatggaatattttggggaggggggccgagggactttttatagaaaactactattatggagggcaaccacaagcatggaagctctaattctcttggaccgggggtgggtacttgggttcttcttgggccccttgcgggacaattatttcaaccttttgggtggg

SEQ ID NO: 95423 - DNA, 482 bp, Glycine max
  Clone ID: PAT_MRT3847_57179C.1
ccgcccccaaattaaaaaacttttttaactggggaaaagggaagatttcccagtttttagtttcagttccatcccttccaggaaaaacattttttttttagctggctggccccggggttcatatcaaattatctattttgggttcacggccgaaacattttgtcctcccaaccccaaaaaaacaaagaccatttttccttggattgatgagggggatgaccgctccaccaataaaatggaaaaacgccccgttgcaacaacttgcatgcatgggcggcacaagaaagagagattcgttgaatgaagtaagtaagtaataatgcgatcgaccacataattgggcaagcagaggggtttttttcacaaaaattttcatcgcaacggttcacgtaacaaggcctgctcccaccgtaactttaataaacaggccttccataataagcgtcataacatggggggggcccaccgccgtccccataaaa

SEQ ID NO: 95424 - DNA, 364 bp, Glycine max
  Clone ID: PAT_MRT3847_5717C.1
aaaagggaacccccgctttaaaggggggactaacataagaaaacctttaacccttccttaaaaaaatgggagggggtttgccccccaagccctttccaaaattcccattgggaatcccccaaaagggccccccgggcggggttacccaaaaaaggggtagggggaactcccaaagggatcaaagccaaaaaattttttttttccccccccgccttttaagggaattaccccggggggattattttcccccgccccctttttgaatttttgaaaaacctgccccccctttatatggtttaccaacaaaaaaaaaaaatttttctttaaaaggatgtttaacctttatcgccaaaaggccttcccc

SEQ ID NO: 95425 - DNA, 477 bp, Glycine max
  Clone ID: PAT_MRT3847_57180C.1
cccacgcgtccgcccacgtgtccggagaagatgaacgtgttatgttggtgatggtgatgttgaaggtgttggtaaccataacagtatactattattgtccttgtcttctcccccccctttcctctggctctttctttctattcctaccaaggataggatatttacaccaccaccagtgcaccaccgattttctctactttcctctccccttccatcgcacttctcggcctttctatggattcttctcttccatttccgccaattaatcctatctcttctgcaacttctctatggtgaacatggtctttctgaaactggggaaatccgttagaatattaaatgtttccccttcaagttcgaggtttggctccccggccacacctcatttctaggcaaaaacctcccatgttcttttgcgtggtgcttctattactggtgccaatttgtatgattggaatttttatccatggccaaaag

SEQ ID NO: 95426 - DNA, 566 bp, Glycine max
  Clone ID: PAT_MRT3847_57181C.1
cgataattggttcaatgttgtacttgtatctttttaattatgaatatatatattttgtttaaaaaaaaaaaaaaaaaaaaaaaaaaaaaaaaaaaaaaaaaaaaaaaaaaaaaaaaaaaaaaaaaaaaaaaaaaaaaaaaaaaaaaaaaaaaaaaaaaaaaaaaaaaaaaaaaaaaacgggggcgcccctttaaaaaaacaaaattttacggccccgggcccaaaaaaaaaaacttttttaaaaagcccccaaaaataaaaaaacccggccgttatcaaaaaaaatcacaatgaaaaaaaccccgctttccccaattttaatagtttgaaaaaaaaccccttttaaagaagatgcaaaaaaaaaaaaaagcccaaaaaaaaatggttttaaaaaaagtggccccccataaatggcaaatggaacccccctttaacccaaaaaaaaaaaggggcgggtggggggtttaccccaaaataacccgatatttttggaagcctaataagcccgcttcttttttttttcacccattactttaaaaagaggtttcgccttttttccccacaat

SEQ ID NO: 95427 - DNA, 503 bp, Glycine max
  Clone ID: PAT_MRT3847_57182C.1
tgaaagaggataaggaagctgatggtgtcgtcatgtgtgaaagaagttgaggaggatggggaagttgctggtcgtgaaaaaagtccaacgataaaaaaggtgatgagttcaaagaaatagacgaggataagacagatgatcatatatctgcaaatgatatccctgaagaagacgctgatattacggaaacaatggaaggtgaaccataaaatgcaaaacatgaatctgagaaaccagtaccacatgctatggaactggagggtggtattaaggagaaggaggacagcacagaaaatgataaagttgaagtggtgatggaggacgatgagaccgatgaagatgaggataatgataatattgataagtcaaacgaagagaaggcagcatatagctcgggtgagaaaggatcacaaaaacgtcggagagggaagatcaatggggagatagtgaaagaccaactagaagaactcgcgaaaacagagccaaggactcctactatcgat

SEQ ID NO: 95428 - DNA, 291 bp, Glycine max
  Clone ID: PAT_MRT3847_57183C.1
tttctgccgcttccttgggtggcttctcctatcttgccttgattctcttgtgggcttcctgctctgcagtcctctgctgggcctcagctctctccggggctgctttctattttgccttctaccttttttgcggctgccaatggcgttttttgggggagctttgcctcctcctttcgctgtattcctctactttgcatcgctggggtcccacagccttttgtgcagccgtgagtgcttgtttgtcggcgttggtgtccagtgctgttggtggctggagctccagcttgaagg

SEQ ID NO: 95429 - DNA, 399 bp, Glycine max
  Clone ID: PAT_MRT3847_57184C.1
gactaactcttcaatcatattcgtgccagcgcatcacatgcttttcacggaacaaacaataacatatgttggtaaaaaaaaatcccaattgccagatgtatcactgaatgcaggaacattccggttcatcctaaaaaaaccggaccggtattttttggacttcgaaacttactattttttgagacgaatggactctagattaaagagatgagaagagaaagacttgggacaaaacgttcaaaacaaacctatattataaagagcaactctcgacctatttaagtgaaacatgcggggcacacacggggggtgcgacaatagaaaaatcgggcttagcataatgcacatgtgtcataagcacaaaagaacccgccgcatatttgaagaaaccactacccc

SEQ ID NO: 95430 - DNA, 239 bp, Glycine max
  Clone ID: PAT_MRT3847_57185C.1
attaactgatttggcctttgcgaatacttgatcctaggaccctgcattaacctatttgggataaacatatacgtagtctcatacgacatgcaaaacaaacatgaataactcaacaagacacaaggagcaaagccaaaagtcctcacaaaaatctagattgaagccgattgacttgaatagcggggcactaagaaagataaaagggggatactacgaggacggacacaatgaacaaaaag

SEQ ID NO: 95431 - DNA, 2777 bp, Glycine max
  Clone ID: PAT_MRT3847_57186C.1
gcacgcggctctgctcggcggcttatttggtcacgaaatagggttttgcttgcatcttagatcgataagaaataaatagcgggaaaagctagcgtagggtgcttccacaaggggagggtcgcgagttcaagtcaacaaccctcacaagtcccgtttttcatccaaatcttctcgcaaccttcataaaacctctgtcaaggacagactcgcaatcgcaaaatcagagcgcaatgtcggcaaaggagctcgtgcagctcgatttcagagaaataaaatgatacgtagataaaaaaaaccggagctgatgttgctaaggaggatgacattgaatagaaaaacgagaacggtcataaaaaagagaagtcctcctcatggtttgaattcgataattttaaaagaacacaaaaacatgttcttgctaaagctttagaactggatcatgaaaaccgggaggactgtatttcagttggctcatatgctaggttgcatatcatgggagtgcccagtgctgttgcttcaaagttatctttgcttgcaaagacaatcccagttacagcatgtggcctgctgaaacatgagtccaaagtatctgtccttcatttcagtgtgaagaagcatgaagcatatgatgcacccatcaaatccaaggaagagttaattttccatgttgggtttcggcaatttgttggctggccaattttctctagtgagttcataaatacagacaagaacaagatggagaggtttctccatgctgggcgtttttcagttgcttcaatctatgcaccaatttcctttcctcctcttcctacgataatcctaaagagagatggagagaatgctgcccctgcagtggctgctgttggctcactgaaaactgttgatgcagataggataatccttaagcgagttattttgacaggttatccccagagagtgtcgaaacgtaaagcttctgtgagacacatggtcaatcatccggatgatgtttcaggggcaggagatttccaattgtctaaaattgaagttcttaaagatccttgtcctttgaattcaaggaaaaatcaggacctaatggatgccgatgaaatgcatgatacaggggtcattggttctctatgtcctgattctcaaaaccaggaagccttagtggttgagattatacctgatcctcttgctggagagcagacatggccaacagaggctgaaattgctaaggctgatgaagataaaaagaaaaagaagataaaaaagaggagtcttcctcatggcacttcagaatatcaggctgcttggattgtggacgattctgatgaggaggagtcggattgtgacaatgaaaacgatgatggtatggtgttggatgaaggggaggatggatttcctggtcaagaaaacaggtattcagactttgatggtgatggggcttctcttagattgggagattctgatgaagaaactgacattgattcagtgatgatggaagtagataatttgacgagagaaaagatagaagatgaactcaaggaacttaaagaagcacatgctgcagatgaggagtttcctgatgaagtggatacaccattggatgttcctgctaggaagcggtttgcaaaatacaggggactcaagtcctttaggacttcttcatgggatcctaaagaatctctaccccaagattatgccagaatttttgaatttgataattttaaaagaacacaaaaacacgttcttgctaaagctttagaactggatcaagaaaaccgggaggactgtattccagttggctcgtatgctaggttgcatatcatgggagtgcccagtgctgttgcttcaaagttatctttgcttgcaaagacaatcccggttacagcatgtgggctgttgaaacatgagtccaaagtatctgtccttcatttcagtgtgaagaagcatgaaacatatgatgcacccatcaaatccaaggaagagttaattttccatgttgggtttcggcaatttgttggcaggccaattttctctagcgagttcataaatacagacaagaacaagatggagaggtttctccatgctgggcgtttttcagttgcttcaatctatgctccaatttcttttcctcctcttcctacgataatcctaaaaagagctggagaggatgctgcacctgcagtggctgctgttggctcactgaaaactgttgatgcagataggataatccttaagcgtgttattttgacaggttatccccagagagtatcaaaacgtaaagcttctgtgagacacatgttttataatccggaggatgttaaatggtttaagcctgtcgagctttataccaaacgtggtcttcgtggtcgaataaaagaacctgttggtacacatggtacaatgaagtgccttcttaacggggttcttgaacagcgtgatactgtatgtatgaatttatttaaacgtgcatacccgaagtggccaacccatcattttcctctatccgaataaaggaattcagaagtgtatattgattgggaatgaagctctggttcagattgacttcctcgtatggaggagatgcagttttgtgacaaatttattttccattttctccaccgccagttacccgctgcccatgtgcacttgtgagagaaatcagacgttttctattttttttttttttgcatacaaaatactgagaatgtaatagttattcacatgtcggctaaagggtgcttgcgtaaaatttattaatctttttagtgcagtactgaatttatcgtttc

SEQ ID NO: 95432 - DNA, 572 bp, Glycine max
  unsure (1)..(572): unsure at all n locations
  Clone ID: PAT_MRT3847_57187C.1
cccaggctccaacgccaccgatttgggaaattcttcataactaaaagagggtttaacgcccagcaatatacacttcctttacaaggagccctggccaaaaaggcaaaggggaaaaggagcaaaaaaatctatatgcctgacttggtacaccacaaatgacaggtactcatttaatttttttcaagatnngcaaactgggttttctttttcaacctttcataaagggaacaaaggtgaacaatccaacaatctgggttttactggattccgggtgggctcgggcccaaggcacataatttctctcgggaaaggaataaaccttggtgaaaggtttaaccatttgtatcttgggctttacatttaacgccccaaaatgcttttacccattgatccaaacctggagannnaaagacataaagggttggcctttatcnntacatttctttacccgggaaantcctnnnanaaaaagttcaagcacaattttcaagccanaattcaataatagggcctgaacccctttaccaaattntccatgaacnnngcnnngtttataagngttaaacttcccc

SEQ ID NO: 95433 - DNA, 1660 bp, Glycine max
  Clone ID: PAT_MRT3847_57188C.1
cgagcgggccgccaatgatgatgatctgaggaacccgtgtttgtctcgtgtctcatctcatccatgaagagaaggagaagaagggatccaaaatcagaagaaagttacgatttttcgagatgggtctgtccaaggagaatctgaaaggtctcatactagctttggtgtcaagtgggttcattggggcaagttttatcattaagaagcaaggccttagaagagctgcagcagtttctggtgtcagggctggtgttggtggttattattatctcttggagccactatggtgggtgggaatgatcttctattcctcttgagtgctgttttggctgacattattctgaaagagaagctacacaatcttgggatattgggctgtataatgtgcattgctggtagtatcattattgttattcatgctcctaaggaacaacctattacatctgttctggaaatatggaatatggccactcaaccagcttttctggcatatgtgggctcagtaatagtgttggttttcattctggtcttccattttgcaccaagatgtgggcatacgaatgtgctagtttttactggaatttgttcattgatgggttccctctctgtgatgagtgttaaagcccttggaacttctttgaaattaacttttgaagggaaaaatcagttaatctacccagagacatggttttttatgttagttgtggctatatgtgtcatcatgcaaatgaattatcttaataaggctcttgacaccttcaacacagcaattgtatctcctatatactatgtcatgttcacaacacttacaatactagccagtgtaataatgtttaaggattgggatggacaaagtggtggaaactattgtgtcagaaatatgtggcttcatcattgtactctctggaacaataatgttgcatgcgactaaggacttcgagagaagctcttcttttagaggtagtgatcctttatcgcctacgctatctgcccgactttttaccggaaatggtgactcattacttaagcaagatgaggaaaatggatctcccgagagtaatatgcgctcaagaaggcaagaattgtattagatggttaaagatcttaatttatttaattgtagggggaagaagaagcctttccctggagaatctgaatgagatgcccatcagattatactacaccatgaagctgtaggtaccaatgaaaccataaaatgatggaagatttgtgaagccattcttttaccctgagcatcttaggaatttatcctcatagattttagttctgactttgaaagatggttctggaaccaatgcttacataatgtatagcttgtccaccgtttcttgtgtcatgaatggtttgttcactagtcaaaagtagctaatatgctccaaatagttattagattgagatgattagttgtatttgtgaggctctctttacatgaaccaaaaaagtgagtgggggatggagattattagtttgtgaaaattatatgcatggtgattttgctttctttttcaattttatttatttgttttctttgtcaatttgacttagcatagagagattcatttgtggtttgtaagtaatgagatatgtacaggaagctaagacccttccctcaatgttagtttgctatgaataagaaata

SEQ ID NO: 95434 - DNA, 418 bp, Glycine max
  Clone ID: PAT_MRT3847_57189C.1
gtcgcatgcacgcgtacgtaagctcggaattcggctcgaggtctcccttcttcttgttcctttggctgtgccagagaccacaccaggctccatctcatcttcttcctccctgatctcggtaggtggatcatctaggcaacggatctcattgtccacaccatccccattaaccaactccagtgggctgcctttgctagagatggctacacctccatgcaaaagcttgactttctccagtacctcctggcaggccttctgggccacctcaaggtcaatcactgacagttccccgaccccctccgtgatgacgcttattaaggagcccccgttattccctgatgggctaagagtaagctcataagttggcttcaaggtggccaggcctccactaccatgtctcccattgggtacagcccat

SEQ ID NO: 95435 - DNA, 265 bp, Glycine max
  Clone ID: PAT_MRT3847_5718C.1
ccatatacccaggtcttatttttttttatcctattcacgtcacacgctgtttggtgtacattaattgacccctattcttcagtgaataaatgaaaatcactcggccggctctctctgctaggtgccataacctttcgataacagccattgacagagggcatacttaaagtgggataggcccataaacccctctggacagaatgatgaaggtcattgaaaccaaaggtccaacagtcgctgaaatgccgacaaaaagggccatgga

SEQ ID NO: 95436 - DNA, 1000 bp, Glycine max
  Clone ID: PAT_MRT3847_57190C.1
ctttgaaattaacttttgaagggaaaaatcagttaatctacccagagacatggttttttatgttagttgtggctatatgtgtcatcatgcaaatgaattatcttaataaggctcttgacaccttcaacacagcaattgtatctcctatatactatgtcatgttcacaacacttacaatactagccagtgtaataatgtttaaggattgggatggccaaagtggtggaactattgtgtcagaaatatgtggcttcatcgttgtactctctggaacaataatgttgcatgcgactaaggacttcgagagaagctcttcttttagaggcagtgctccttcatcgcctacgctatctgcccgactttttaccggaaatggggactcattacttaagcaagatgaggaaaatggatctcccgagagtaatatgtgctcaagaaggcaagagttgtattagatggttaaagatcttaattcatttaattgtagggggaaggagaacccttccctggagaatctgaattagaccatagaatgatgggagatttgtgaagccattcttttatcttgagcatcttaggaatttgtcctcatagattttagttttgactttgcaagacggttctggaaccaatgctttgcagggtacataatgtacagcgtgtccacagtttcttttgtcacgaatggtttgttcacttgtcaaaagtagctaatatgcttcaaatagttagattgagattagttgtatttctgaggctctctttacatgaaccagaaaagaagtgagtgggggatagagattattagtttgtgaaaatcatatgcatggtgattttgctttgtttttcaattttatttatttgttttctttgtcaatttggcttggcatagaggattcatttgtggtttgtaagtaattagatatgtacagaaagctaagagacttctctctaaattttagtttgctatgaataagaaatatgttttcattcttacatt

SEQ ID NO: 95437 - DNA, 273 bp, Glycine max
  Clone ID: PAT_MRT3847_57191C.1
ccacgcgtccgagacgacaggagatgacgaccacatacagcacgagatttaggcacttatagaaaatggtattaacatcatggtatctttggcaagagtgtaatttgcgactcacgataccacatgctacagatgctcgcatcgatcgtagctaatgaacttctgaatggtcataacgtgatgatgatactctgcaatgagatttgcatttacagttgtctctgcacgcacaatatgaactacttgcgtttacttcgtaagcgcatgaacacc

SEQ ID NO: 95438 - DNA, 3182 bp, Glycine max
  Clone ID: PAT_MRT3847_57192C.1
ggcgacataacatggttgcttcttcaatgatgtttgcatggtatcctctagtgctgttttggctgacattattctgaaagagaagctacacaatcttgggatattgggctgtataatgtgcattgctggtagtatcattattgttattcatgctcctaaggaacaacctattacatctgttctggaaatatggaatatggccactcaaccaggttagaatgcactgtatttttttaaaaatgcaattcactgaagttccttgataacaaagatatcctccttgcttgcagcttttctggcatatgtgggctcagtaatagtgttggttttcattctggtcttccattttgcaccaagatgtgggcatacgaatgtgctagtttttactggaatttgttcattgatgggttccctctctgtaagtaaattaatttactgttatctctcctgcaatgtctctttgatgattgatctaaacttcaaagttttgcttactcaaagttatcaagtttaaaacatatacaaactaagggacctgatttcatgttgaaagtaatttggttttcaccattcattcctattttctattaatgaagttcatttcataaatatagtttcagcttccatataatttttatatattttttttgtgtagttatatgagacttctatggcctaaagttttttccctttcccccaattacatggataattatttctgtcataataactgatttactgaaaaatgttttctttgtagtaacactgcaataatatggtggctgatctatattgaattgctataattttgcaggtgatgagtgttaaagcccttggaacttctttgaaattaacttttgaagggaaaaatcagttaatctacccagagacatggttttttatgttagttgttgctatatgtgtcatcatgcaaatgaattatcttaataaggtttgttacctgatgtctcttaaaattagcatgctgggcctgtcgtacatatatttttatcaatgacctggaagttcaaacatttgacaaattcttaagttgaaatataacttctcgttgtaatttgtaagtacataggatgcaaattatctcttttctattttctgtttcatccattctatcttgatccaattatttcataggaactgctctttgttttgagccttttgggaggggggggggggggagaaagatttactgtaaagaggagggaataaaatactagggaggaggatatcattgggcctaagaggctcaaaaatgaaattatgcccatgaataaggatctgagagattatggagaagagataaacaagtttcacaggaggcagaagtggggaggagtgcaacatgtggatgtggttgaaggagagagagaaaataactggtggcaaggggagagagggaggagagagtgagaaggattatatgatgggtgtgataactgaatagggagaatgacaaaattggtatcaatattggctaccctgagtgaagaaaaggggttctctaatttctgctatttgtttattttgtattgttcatcttgtaagaagctagtctccacctattaccctagctttctttttcattttcttgggttgcaccactgtagcataggtttatactcaatttatagtatttggtgttttgaggaaaatataggtggtcttgttgccagactcttcctttgaattggaatgcagggaagcttagctacaacttcatatacaattgaaggaagatgacaactgaacataaaacagaatggaaaaatcttacgaactgaaactctgctaagctatttaaaagatctagaattcttttaatacctctttttaatatttcttaagttaatcttatcagacagtaagagggaaattacattccacaggaggactgtttctgataagataatcagtaattgctcctatgattttactagttgcatgttaaatcctccatacaacatacaatattacaacatgtgaattcctatgtaatgtaaattcaagatagaacaaacctcagaactcaagacagagtacccgacactaaacctcagaactaagagattacataatacagcaaaagtcaaatcaaagatacaacaaaagtaaatggttttacaacagaactagtaaaggtttggtgtttggtactctatcattgctaactgataatcttatcagaaagagtcccccactatcaattgattataagttctctatacagcatgcaacatgattttacttttatagtatttattagcctgattaggctgttacttttctgtttctttacttttgttggcttcttaatctgtttgactgtgctatcccttgatgtaatgatttgatcttttagatgtttaaaatgaaagaattgtttaatttttgaaaatgctggcatttatattgctaaactagcggtatcaagaactcctcacaatgacatagtgatccattatattttgtgaagtttattattcttttttctttatgaagtcttgtttaaaatgatgtccaatttatattcaatggaaaaagaaatcaattctagagaattcagattttctgtgtattatatacaaagttcttatatatatgaaattttggatcaattactaattactcttcactgacatgattgtattgtaattatttcaggctcttgacaccttcaacacagcaattgtatctcctatatactatgtcatgttcacaacacttacaatactagccagtgtaataatgtttaaggattgggatggacaaagtggtggaactattgtgtcagaaatatgtggcttcatcattgtgctctctggaacaataatgttgcatgcgactaaggacttcgagagaagctcttcttttagaggtagtgatcctttatcgcctacgctatctgcccgactttttaccggaaatggtgactcattacttaagcaagatgaggaaaatggatctcccgagagtaatatgcgctcaagaaggcaagaattgtattagatggttaaagatcttaatttatttaattgtagggggaagaagaagcctttccctggagaatctgaatgagatgcccatcagattatactacaccatgaagctgtaggtaccaatgaaaccataaaatgatggaagatttgtgaagccattctttt

SEQ ID NO: 95439 - DNA, 273 bp, Glycine max
  Clone ID: PAT_MRT3847_57193C.1
gaaagtatgaaatcgtgtgcttgcaaacttggaagaaaacagttcatgactgcataccttctagttctctagtgttcactggaaattaaagacactaaaagttaacaattcttattaattaatcatattaatgtaattggaatttctagaaatattaggggaagcaactttatacgcaaagcataacagaaaaataaggtgtattttttctttgaaacctatgaaatatactggccaggcacggtggctcatgcttgtaatcccagcactttg

SEQ ID NO: 95440 - DNA, 259 bp, Glycine max
  unsure (1)..(259): unsure at all n locations
  Clone ID: PAT_MRT3847_57194C.1
tcatgatcggcatttaaaanaaaaaagcagtgttatttcntggacatgcttatttcattgtctgtgtacccacagagantatgtgcaagtactacagtgaaataatcacttccagaaaggatgctaaaaactaagaatcgcatacttcaatatgatttggcaaatgngcgaatcatatcatatgaggaattggnggggacttgaaattgtgtgatacncggatgaattggtgtgattgcntataactgacatgaaccac

SEQ ID NO: 95441 - DNA, 414 bp, Glycine max
  Clone ID: PAT_MRT3847_57195C.1
gcaaaatagatcagcttaaccagggatgagatgacaactggaggggaaaacatgggctgcaaaatgaagcgatatcaaatgcttaccaaaggacaacgctatcttagaaggagatctttttggccattatatatggggtggcctatggtctatttacagtgcttctcaaaaaaatttctggtgaagaacgagaacgagtccatgtgcacatgttgttgggatatgttggattgtggacacttgtagcactatggtggctcatgtggacattgtcagcctttggaattgtaccgaagtttacaatcccgcattcaaacaggagtggacgaaggggctcttgccaacggattcggcactttgtgttgtgtggacaactccccccgtggccaatttgggaatgtcacttaccattcc

SEQ ID NO: 95442 - DNA, 345 bp, Glycine max
  Clone ID: PAT_MRT3847_57196C.1
gatagaacttaaattaacggccttggtcggagcttacaaaaagatgggttcatttggcgctctttgggccatacactgactactcatgggctgtattatgctggcaactgcaagcaatccactggtgcgaaggatactacaacatggttgatgggggttctgatccagactatggccatcaagatccaggtcacatgcgcccaacaggtctttatcgccggccagatccaatttccgcctatggggctcaaaatgcatttgccgtccgggcgatacgttatggaccagcatgatacctataccatccggtgcaacgggagtgatagctggcgtgattggagaggt

SEQ ID NO: 95443 - DNA, 1595 bp, Glycine max
  Clone ID: PAT_MRT3847_57197C.1
gaacaattaaaacttttttttttgtatgttttgattgttaatcaatatgtaactacatcagtctatatatataggaccggctatattatataaggctacattcggctcgagctcgagcagttcatataccttgtgtttgtatagcatatattcctagttgatattatctatagatggagccaattgaacaaggaagccaacctgaaaaggaaaaatggaagggcaaggccacaacagaagtaaaaggagccaaagcagaacaagtttggcctcttttggaggatttctttggccttgacaagtggttccccaccctctctacatgcattccagttgaaggtatctctggccaacctgggtgtgttcgcttctgcgctggtttcaagacccctgtggatgatggcaaacaaactgtgaattggactaagcagaaactgctatccattgacccaactcaacgggtttttagctattcgatcgtggatgggaatgtaggatttcactcctacgtttcaactttgaaggtgctgccaatggctgaggggtgtgagattgagtggctatatgaagttgaacctgttgaagggtggaaactggagcatcttgattccttcatagacacgggcttgcaggtcatggctcagaggatgcaagcagctttgaagacaatggaggaagcagtattcatggcttaaaagtaaggacaaaacttatatactgttgctttggtgttgtttgtattgttgcaggatgatcacattctttaacacacccttctttaacatattttaaaaattataaaaatagaagagacggtcattaaatgaattgtgaaattcaacaaattttataattttctataaatttcagtcaataataagatatatgttaaaagagggtgttaaagaatttattaaccttcatcttattctttaattatagttgaagttttattttgataatccatgtaatctctgttgcaaacctttattacaccgattatcaaaatgaaattttaattttgattggagaagaagacaaccaacccttacaaaagtatatctaagttttgtcctgaagcaattaaaggagtgttagtgcaataaattctaataataagaaataacctaaaataattatatttttaataaattttaattattaataaagaatgtgtgaaaaaatatgttagtaatatttgtcaagggattatcatttaccaatatatggcaatggagccttttcagtttatcaagtacttttattgctgagaaaaaaaagtactttaattgatgtgtttgcgatttcagtgtatcattagtatgtacttactagtagaaaaactgaagatatgctgttgcattgtgttgtagcaattaaataaaaatttcagttcaaagttactttgagttacgaatatatatgaacacttgtttactctccattaaaaaaaaaaaaaaaaaaaaaaaaaaaaaaaaaaaaaaaaaaaaaaaaaaaaaaaaaaaaaaaaaaaaaaaaaaaaaaaaaagggggccgcccccttggggtccttgccacccgggaattaaatccggaacgggtcttggggggggccc

SEQ ID NO: 95444 - DNA, 333 bp, Glycine max
  Clone ID: PAT_MRT3847_57198C.1
gagatgtcaggttcggccttctgattttcttccctttttgctgcattttttcagcttagcaaaatttatcctacttcctctttgccaccggtgttctttctgttaccaaaacctgaactcctgcatgacttgagttcattttgctggctttttttgcctgttgattgtcatgcttatcatattatattacagatattttcattcattgatgtggagaagagtgggacaattacgttcagacaggtaactatttgcaataatttaccctgtttctgtgctatattgatcagaagtagcaattgatactacaacatttttactattttgtttttt

SEQ ID NO: 95445 - DNA, 432 bp, Glycine max
  Clone ID: PAT_MRT3847_57199C.1
gggctcctcatacccatcatgctgctgtgcatttcacttatgttctcttatctggctaagcattatgcatatggaggatggctaactagacagaggatgcatgttgattgcatggatgctgaatggactgctgcgtacaataaatcagggatagctgcggatgctgcagctgaatatattgtgaacatacttactcatgccgctctactcttctctaacacactgcatgatgcatggatgtgaaggtcaacatgaaccttgtgggtaatacatcactctcaatagagagcataattgagctgcttcatgcgaagccactatcaaagctactgaccatggcactgcctcacagcctctcactcatgggccaaagaatgagcgaagaatatataccattctggctgctgcttatggagcgatggcacccaatag

SEQ ID NO: 95446 - DNA, 258 bp, Glycine max
  Clone ID: PAT_MRT3847_5719C.1
ccggggcgacccacgcggccgtaataccccgaggaacaccgggccccacacgcggcaaacccaagcggaccacgcggggcgccaacgacacggcccagggcaaggaaacccccgcgcgagcacgagcgaggggggcggcccccgcggccggacacagccaggacaccagaggacacgcggcaccaaaacgaaagggacgaagagaggcgcagaaccacgggcaacgaggacagaggagccggcccgggacccagaaag

SEQ ID NO: 95447 - DNA, 381 bp, Glycine max
  unsure (1)..(381): unsure at all n locations
  Clone ID: PAT_MRT3847_571C.1
ttgaagtgagcaccangcgggtctctaggaggaaggactacaggcacaaactgctggatacagacttataggctccatttggatagtagaggaagctactnnctanntagaataacatgcnncactctcnntatctcnnntagactaaatgggatccatgatgctatgaacacactactagtacataccaacccaaattcctctcctccaagaaactgcttgcccttaacttcactctcaccatgctgaacaggctcatatggttcttgaacattcttatgacgctctttctgatcaaccnnnaaaacatatttccatacagcacccacaatcctatcatcaatgactccgtaccagacacgatccaaggctcgtttggta

SEQ ID NO: 95448 - DNA, 259 bp, Glycine max
  Clone ID: PAT_MRT3847_57200C.1
atcgtagtggaatagctctagaatgtctgatcgatgcagcacagagccggaagatggcattgagatcgatgcgagatttagcgattagcgtgattctgacaaacattacgagaactcaacatttcgacagtgtcgtctttatccaaaaagcacagattctaccacttccgatgacactctatggatcaatctctgcttcaatgtactcgcatctagcaacccctcgatcagctcgggaacccactctcgtcctgcaagg

SEQ ID NO: 95449 - DNA, 583 bp, Glycine max
  Clone ID: PAT_MRT3847_57201C.1
ggctcgaggcttttcccccaaaagaagcaaaaccactgtcactcgaacaagaacaagaagatgaagattaacgtcaagactctcaaggggactcactttgtccttcaagtgaaccctcaagacacggttgctgttgtgaagaagaatatagagacagcgcaaggtgctgatgtttaccctgctgcgcaacaaatgcttattcatcaggggaagaataaggtatcaagtggagcctcatctgcgccctcaaacctgggaacccaacctcaaagttctttgcctcctacttcatcaacatctcaacctcctgcatcggctgtaggacagggagaatccaattctgagcagagtccagttataactcctcccactattgctgtgcccagtatctatgatcatgcagcatcaaatcttatggcaggaagtaatttagaaacaactattcaacaaattctagaaatggggggaggaaattgggaccgggatactggtaccggtgctcttcatgctgcatttaacaatcctgaaagagctattgaatatctctattctgggaatcctgaacgagctgatgtaccagcag

SEQ ID NO: 95450 - DNA, 1433 bp, Glycine max
  Clone ID: PAT_MRT3847_57202C.1
tcgtacggctgctagaagacgacagaagggggaaggcgtgctgattctgtgcttttcccccaaaagaagcaaaaccactgtcactcgaacaagaacaagaagatgaagattaacgtcaagactctcaaggggactcactttgtccttcaagtgaaccctcaagacacggttgctgttgtgaagaagaatatagagacagcgcaaggtgctgatgtttaccctgctgcgcaacaaatgcttattcatcaggggaaggtgcttaacgatgccacaacccttgaggaaaataaagttgttgagaataattttgtggtgatcatgttaagcaagaataaggtatcaagtggagcctcatctgcgccctcaaacctgggaacccaacctcaaagttctttgcctcctacttcatcaacatctcaacctcctgcatcggctgtaggacagggagaatccaattctgagcagagtccagttataactcctcccactattgctgtgcccagtatctatgatcatgcagcatcaaatcttatggcaggaagtaatttagaaacaactattcaacaaattctagaaatggggggaggaaattgggaccgggatactgttaccggtgctcttcatgctgcatttaacaatcctgaaagagctattgaatatctctattctggaattcctgaacgagctgatgtaccagcagctgtcagatccctgattactgggcaagcagaaaactcatcaatccagtctacccaaccagctgtacctactggtggaccgaacaccaacccactcaacctgtttccccagggccttcccaatatgagtgcaattgataatagaggagacttggattccttgcgaaacagagaagagttccaagcattaagagagacgatgcgagaaaacccccaaattttgcagcctatgattcaggaactgggacaacaaaatcctcagctaatgcagatcatccaagatcatcaagaggacatacttgaccttatgaatgaacctgaaggggacgagaatttacagagtcagttggattccatgatttctgggactgtcactatcacccctgaagagaatgaggccattcaacggcttgaagctatgggatttcatcgagatattgtggtggaggcgttctttgcatgcaataaaaacgaggatctagcagccaactatctattggatcacccggatgaatttatgcctacggactagtcaaaattcaaattcatcttctccaactgaggtttcctgtgttggtccttttgtgtgattttgtattctgcaatctttgaagaagtgccaatgttaatattctatatcttttacctttggaaccatagcatcggtacatcgttttctgccattgactagaaaacagaaacatgttgaggaaaaaggccttggtgttcctttat

SEQ ID NO: 95451 - DNA, 374 bp, Glycine max
  Clone ID: PAT_MRT3847_57203C.1
attctgtgttttatgaaattttattttggattacattgggttttcgatgatcaccagaacttggagtgcttgacggagagcgggattggctcttacaacctggggtcttacattcaaaggacacaggggagacactgcatgcccagttactaaccattataccttctggcatttacagtataggctaaagccgaccgaccaaacttgggggacatgcatgatttccaagagggcttgccctgaaacaaatgatacatccatgactatactcggaaccgtgcagaggcgacaatgcgagaccgagtggtgaagcatactcgggcatatcgcatccgttgtgttggctggtgtctcttgccatgggaaccaatctc

SEQ ID NO: 95452 - DNA, 110 bp, Glycine max
  Clone ID: PAT_MRT3847_57204C.1
ggctcgagctttatgctatactgcatgaccattcaccgcttttagaacatcccatctcaacatgcctaggagtctctcgaagcacaatgtgaagatagctgccattgatc

SEQ ID NO: 95453 - DNA, 1052 bp, Glycine max
  Clone ID: PAT_MRT3847_57205C.1
ggacagagaagagaaggagaagcgcgggaactcaagttttccctccaaaaaccaaaagtaggctcctaagggacaccttagaagttgaatcgatcgttatcatcaacgaatttaatgtcaatgaaacagaaacacgcgtccggcttctttaaatccccaaatcttaatttctgtcccttctctcactctcactccgtccatcgccgtttacgcgtcgcggatattcttctcgccgacgaagatcacgacggcgacgccgtccgagaaacaccgtcgaccaaatgcttttcgcctcggaggctcgttgcttcgctgctcgcaccgctgaggccgaccaagggtctccgactccagcaacggcgccagaacgagaccggtgatttggaggcgccgtcgccgtcgtcgccgacgaacgaacttaaagggagcgacgaatcgacaggacagttacatgagagtgatacatcttttaagctaggggttggttgtggtttgctatatctgattgcagcaagtaaaaatgagctcagcaagatgattgagctgcagaaagaaatggaaatgctccttcaaaatgcgaaaggggaactgcaaagtaaagattcacttcttaagccattgaaacaaagtgacacacttgccctttccataactgatattcaagaagtttccagctctagtagtcatctttctattcattcgaatatacaatatgttcaaccagagtcaaaaagcgatacggttcctaatcggtttctgggaatatacactagcgaacaagatgaatgtgcagaagagataaatgagctccgggcagaatttgaaaatgagtagaaggggttgcagatgtatttggatggagaagctggatttgatgatgctcaacatgagggaggaaagggagctcttgatgactctagttgaaaaagtcactaattcaaggtttggtgaaataataatggaacctcaaagagcaaattatgatgtatcatttggagttcctccaattgaattggagagaaagttgcatgaactgctttgaacacgactgg

SEQ ID NO: 95454 - DNA, 188 bp, Glycine max
  Clone ID: PAT_MRT3847_57206C.1
ccggggaagcaaagtcctgcttaatccaatttttgaggcaaaatgtatgccttattatgaatgtgcccttgcacccataacatgaaaatttctgcatttcgacattatagaggagtaatgaacatgctaattgtttacgtccatgtaagaactgtttaaatgttcaatttaattagtcctgaatatgg

SEQ ID NO: 95455 - DNA, 336 bp, Glycine max
  Clone ID: PAT_MRT3847_57207C.1
acactctcacacataaccaatggcctctatctctgctccaacaagaacactctcttcacccattcaaccaaacgcttcttccgtcccttcaaaccttcttcttctcctttccctcttcaatgcaccacaaaaaccacctgcagcaccctccaacaacaacaacaacctcgccgcaacaacaactacaacgtcatcggaatcctcgaagagcgcggtctggttgagtccatcaccagcgacgcgctccgcagcgcgtgcctgacaccggcacccctcaaggtctactgcggcttcgacccaccgcgggagtccctccaacctcgcaacctcctcgcc

SEQ ID NO: 95456 - DNA, 352 bp, Glycine max
  Clone ID: PAT_MRT3847_57208C.1
cagaaaaaacccatttattgaagacaaacagaccagtgcttttagaaccacagcgggtgcactctgaatgcggttgggttggacaaacaactggaccgacgcacggggtagtgcacaggcattcgtcaaacagtaggtccaacccccaacaatataaacgggaccgttcaagacccatcatgctacttgagttcttgggttttcagcttatacttcacccttaggagaagcgtggccttccaagaatccacaggggtcatactatcaagtgccttgtcaacatcagtaatctttgcatcttctgttttatcaatagctgaggaggggcccggccactacctatatgcacgtg

SEQ ID NO: 95457 - DNA, 284 bp, Glycine max
  unsure (1)..(284): unsure at all n locations
  Clone ID: PAT_MRT3847_57209C.1
ggtccaacatggctccgcggttgtgcatcatctctgcagcagcacggcggctgctaaggaagccgggaccctgtnttggggacctcgcggctgcgcgtgctgtgcgattctattccaaggacagtgaaggcanctggttccgctccctctttgttcacaaggtggatcctcggaaggacgcncactccactctgctgtccaagaaggagactagtaatctctacaagatccagtttcacaacgtgaagcccgaatgtctggntgnctacaacagtctgacggag

SEQ ID NO: 95458 - DNA, 540 bp, Glycine max
  Clone ID: PAT_MRT3847_5720C.1
cggtgttgccattgggggtggaattgaaaaaggaggtggcattggaggtggaataggcaaaggtggaggttttggtgggggtgttggaggaggttccggtggtggcattgggggtggaattggaaaaggaggtggcattggaggtggaataggcaaaggtggaggttttggtgggggtgttggaggaggttccggtggtggcattggaggtggaattggaaaaggtggtggcattggaggaggaataggtaaaggtggaggttttggtggtggtggaattggacaccactagagcgttgccaacgttgcatgcatgacaaagtgatattttaacgtccttgtattagccatgataattggtttattgaaaaatattgtgcgagtaagagaattaattattaatgttggtttcataatattaatgtgctctgtttttatttatagttaacgttgaaggaaagaatcggagatatatcatatatgtactatttttgtattcaatgagaagaagaaatggtaggaaaatcactttcaacttcc

SEQ ID NO: 95459 - DNA, 791 bp, Glycine max
  unsure (1)..(791): unsure at all n locations
  Clone ID: PAT_MRT3847_57210C.1
gaattcgacctcgttacccggggatcctctagagtcgacctgcaggtcggcatcaagtgtttgctagaaaaaaaaataaaattcggtaagtaaaaaataatcatctttcaaaatttgcttaccattgatattccatattctcattgaaccatccttggatgcagtgattatttgctcagagtttggcgtaaagcataaccaagtcacagcactctgacacacaagcaataaacatataaatcatagtcaaaaagatgataataggaacatcatctttattatttttgtttaaattgtaaatttctctctcacacacacacatagagagagctaatatgcttgcatgtaaaaatagaccatctttattcttttgtttaaattgaaaatcacacacatgtgtgcacatcatgctcatgaaatttccattaatccaagatattctaatgtaatacatgaaaatataagactgtactgcatcatgaaaattaatgtataatatacctcttacataaacaaaaatgcaatgcatttgaaggaaaatatagtctttaaattttttggcttgaaaagtctatatatgtaaaaatgggagcttaaactaaattttaaataactcaaaataataatgctaatattaaaccttatgccccttaagctgcataacatttaaaacttccttcacagatccatcctttgcatatacaatctcccagatctgccanacatagtaaacaagaaaggtggaggatacattaagggaatcttttaagacagaagcagtaacattctga

SEQ ID NO: 95460 - DNA, 1679 bp, Glycine max
  Clone ID: PAT_MRT3847_57211C.1
gtggttgcagaatggaagaaagtcctggtggtcgcagaaagcgagcacacccttcttcttcttcttcatctccttcaccaatctccaagaagccccaaaccttcccttcgttccaagacatccccaacctcccttccaacatcaaatccctctgccatctcatcgccaccacctccgccgcctccgtcgaacactccctccaatccgccgccatctccgtcaccccccacgacgtcgaagaagtcctcaaactctcctacggcttccccggccaggccgtcaaattcttccgctggagcggccgccacctaaacgacaaccacacgccctactcctggaacctcgtcgttgacatcctcggcaaaaaccgcttctttgacgcgatgtgggacgctattaagtcaatgaggctcgaagggttgctctcactcgccacattcgcctctgtcttcagcagctatgttgcagctgatagaatccgggaagcaattatggcattcgagattatggacaattattgtgttgtgagggatgttgttgctttgaattcgctgttgagtgctatttgtagcaatggtaggactcttgatgcttgtgattacttgcaggttgccaagaaattggtccggccggataccgatacttatgcgattttaatggaggggtgggaaggggagaatggtgtagttggtgctaaggagacatttgctgagatggtgattgagattggatgggatcctttgaatgtgccggcttatgattcgttcttgtgtacacttgttagaggacctgatggattgcttgaggctattaagtttgttgattcgatgagggataggaggtgttttcctggtgtgaggtttctgaaggctgcattggatgagtgtcttaagagtcatgatgttaggactgctgagtttttctgggaggtgttggtggttgggaaggtggtgcagcccaccgctgagatgtacaatttgatgattggtttgtgctgctatcgtggtgacaccgatgctgcgaggaggatgcttgatgagatggtttaccaaggggcttttcctgatgtggagacttataacttgttgtttaagttcttgatcaaggggaggaagttgcgggaggcttccgtggtgtttgcagagatggtgaagaatgagtgtgtgcccgagcaggataactgtgatgcggcggttaaggcgtatgtggactgtggggagcctgttatggccatcaaggtttggaagtatttggtggagaattataagaaggatttggagcggacagcgaattttctggttgtggggctgcgtgatttgaataggctcccggaggcggttaagtatgctgaggatatgattgacagggaaatcaggttgtcctctaacacaatgtcaaagctgagacaaagccttatcaaggagagaagagaatttgtgtatgaagaccttttgagaaagtctaagtctcattaggtagtttgaaatttttcgctaaaactgtctagcttaatattagtgccgaatttgaatgttttgcttttgtctggtagagagggaagaattttgaagtggttattatctaaggtgatactttgattctgctatgggataaataggctccagcatgtgttatctttgtatatagttactgcaaaagatcctactagaattgcttta

SEQ ID NO: 95461 - DNA, 155 bp, Glycine max
  unsure (1)..(155): unsure at all n locations
  Clone ID: PAT_MRT3847_57212C.1
gcgcccacgcgtccggtgattgcagngattgatcttggttgactagatcttgtcataatgatgagcgttaattgaagaatgggcctgtcagaaacatcgtgcgcggaaggcctgaagaggcgactgaccccgacacgttggaggcggatttggct

SEQ ID NO: 95462 - DNA, 570 bp, Glycine max
  Clone ID: PAT_MRT3847_57213C.1
cctcgtgccgaatttcaacatggaaaagttactcttagtctattctcttctcttttctgtagtgattatcacatgctcagccactacttacacggttggagatagctctggctgggacattagcacaaatcttgatgcatggattgcagataagaatttcagagtaggggatgctcttgttttccaatattcatcaggccaaagtgtagaagaggttacaaaagaaaacttcaacacatgcaacaccaccaatgttttagcaactcatggaaatgggaacacaacagtgccattgacgagagctggagacaggtattttgtatctggaaacaagttgtattgccttggagggatgaaacttcatgctcatgtccaaggcgacgataaatcactagcaccaactctagcacctaaggctgtggctggatcagatcaaaacaccgccacacttccacagtctccttcatcaaagaagaacacacatctttcggcaggagcggcaaatcctgcaagggatgcacttcatctagtttatattgctcctatggctgctatatatgggatgatgaa

SEQ ID NO: 95463 - DNA, 1566 bp, Glycine max
  Clone ID: PAT_MRT3847_57214C.1
ctcgagccgaatcggctcgagccaaaacgctccatactcgatatagcttacaccacttgggccatcaaaccccaaccaattctaaccatttcttttcgttccgatcagtttttcgtctctctctctctctctctctgttttccgaaaccttaatctcttgcccgataagggaaaattatgaatcctgataagttcacccacaagacaaacgaagctctggtgagtgctcacgaaatagcaacaagcaacggtcacgcgcagttcacccctcttcacctggcgtcctctctgatttccgacaaggatggcattttctctcaagcgctttcaaacgccgccggcgaagaatccgcgcgcgcggcggagcgagtcatcaacaatgcactgaagaagctgccgtctcagtctcctcttccggacgaggttcccgcgagcaatgccctcgtcaaagccatccgcagagcgcagactctgcagaagaaacgcggcgacacgcacttggccgtcgaccaactcatcctcggccttcttgaagattctcagatagcggagttgctcaacgaagctggcgtggcggcttcgaaggtcaaatctgaagtggagaggcttcgtggcaaggaagggaagaaagtggaaagtgccactggtgattcaacctttcaggctctgaagacctatggaagagaccttgtggaacaagcaggcaagcttgaccctgttattggaagggatgaggaaattcgaagggttgtgaggattttatctagaaggacaaagaataacccggttttgattggagaaccgggagtgggaaagaccgcagtggttgaagggttggcgcagagaattgttaaaggtgatgtacctagcaatctttgtgatgttaaactcattgcattggacatgggtgcattggttgcgggcgcaaaatacagaggggagtttgaggagcggttgaaagcggtcttgaaggaggtggaggatgctgaggggaaggttattttgttcattgatgagattcatttggttcttggtgcggggaaaggtgaaggttccatggatgctgctaatttgttcaagcctatgcttgcgaggggtcagttgaggtgtattggtgccaccacgcttgaggagtataggaagtatgtggagaaggatgctgcgtttgagagaagatttcagcaggtgtacgtggcagaaccgagtgttgttgacactattagtatacttcgtgggttgaaagagagatatgaaggtcaccatggtgttcggattctggaccgtgctttggttgtagcggctcagttgtctagtcgctacatcactggtcgacatcttccggacaaagcaattgatttagttgatgaggcttgtgccaatgtgagagttcaactagatagtcatccagaggaaattgataaccttgaaaggaagagaatgcagctagaagtggaacttcatgcactagagaaagagaaggacaaagctagtaaagctcgtttagtggaagtgcggaaagagcttgatgacttgagagacaagttgcaacctttgatgatgaagtac

SEQ ID NO: 95464 - DNA, 1091 bp, Glycine max
  Clone ID: PAT_MRT3847_57215C.1
cgcttccgttttgtcaacggaattaactcattcttctcttcctctaccatccaccactcactcactttcttcaacatttatgttcataccactctgaaaaccaaaaccgggtcacttccaagttcttctcctttcctctgttctcagtttggtccaactccatcaaatttttcttcacccaaatggatcaaggaagagattctgcacttacccagatgaggaaatccgttgagaagcttggttcttctgcagaggggtatggggaccctacgttgatgaggtttttgatagctcgatcgatggaggtggataaagcagcaaagatgtttctgcagtggaagaagtggaggtctgccatggtgccaaatggattcatttcagaatctgaaattccggatgaattggaagcaaggaagatcttcttgcaggggttgtctcaggataaattccctgtcatgattgttcaaaccaacagacattttgcttccaaggatcagattcaattcaagaaatttgttgtatatctactggacaagacaattgcaagtgctttcaaaggaagggagataggaactgaaaagttgattggaattattgatctgcagaatatttcatataaaaatattgatgcacgtgggttaatcacaggttttcaatttttacaggcttactacccagaacgtttagcaaaatgctatatgttacacatgccatggttttttgtgagtgtttggaaactagtttctcgcttcctagagaaggctacattagaaaagattgtaattgtatccaatgaggatgagacaagggagtttgtaagagaggttggtgaagaagttctcccagaaatgtatggtggaagagctaagcttgaagctatccaagatgttgaattgccacccctagaaaacggaacaacaaactgattaatatgattgcgcatacagtcattgaggagtcttgtagggggcatctgatgcttaaagtctaaccctgtcatctattagaacttcctttcccagaaacatgtttaataaaagctaatcttgtcaaaataataatttcataattcatctcttatcccttcaaaa

SEQ ID NO: 95465 - DNA, 791 bp, Glycine max
  Clone ID: PAT_MRT3847_57216C.1
cttggcattattctcccctctcactctgttccttcctcatccacaattcaatggtattggtgagactggttcccatggcttcttcttcaatacgacccgctctctcaacaccttcctccttttctctcttcagcccttctcgccgtatctctttctcccatcttccctctccctctgtgtctcaatccaatagttttggcctcaaagcttccagagtgttgagacaatatggtaactccacgagaatcatggcatcaggggattgtctcatttagctgtctcccatctaccctctccctctgtgtctcaatccaatagttttggcctcaaagcttccagagtgttgagacaatatggtaactccacgagaatcatggcatcaggggacttgtctcattcagttgcggctgcttcaccagaaaatgtgcttgagtgaggcaaacgggacaagcgaagaatgcttcatgttgtatatcgtgttggggacttggacaggaccataaagttttatacagagtgcctaggaatgaagctcctcagaaagagggacataccagaggagaaatatactaatgcctttcttggatatgggcccgaagactcacactttgttattgaactgacatacaattatggagttgacaagtatgatatcggaactggatttggccattttggtatagctgttgatgatgttgcaaaagcagtggaactaatcagagctaagggtggcaaaataactagggagcctggtcctgtcaagggagggcgttcagtaattgcatttattg

SEQ ID NO: 95466 - DNA, 601 bp, Glycine max
  unsure (1)..(601): unsure at all n locations
  Clone ID: PAT_MRT3847_57217C.1
caactccaaaatgagagggaaaaggaatgaaagaggaatcaataaacaataattcgacagaaatggaataatgtaaggtaaagaaagcaatttgaggagttatatcattttacaattagttgttattctcccctcactcatccacaatacaagggtcaccccaatggtattggtgagagtggttcccatggcttcttcttcttcgattcgacccactctctcctcccttagattcttaacaccgtcatctctttcgctctccaacccttcttctcgtatctctttctcccatcttccctctccctctgtgtctcaatccaatagttttggcctcaaagcttccagagagttgagacaacatggcaactccacgagaatcatggcatcagggcacgtgtctcaatcgatttcagctgcttcaccagaaaatgtgcttgagtgggtcaaacaggacaagcgaagaatgcttcatgttgtatatcgtgttggggacttggacaggaccataaagttttatacagagtgcctaggaatgaagctcctcagaaagagggacatacccnaggagaaatatactaatgcctttcttggatatgggccc

SEQ ID NO: 95467 - DNA, 144 bp, Glycine max
  Clone ID: PAT_MRT3847_57218C.1
accacacatcctaattcaacgattttagggttttaaaatataccaacaaaccggcttatttggaaaatttgtaaatcggttcttacttcttcaatcttctatattaatacagtaagtatacatattatatatagatcaattatc

SEQ ID NO: 95468 - DNA, 346 bp, Glycine max
  unsure (1)..(346): unsure at all n locations
  Clone ID: PAT_MRT3847_57219C.1
gcccttatcgtgtgctccgacgtgcgtgggaacttcctgaacgtcgccggcccttcgattacggtcctcccggttggccgtaagtcaaaggtctttcttttgggcgccggtttatgggttgggggattggaaatagggttatggggggggtttgggggaaattttttagaggatattggcctttaaaaaatatttaagtgggtctttgcccaaagattnatagttttttacaatattttataaaccttttttgtaaaaaaaaaaaaattttttttttttttttttttggggtggtaaattggggggggggttttattgagagggagggggttaaatattttttttt

SEQ ID NO: 95469 - DNA, 214 bp, Glycine max
  Clone ID: PAT_MRT3847_5721C.1
atacaatacacattggctgctgggtcggtatagcatctgtgactgtcataggtatgtgcagttgaatctccaagaagtgctcgtcatgcttattatgctgctacacaatgtgctcgcaaaagcactcctccatgcatgagatcacatcgtcttatgactacggtgattgtgcatcatgttcgaacggtacccatgtggatgttgtgattactgg

SEQ ID NO: 95470 - DNA, 405 bp, Glycine max
  Clone ID: PAT_MRT3847_57220C.1
cacgcgtccgcggacgcgtgggtttttttattactattttacactactagaaaaaaaaattagggcacatttgttggtttagcttagatcaaacaagtactagtcctatttccctttggagtttcattgaagactagagattagagagtcctactaagatatttctgttaacaaaaatttcatttactgcaggtagtatcaataaaatagctcaccttttggtactgaaaaatctgggcgaattgaaaatatttagagcagatttgacagttgaaggagattttgaagcccctatatcaggctgtgaacttgtattccaatttgctacacctatgaactttggttctgaagatcctgaggtatattaattaaaccctgatgctgcgttgtgacgggtggcgctgg

SEQ ID NO: 95471 - DNA, 267 bp, Glycine max
  Clone ID: PAT_MRT3847_57221C.1
ttcagtgttgaaattgaagcggtggcactaatctaagaattatgactgctctaacgcaagaggagcttcttgcgcaacaccttgaacagcaaaagatccatgatgatgaacctgtcgacgaggatgatgatgacgaggaagtggatgatgatgatgacgatgaggatgatgaccatgacgaaggactatgaacgtgatgcatctggtacgtcgaagcataccagaagtgaaaagaagagtcgcaaggcaatgcttatacttggaatg

SEQ ID NO: 95472 - DNA, 466 bp, Glycine max
  Clone ID: PAT_MRT3847_57222C.1
ggccgcccccccggcccgttccggacctgccggctcggcccacccgtctttctcgcgtccgcccacgcgtccgactttttcgggctctttctcagttctctgcttaattccaagttcaagctggcgaaaacttggattagggctcccactctcctatctgggatagcacttcgtggggagacttttctatttctgtcctttctttcactctcttcttctcactgatccggatagacgtgcaaaggggccttattggtaaaacactagggcgttggtgcaaacgtttgctatgatcattttctctggtgacaacaggctcactgagagagcaattcttacttgcagagatttggacatctcggctgctgattatacattcgcaactgaatttacaaaactcctaccgcattacatcaggtggcatgtgtgtacctagttgatttacattctcccatcttttctcact

SEQ ID NO: 95473 - DNA, 235 bp, Glycine max
  Clone ID: PAT_MRT3847_57223C.1
aggcctaacacatcacgctatggggtgtttgctcacacactgagggtggaactccacattgcaagctctgagcttaggacttacagtgattgcaatgccactgtggacagaccagatcacggatgcgcaacttcttaaggatgtgtggaacattggagtcaaaactggcgctgatcagaaacagatccttcgaagagaaacactcacacattgcataaaggaaatattggatgac

SEQ ID NO: 95474 - DNA, 1632 bp, Glycine max
  Clone ID: PAT_MRT3847_57224C.1
tcggctcgaggagcccgtctcatcgatgatttctcttacgtgctctatttgtctatttaggatcaccccttcaaagaaagtttctggcttttcttcgtagctcctaaaagttattaaagtaaaagcacaatattatatataatcttggtacgcgttaagccttgcccttttttttttctttcttcttttggttcaatgaatggttttcgtttgaattgaaaacctgcgagccgaaccccgtctcatcgatgatttctcttacgtgctctatgggagtaattaagaaaaaaagaaagaaatggaacatggcttccccaaaggcaagttcaagagcctctgtgtcttttgcggcagcaactctggcaaccgtcaagttttctgtgacgccgcgatttaattggccaatgaactggttaagaggaacattgacttggtgtatggtgggggaagtgttgggctgatgggcttaatatctcagagaatgtatgatggaggctgccatgtcctaggggttattccaaaagctctcatgcctctcgagatatctggtgaaccagtaggtgaagtgagaattgtttcagatatgcacgagcgtaaagctgcaatggctcaagaagctgatgcatttatcgctctccctggaggatatggaaccatggaagagctgttggagatgataacttgggctcaacttggaatccataaaaaaccggttggtctactgaatgttgatggttactataactgtttgctcgcattatttgacaatggtgttgaagaaggcttcattaagcatggtgctcggaatatacttgttacggcttcatcagccaaagaacttatgatgaagatggagcactactctccttcgcatgaacatgtagctcctcatgatagctggcagacaaggcaattgggtaattatgcagaacaggaaaatgcagaatgaaacattgattgtttgaaggattatccaaattttttatttttgtgatgtaactcttcatcacttgaaatgtatacaagagtccctgtgtatggggccatatgttgtttgttacttactgtgcattgatttttttgaagttctggttttgcatcatttcatttaatgatcaatcgagtcactgtgagatagtcatatctggttgttatttaacactgtttaaagggtaaaaaagtgcattgaaattgtaaatagacagaggctagtatttttatggcaaattaaatctcagttgtgcatcatggggtggcagctggctccactatgcagtgccaaaattagacaatataggtgaatcatggtaccatagaagaaagtagagtgattaatctccataatttggcaactattgtagtcttttttcttttctattaaaaaagcagccctacctcaaacattctaaatggatgctgctaggataactgtcgtataattttggtttaaataaacttgtatctttggaacaaagatgttcaaattataagtatagttggtaaaatataaatcttgtctctgtatattgaattactgaacctatcccatagagtgttgatttttgtatttaattagttgattgtaaaaaatttgtagagtttatcataattagactcttattaaaaaaacct

SEQ ID NO: 95475 - DNA, 446 bp, Glycine max
  Clone ID: PAT_MRT3847_57225C.1
gaacgaaaataaaaaccccacatttgcggggatttacaacttgtatatgtcaagcatacatacgctaaattacctactacataagcaaccaggtcttagcatttccataattctaatcggaaaaaatgataccaatccccactgataaagtttacaaaatgaatgtttatactaaaaccccttatctcacctacacattacgaacataaacgagcatatttttggattaaatgggcggaaggagatatagcagcaacaggtggaaccctggaatctactccacaaacatttccaactatgcaaagcttgaaatatccattttgtccaaaattttagcccaaagaatatttaaagatccagcttgggtcggtcttaaaaccaatgggggcatttgcgccttctaacaaaccgaattgaagaaccccattaaccaaattgcttacccc

SEQ ID NO: 95476 - DNA, 286 bp, Glycine max
  unsure (1)..(286): unsure at all n locations
  Clone ID: PAT_MRT3847_57226C.1
gganaacagaactaagggagtggtccattgatcttcatgggaaaaaacacacacgcgcgcacacaaaacataaacgttaactgcaataacaacttacccgataatttttgcaagtgatgcatcattttaatattttggaaataaaataacccacgtaaaaaaatatttttaagatctagaaattacttgcaccagaggggcaaaatcctgtgcaagttgcccctaaagcctacctggatcttccacaggcttcttcaccttaagagcattggctttaatctttttc

SEQ ID NO: 95477 - DNA, 165 bp, Glycine max
  Clone ID: PAT_MRT3847_57227C.1
ggtaatcctaaaatcaaatctaaaccccacggtcctttagttggcccattccttttttttcctttggaccccccttaatctgggcttgagctcatttggaacaaacttaattttcttaattggaaatggaactctataaagggctttgtggtaccatgggggggt

SEQ ID NO: 95478 - DNA, 514 bp, Glycine max
  Clone ID: PAT_MRT3847_57228C.1
ggaagaaaaaaaaacccattatcaattatcatcaactacagagcaatacagggaaggggaaaaaaattaaccaactcacacaactcaaaccccacaaatacaaacagttgaaaggaaccatataaaatccctaaatcaaaactttaaaaaaaacctttacatattacccccgggtataaaaaattccatcaaacaagctgattttttgaacataaaaaattcagggggaaagcaagggaaaataccagatagagctgtaaatgttcaaaagctaggaaaaacattccaaaggcccaaggagctcacccccgtcatagttttaggggccatatttctgaaacccccactcactgttatctaaaggacaaacttgacgggttttgacccatcgactaatgcaagggaaggaaaaagcatggttacaaactccccatgccacagggcattcctcgttaggggccctaccctggttggcttggccctcgatgcaaaaacccatgaggtggttccggca

SEQ ID NO: 95479 - DNA, 2451 bp, Glycine max
  Clone ID: PAT_MRT3847_57229C.1
ccgcggacccgtctgaaccgttgttttagagagagaaacaaacataaaaccttattatctgctaagggactggcgtatcttcatgaagattgtcatcctaagatcatccatcgtgatatcaaagctgccaacatccttctggattttaagtttgaagcaaaggttgcagatttcggtcttgcaaagttttcttctgatgtcaatactcctcctcctactcgagtttccgctccgcttgcgtcgaccccctccctccgcctgcaactccgtcgtcacctccgccggcaactccgtcgtctcctccgccggcgacaccttcttcgccacctccgtcaactccttcctcgccccctccggcgactccctccgcttctccaccgtccactccttctgcttctcctccaccgtccactccaaccacgccgtcaacttcgccgccatcgacttctccgccgtcgccgccatcgcactcgccgccgtcgcctcccagtggcggcggaggcggcagcactccgagtccaccgtcccggagctcgccctctcctccgtccggatcgagaccgaccactccgtcgcctccgtcgtcttcctcgtcgagtatttcgaccggtgtggtggtgggaatcgccgttggggctgtggcggttcttcttgtgttgagcattctctgcatatgttgccggaagaagaagagaagacgtgatgaagagtactatgctccgccgccgcaaccgccgcggggacctaaagatgatgcatatggtggtcccccacgtcaatggcaacacaatgttccccctcctcaagatcatgtggtctcaatgatgcctccaaagccatcgccaccacctgctccaccggcttatgctggtcaacctcccccaccaccgcctcctttcatcagcagcagtggcggatctggatcaaactattcaggcggtgaatttcttcctcctccttctccaggaatttcattgggattctctaagagcacattcacgtatgaggagttggcacgcgcaactgatggcttctctgatgccaacctccttggacaaggaggatttggatatgtgcacagaggaattcttcccaacggcaaggaggtggcagtgaagcaattgaaggctggaagcgggcaaggggagcgtgaattccaagctgaagttgagataattagccgtgtccatcacaagcatcttgtttctttggttggatactgcatcactgggtcccagaggctgcttgtttatgaatttgttcccaacaacacattggaattccatttgcatggaaaagggcgacctaccatggattggcccacaagactaagaattgctttaggatctgctaagggactggcgtatcttcatgaagattgtcatcctaagatcatccatcgtgatatcaaagctgccaacatccttctggattttaagtttgaagcaaaggttgcagattttggtcttgcaaagttttcttctgatgtcaatacccatgtttctactcgagtgatggggacttttgggtatttggctccagaatatgcttctagtggaaaactgacagacaaatcagatgttttctcctatggagtcatgctcctcgagttaataaccggacgacggccagtcgataaaaatcaaactttcatggaggatagtttggtagactgggctaggcctttgctcacacgagctttggaagaggatgattttgattctattattgacccaaggctccagaatgactatgatcctaatgagatggcacgaatggtggcttctgctgcggcttgcattcgtcattcggcaaagcgtcgaccaaggatgagccaggttgttcgcgctctggaaggagatgtctctctagcagatcttaacgaaggaattagacctggacacagcactatgtacagttctcatgaaagctcagattatgacactgcacagtacaaggaagacatgaaaaagttcagaaaaatggcattgggaactcaggagtatggtgcaagcagtgagtacagtgccgctacaagtgagtatggtttaaacccatcaggctcaagtagtgaagcacagagccgccaaaccacaagggaaatggaaatgagaaagatgaagaacaatcaaggtttcagtggaagttcttgatccttggccaactatttctgcctttatcttttgtataaagtctatatatccttgatttcttgccaatgtcacagttgattgctttactgacatctttggagagacttaccgattactattattttttccctccttcacatatgatcatcttttgaattgtatttatcagggtatacaacaaaataacaacaattcgattctttcattattttttttccttattcagctttagtgctggaaatggattggcatcaaaccttgttttccattgttgctcatgtgtcaatttttaggtagt

SEQ ID NO: 95480 - DNA, 1014 bp, Glycine max
  Clone ID: PAT_MRT3847_5722C.1
ttgtatcccttgttggcagatgcaaaggatgtactggcagcaattcaaaatgttgaaggtgctaggtttcctgtcttgactccaaaccttaaaggctttgaggcagctgttgctgctggagctaaagaagtggctgtttttcctgcagcttctgaatcattctcaaaagcaaatctgaattctagcattgaggataatcttgctcgttgccacgatattgcttcagctgctagaagcctctcgatcccagttcgtggatatatatcatgtgttgtcggatgtcctctggaaggaaatattgctccagcaaaagttgcatatgtggcaaaatcgctttatgagatgggttgctcagagatttcactgggggatacaatcggtgttggcacacctggtactgtcatttcaatgcttgaagctgttcttgatgttgttccaactgacatgcttgctgtccactttcatgatacttatggtcaggcactttcaaatattttaatttcacttcagatggggatcagcacagtggattcatctgtttctggtcttggaggttgtccatatgccaagggtgcaactgggaatgtagccactgaggatgtcgtttacatgctgaatggacttggagtgaaaacaaatgtggaccttggaaagcttatgcttgctggggatttcatctgcaagcatttaggacgtgcatctggttcaaaagcagctactgctttgagtaaagttacaagtcatgcctccaaactataagttactatagctagtcatgcacctgcatgataggcacattgtttggccactgtagaatatgtatttatgttggtgtttactgtcccgtgggccctgcctatagaaaagagagagccagcaaacacaattgtaatgctgttcacttctgcttgtgttctgagtcagtttagtcgctttgattattgagaaaaatcacatgttgagcatgtactccggaacacacttataaaattgcatagaatgtccaagttcaac

SEQ ID NO: 95481 - DNA, 754 bp, Glycine max
  unsure (1)..(754): unsure at all n locations
  Clone ID: PAT_MRT3847_57230C.1
ccacgcgtccggttgttttagagagagacacaaacataaaaccttattcttcgctttcttaaggttctctttgtttttcgatctcgcatttttatttctgtaatcattctcgctaatgtcaactgcccccgcgccgtcttcgccgccggcgaataacggcaccgcgcctccgccgtcaactccggccactccctccgcaccgcctcccgccacaccttccgcgccgccaccctcaactccgtcgtctcctccgccggcaactccgtcgtctcctccgccggcgacaccttcctcgccacctccggcaactccttcctctccccctccggcgactccctcttctcctccaccgtccactccttctgcttctcctccaccgtccactccaaccacgccatcgacttctccgccgtcgccgccgtcgacatcgccaccgtcgccacccagtggcggcagcactccgagtccaccgtctcggagctcgccctctcctccgtccggatcgagcccgaccactccgtcgcctccgtcgtcttcctcgtcgagcatttcgaccggcgtggtggtcggaatcgccgttggggctggggcggttcttcttgtgttgagcattctctgcatatgctgtcggaagaagagagaagacgtgatgaagagtaccatgctccgccgccgcagcagcagcaaccgccgcggggaccttaagatggtgatatgggngggtcccccaggccaatggcaacacaatgttcct

SEQ ID NO: 95482 - DNA, 617 bp, Glycine max
  Clone ID: PAT_MRT3847_57231C.1
ggccatttacaaatgaatccaaattagtgctttctgttaaatttgtcgagttatattaatgaagttatgtgagtggtgcaagagggatgcttccatctgtacactggagaaacctgacactcttatcaagcggaacaacttgttgcaaagtgtcatgttggacgtgggtttggcagctcatgtgcccccattcagaagtaaacgcaataacatgcaaattggcaaattgcaaatcgaattcataatgagataatgagtgaggagacaagaataggtcattaatacccctttttctgattttttatttatttttggaagtagattttactagaacctttccagtaactaaaaaagtatttgttgtaaaaatcataatagtaggaaaaaaaatcataaataacgcaatgtcatgtatttcaataaattttttttaatttcttattcaatgtctatttgccaaaaaagaatgtaggttttttttctcaagcttccatttcaaggcataaaacaaaaggggtttctactaataattttatttgtcattcggaccacactaactttgccaatctaatgtttatattaacaacttaaaaaaagttattttctagttttacaaa

SEQ ID NO: 95483 - DNA, 147 bp, Glycine max
  Clone ID: PAT_MRT3847_57232C.1
tttaaggttaaggcgtagatcaatgttatgttggttgggcatgtggactttgaggaggtctccaacattaacgatctgcacaagcttgttgtggagacagaagctccagtgcatgccatatgagggcatggacgtacggcctcggag

SEQ ID NO: 95484 - DNA, 1833 bp, Glycine max
  Clone ID: PAT_MRT3847_57233C.1
cggctcgagcggctcgagtacggctgcgagaagcaaaagcttggggattgctgcgcgacgatcttccttgtttgtgaattctattctattctattctatcagcactttcaagtttcaagacagcaagcatatcatacaaaccttgtcccttgtcattatactttcactgaaatccaagtcagagtcaattctcagtgtctcacttcccaaaattcttcacccttttggccttttttcccattcagaaaatatgattcagttcaatacaaccaagatgaaaaagtggatgttttcacactgatcttctccttaaaccccgccaagttagtttttctttttcttttcccttgcctaatggaagttatgtcaaacaccatcatcaagcaaagcaacaacatagcaatttcacaaggcaccatccattttcaaaaactttctttctggttcgcccctcgaactcgtccaccgggttaattttccttctgatctttctcttggagctccactccactaaaagggttttcaaaggttttaaaaaacctctaccatagcaatttcaactacaaaagtcaaggattttagactaatcgcaattcgtgattgtaactgtggttgcatcggctgtatttgttggtaatttttttacaacatcaagtatcaaaataaaactgcaaccacgactgcaatttaaaacctttaggactatggtttactccttctatgacaaaacctcttcttcttctggctccgatatttcggggttgttcaatcctactttgcataaccttggagcttgcaatgacttgtcatcatcaccacattctttggtatttgagagtgataagggagagctggtgaagtgccttgcagctgcaaaggtagggaagagtgagatttgtgaggccaaagctttggctgctttgaagaaccacagtgaagcagagaggaggaggagggagagaataaacggtcatcttgcaacactacgtggccttgtgccatccactgaaaagatggataaagccactttactggctgaagtgattagccaagtgaaggagttgaagaaaaatgcagcggaagtaagcaagggttttctgattccaaaggatgctgatgaagtgaaagttgaaccatataatgatcatgaaggaggagaaggatccatgtcttactgtgcaactatctgctgtgatttcagacctgaaatactatctgacctaagacagacccttgattcccttccactgcatctagtcaaggcagaaatttcaactttggcaggtagaatgaagaatgtgtttgtcttcacgtgttgcaaagaaaacattaataatattgattttgaaaaatgccaagctcttgcaagtactgttcaccaggcactatgttctgtgatggaaaaggcttctgcctcactggatttctcaccaagaacatcacatgcaagcaagaggagaagactatgctttattgaaacatccaattccacatgcaaccatgggtcttgtttgtgctgatgtcaagaatttgatgtgttatgttatctgtttctgctgcaagtgttagagtgtggtattaacatttcttattttttgaggaatgctaacaacacacctgatagtatattgtttaatatgttttctattattgggtgaatctcactgaacaataaatgagattcgttaaatagcatatgtgacatcatataatgagagtcacgtttatccaataatagaaattgtgctaaaaaaagtttgtgagagaatgcactattcgtcttactatgcagcaaaattatagctgtttgtattgaaaaaaaaaaaaaaaaaa

SEQ ID NO: 95485 - DNA, 455 bp, Glycine max
  Clone ID: PAT_MRT3847_57234C.1
aaatggggagcaaaacaactttttacacaagggtcttatatataagggaaacgggaacctgggttggggactcatgacaacgattaattttctcccccattttacagcaccaattaaagatctcaaaaaaaaaggggggataaaaaaaaacactgggtttattaatttatcgactaagttctccgaggaaccccccccccgggaataaccccgaccaaaaggaatgctaatgacccaatcagggaccccccaatcgaagcagccttttgatcacaaaatttcccaaaaacattgcacaccttggtccaattcacaagaaagtttcctttggagccaaggataccaactgccgaaggggggccgttgccggaaaaaagcaaagccaccatgaatgtgtcgagaacagcgatcaatgtccacaagcctttgtttttacctttgtttacgagggcagg

SEQ ID NO: 95486 - DNA, 139 bp, Glycine max
  Clone ID: PAT_MRT3847_57235C.1
tcgtccacgcgttcggagctgacttccataaactactaccccatgtgcgttcacccctttgattaccaggcacatcttagacttatgtctacgaaactcacattccgtcaagcttaacaccgtcttcaatatgcgagat

SEQ ID NO: 95487 - DNA, 505 bp, Glycine max
  Clone ID: PAT_MRT3847_57236C.1
cccttcgaattcacttttatttatatattaatattattttcaaaggaaataaaaagattttaaaagatcctaattataaaaatttgaaagggaaattataaaggtattaaatgtttaaacaatttttttctacccggcccgggagaaaaaagaggcccatcgggtcttgaaaagcttccttcaaaaggacttctgcttccccagggaatggctggggggaaaatatgatttctttgaatggggggttattcgggtttaagaaagcccgtaacccaacaagaaatttccttacctggccaatttctaaagaatcaaaaaaaccattcgtcccagaaaaaaaagttattatctggtcttccacggaaagaggagctgattgggattgtttaagcaacccgcgcaatcggggaccccttgctaattgattttgaggagctttatcgagaccagaagcgaatggggcaaaagcttctaattctgcgaattgggctaattccaattttaa

SEQ ID NO: 95488 - DNA, 364 bp, Glycine max
  Clone ID: PAT_MRT3847_57237C.1
acttcaagcaccggctgaagtgtatcaaaccccataattttgattttagtataccatgcaccgaacttttctatcttaaaagaggtaactttaccaccgctgcggtgatcttttacttcataataaataatgatatacttaccacgcttcaacaatttatgccaatattttccaacaattataacttttattaccaaaaaaaaaattgatgggcagccagccactaacatagctcatctacccttctattaattccgcacagcaacctaaaatcgtacgaccaaaccatctagtgtgtcttataataacttaatataatcttcgccatatatatattctgtagaaaactgttctccgattacta

SEQ ID NO: 95489 - DNA, 355 bp, Glycine max
  Clone ID: PAT_MRT3847_57238C.1
gccgccctcgcccttttttttttatttttttttttttttttttttttttttttttttatttttatgggaaatagttttttttcgaatttccctctaccacatactgtctggttatcttatgccccaaaccaataaatagttggtaaaccttaaccctcatgcttggaaaacttgaaaataataaaatggcaaaaaacaaacaacaccctccgtgtttgtgatagactattattatcttctccatctatcgaggaaagagaaacctctccgtaatttcccccccttggcttatattgctacctaaaaaaattataggcccaagggcccccccccttttcaagagcatggggacccc

SEQ ID NO: 95490 - DNA, 727 bp, Glycine max
  Clone ID: PAT_MRT3847_57239C.1
attcatacaaccctccatatacatttacctagaacctgtgtgaaatatgttgctatgtccttctttgatgcttcactgacccccatagacatatacaggacttctcttagcgtggacctccaaattgcccgccatgtcaagggtgtgctgaagctgatgacaaagattatgtaaaagatggaaagtgaactgcttctctgacctcgacctgaacgagcaaaaggtgacatggaaatgcactgtgcagaacgcactaacatcatgctctccgtgatccgaatcctacattaatacgacatgctggaacaatcacatcctacctcctgataactacccttcagacactgctcctgtcacctcacactgacaatgataacaggcttcttaaagctggactcgtgatagcctcataacacaagtctccagaaacagcacgtgaagactcatctgaccctgaaagcaactctgcagaaactggtgaatggaaatgatgctcaaagaatctgtggatctaattatatatgtgtaagtaatattgctgctgataacatatgatgtgctttgcgcatggcatctaatatagcagcattggagtgatgctacagtgatactgttcctcaatctccaaaactagccgacgatttttcaccgtccaattgtcaaagaaagtgtgcctacgacctatactggtctctcctcttgaaccatcaccataatcaactttttg

SEQ ID NO: 95491 - DNA, 226 bp, Glycine max
  Clone ID: PAT_MRT3847_5723C.1
ggtcgattctatctaatatcggtatcatagcaatctgtgacgccatataatttcggacgaacttaccggaatctaaggggacacccgcagacttctctggatctcgcggatatgcgcgttcacgcgggtgggaacttattaaaccgactcccaactgctctggctgcggatccggaacgctctgcgcgcatcactttctctcgtaagctgcgctacactcgtcgcg

SEQ ID NO: 95492 - DNA, 239 bp, Glycine max
  Clone ID: PAT_MRT3847_57240C.1
tgcacgcttacattagctgataatttcactcaattccaattcttcattatcaccatataattcataccaaaactgaaatatatccaattttaaacatctctcctcttattacacacaatccttaatccaaactacatgaactcacaactactctacaaactccaactccatattttcaatatataattcaccaaaaatattcatatatcactagaaattatctatacttcttattaacc

SEQ ID NO: 95493 - DNA, 308 bp, Glycine max
  Clone ID: PAT_MRT3847_57241C.1
cgcaagctcggaattcggctcgagatcgcgctgccactccgtgtgacaggtaaggcagggtatacgtgtaaataagagagacccttttcctctgtctctctctcattccaagtgtccgaccgaacaagacctagtccatctaaaatatgtgtgccaaatcgtggctagcgtaccgtcttctggcactggccatggacgctgtagcatatgcgacagtagatgaatgggcaactgcgtgagatgaattgggccctattatctttgatggtgtggctggtctcattgtggatggcattgagtgtttgatg

SEQ ID NO: 95494 - DNA, 223 bp, Glycine max
  unsure (1)..(223): unsure at all n locations
  Clone ID: PAT_MRT3847_57242C.1
cttcacctctcaannatcnagcttgctccnatctntctanatgtaataanatgcgttgcaaataggggcactagcttcactttatgttgtttcagctgtgngtcaacaagtcatgtnaganactnactatgttgttttcnctttcgtggntttaataaattatgcggccntgttccataaaacncnnnncacaanaacancaaaaaaaacnaanagggggggc

SEQ ID NO: 95495 - DNA, 496 bp, Glycine max
  Clone ID: PAT_MRT3847_57243C.1
tacggctgcaaaagacgacagaagggcatattgaattgacctgttagtggattgccatgttgctggtctaagccatgtagaaagtctatacatttttggcatttttgtagaaaaaatgaagatgaattatttcaagttgtttttgttgaactgaaatctttttgattcattgagtgcattacaaggttgcaggcactgttttttttttcccttacatttttcacttcagtgtattaggatatttcaggaaatcaggaaactgtatgtaagtaaccggagaattgtagaagatattgtaattatgtaattagctgtaattatccaaatcagcataaattaggtagctataatcttgtatatatttgtgcctttgataatcaatacacacacaagtatttcccattgagaatacctacctctggtcctatatataagcaatatagtacaaatcatcaagatctacaaaagttttgatcacatttgatattaccataaa

SEQ ID NO: 95496 - DNA, 481 bp, Glycine max
  Clone ID: PAT_MRT3847_57244C.1
ccaacatcagataaagatataacaaaggcgaatgaacaatcaataaactcatcaatcaaaaaagttaaagttaagtgggagaaagctggttgtgatgctgaactcaaactacaagcagttaattttatccatcacccaaaattcttgatgcaaattattactttctgttcctcatttcaatgggtttatgttctctttttttggttacacttcttctgctaacatcatttgcggtatgccaacttgaaggtatgttttctttagtagatcacaacaactcaggtagttagttctgaatatatacaatttaagttcaagcaaccatgcatcataaaaaacttctactctttttttatcaacacaaaattctcaagtagaatatgtttattttccaaaatatcatgtcattttatgacagaaggcagaagagagaagacaaaactcagatgcaattcctcaagtgcttttagtactgtgttct

SEQ ID NO: 95497 - DNA, 319 bp, Glycine max
  unsure (1)..(319): unsure at all n locations
  Clone ID: PAT_MRT3847_57245C.1
ctacctctcctttcaagatgcagatcttcgtcaagaccctcaactggaagaccatcaaccttgaggtggaaagtctgacaccatcgacaacgtcaaggccaagatccaggacaaggaaggattcccccggatcagcaacgtctcatcttcgccggaaagcagtcgaggacggcgtacctcgccgactacaacatccagaaggagtcaaccttcacttgtcttcgtctcgtggtggatgcaatcttcgtcaagatctcatggcaaacataacctagagtgaagttganacatganagtnaggcagttcagaaagaggatc

SEQ ID NO: 95498 - DNA, 491 bp, Glycine max
  unsure (1)..(491): unsure at all n locations
  Clone ID: PAT_MRT3847_57246C.1
gcttgcactcatagcatccctgcattcgtgttgttatttgccgcccttgtctcctcttctcaccaaccagcctacttaatcctattccacacaaggatggtatcaaatgagactgagggagagggaggctacaacaagaaaagtagtaggtggatagcaacaaagtcatcttcatgtttgtttattttattctcgtccttgttgataagcatagcaggaggttccatgcttggattctggctacacaaataccatccatcaaatacccaactctggatggtaccttttggcttccttctcttccttacccctctctttatctgcctctccgtaatcattcctgacctctgtgttcccagaaccagaatcgaccaagaccaagcttttaagatacaggatcatcctcttactttgccatctatacaatagaatatgctnngttgttttaaactanctctctggtttctttctcctgcattttaagaggagtg

SEQ ID NO: 95499 - DNA, 726 bp, Glycine max
  Clone ID: PAT_MRT3847_57247C.1
ccacgcgtccgcccattttattttatgcgttttaaactctcataacttaattaagaacgaacaaactaacatagcagtttgacatcgtgggccgcttgcactcatagcatccctgcattcgtgttgttatttgccgcccttgtctcctcttctcaccaaccagcctacttaatcctattccacacaaggcaaggcaacttcccctttcattaccaaatcaaaaatgaccttttgctaattcatttctcttctgtttcaggatggtatcaaatgagactgagggagagggaggctacaacaagaaaagtagtaggtggatagcaacaaagtcatcttcatgtttgtttattttattctcgtccttgttgataagcatagcaggaggttccatgcttggattctggctacacaaataccatccatcaaatacccaactctggatggtaccttttggcttccttctcttccttacccctctctttatctgcctctccgtaatcattcctgacctctgtgttcccagaaccagaatcgaccaagaccaagcttttaagatacaggatcatcctcttactttgccatctatacaatagaatatgcttgtttgttttaaactacttctctggtttctttctcctgcattttaagaggagtgtaatttaactccatgttttcttcttttcacttgtgcaatattggaagcacaatctggtttcttccatgttt

SEQ ID NO: 95500 - DNA, 464 bp, Glycine max
  Clone ID: PAT_MRT3847_57248C.1
acggctgcgagaagacgacagaagggcggtctcatttatacaagaagtggaggggttcagaattcggtctcacattggagaccactggatgtgggaggcatattcaagtggacagtatccagttaggagtgcatacagtttgcttagacaacaagtagtagaggaggcccaggttgaataatatagggagttatggaagcttaaagttccatctaaaatggctatattcgcttgaagattactcaaggacaaactaccaaccagagacaacttgaggaagaagcagattgagttctaggattatttatgtcccttttgcagattaatggaggagacagctggccatttgttctttcactgcaacaaagttcttctggtttgatgggaatcgtcgtcctaggtgaattttggtggctgtctttccacatcacccaagacaacactttatctagcacatgaatcag

SEQ ID NO: 95501 - DNA, 208 bp, Glycine max
  Clone ID: PAT_MRT3847_57249C.1
aaaggccggggtgctttatgatagcaagccagaacggacagatgataacgtgcaatgccgaacgcaatgggtggaacaaaagaacaacacggctcatcgtaacaagaaaaaaagcccaggcacaatatacaaaaggagaaggcaagctccgtaactaaaaaacagcgatctaaggaacgataggctgccaaccttgaagaacccggaa

SEQ ID NO: 95502 - DNA, 242 bp, Glycine max
  Clone ID: PAT_MRT3847_5724C.1
atcttcttcttctttcatggatgctttgaacttcctcaagttctggagaaacgccagcacgaccacaacctccgaaacccacctcgtggtagaatccgacatcgaatccgacgaagaagactcattcttcgactaggagcttacgccacacgagtttcacaacatagaaaacacgaccacaaccaaaactgacgacgaaccaaaacacacggcaacaacaacatcaacgatctcaaaagcat

SEQ ID NO: 95503 - DNA, 551 bp, Glycine max
  Clone ID: PAT_MRT3847_57250C.1
tttttttttttttttttttttttttttttttttttttttttttttttttttttttttttttttttttttttttttttttttttaaaaaaaggaaaattttaaaacctttaaaaaatttaagttcaaaaaaacaaaagggcccccaattttatttaaaaaagggaacgggggggggaaaaggttttccaaaaaaaaacccataaccttggcccccaaaggaaaagggggcataggggttaatacccctaaaaaaagacctgattaaaaggtaaatcctggttttcctaaattcaatttccaccgggggccttttaaaaaaaagcccttggggttttttttttaacttttccggggggaccaccaccaaggggacttgaaaggaaaaagacaatgggcttctgggagacaacccttaccaaaaaagaggggagggtccccacttgcctaccaaccctgaaatgtctttgtttgaaaaaaacccaaacatgggggaggggattgggccctccccggacttaaaaaaacaagggttttgggggggcggccccctc

SEQ ID NO: 95504 - DNA, 419 bp, Glycine max
  Clone ID: PAT_MRT3847_57251C.1
cttaagaccgtgtcataggattctacccccccctcaattagaattgcgacttgaggcgtcgagtgtggctcttccacctatcgagggtgatccatcgtacatgacgtttgggagcgcactcactctactgagtatcatctaagagaccgctgacgagcacttgcatatcatcaggcatttggtcctagaagtgaacacgcctcacaccagaaacgcgatgtcagcgccaatggctaatgcatctaggactatgaccaatcttgccaatacaccgatgctgtctgactaggcagaaatacgatggtgactctggcactcttgcggacaacctaagctgaatgctggccttgctatggcaacaaacagtacctagatgttggtgaacagacctgcacatgaagggtactggaaaacaatgc

SEQ ID NO: 95505 - DNA, 284 bp, Glycine max
  Clone ID: PAT_MRT3847_57252C.1
cagtgctactaatactagactgtaatataagatagaatggcttctatcgaacaacgaactcgcgacatcgactgcttgctatactttcccttgaagggattaaaaacaatgtaacgtttatatatatagattcttccctctcgtgcttaacagctactcagcatcttggctttcttttggaagaatcaaaatctgaaggagatctatggctacttttatcaggactaaatcttactttgaagaagaatctattgtacatgttgataacgggctgactatgctta

SEQ ID NO: 95506 - DNA, 875 bp, Glycine max
  Clone ID: PAT_MRT3847_57253C.1
gtgatttatgcagaacagacctagggcaggatttgtgtcgcaaaacctgatctgtgatggtgatttcccagctttgttttgggcctcaatgttctctcattctcctctgttttggtgcaaccaaatttgcatctgtggtggtgttttttcccagctttgttttgggtctcaacattctctctcgttctcctctgttttggtgcgaccagattttgcatttgtggtggtgtttttaattttttagtttgctatatttctatattatagagtttacagagccttcatgagtttatataaactcttgagttgataacatgggttgattgaatatttcaaatgttcaagtattcttaatttgactggtaactagtgtggtactggtattattgactgcttctgctcttttgaccaattacttgacttcttcatgggagcttttatgtgcgtttagttgttcagcttttctgatgaatttcaaatcccgcagcggcttgtgcctttaggatcttctcacttcagagttcagattttgaggatgcgtagagaacttaaatacttatcagtagatttcagtggatgacttaatatggcaatgaaggtttgtttatagaaatattcgttagaaaagatgacgggaagccacatcatagaataatgctatcgttaattgaaccctagagtgtgtttgttttaaaatttataaatttcttctggaaatgtaaaaatggaaatgcaattttgatttttgactactattgtagtttatgattcatattgtgtttggtgattcattgtgctctctagaattttcagtacaagcataatgcgattcttattgaagcagatttggtattgataatgatgcatgctgaata

SEQ ID NO: 95507 - DNA, 341 bp, Glycine max
  Clone ID: PAT_MRT3847_57254C.1
ccaaaaaaacaaagggggcaaataagaggcttgggggggggaaccccccgcagacatgaccagaactctccagcacctcagagccaaacttccacaggcccatctgaagcaacacagaaatcgcaagggggccacccctgggtttcacaggaaagcccatgacatgcacacagggacactccaccctgcaacaacaggctagaaaagaagggcacaccccaaaaaaaaaatgaaataaatatcacacaatttacactctcaacgggctatcataacaaagggggcgaaaacgtggcacagacaccgaaggaagccacttcaaagcagcaccacccccggga

SEQ ID NO: 95508 - DNA, 254 bp, Glycine max
  unsure (1)..(254): unsure at all n locations
  Clone ID: PAT_MRT3847_57255C.1
ggntcgaggacagatntgaagtntgtagagttanagantgagagagangaagnnagagaaaannaaaaaccttactatttttcacgcgacgccctagtncatntttnntntaannacgtaaaaantctctgttctncactcactntcattnattcaccatgacgnnacnnacatgccattggtctcttangataanaacggaggatcatgtgttgcgatgctggagcagattantgcgttatcgccgcagatac

SEQ ID NO: 95509 - DNA, 519 bp, Glycine max
  Clone ID: PAT_MRT3847_57256C.1
agaaatatcgatcaccgtttagcatacagtaacaacatattagtgattttagggcaaccccttcccagaattaaaaaaaaatagtgaaagacaaaaataagatttcaacaagtactaaaaaaacctaaataagaaatatgaaagagacactaataaacatctaaaaacggacgaacaattatgcccatttctgtatggggcaatatttcaatcttcggaaagcattggggtctagggccctgcctctttctacggcttatataagccttcttatgttaccctgcgttcgatgcttggcaatgacatagccactcaatcaagtcatgctgccaacaattgtacttgattaccagacttcgtacaagcattatgcaagtctcgcatcctttccagtcccaggatagttgggcagatttaggggcaactacaaatgatggttctttctttcctgttttatggcctcgtatgaagtcaacacttccttgaactttgcctcagctgccactatattatcctggt

SEQ ID NO: 95510 - DNA, 2571 bp, Glycine max
  Clone ID: PAT_MRT3847_57257C.1
gattcttaacgcattaagtcttactgttgtgctttgtttaggatttgccacaactatacagattctttttaattgcctcacgctttattgaacttgtttttctttttatctgtatagaatcttcatcgacattatcattattttaaccgtgcttggtttttttgtatggagcattacctcatttgcgcttctcctcctagttggatttaatttcactactacaatctccagatgggcaaagagattgatattttattatccaaaacttttgttttaaccagatgtcactgtgagagatattgaaacaattggaaagacacttccatttcaatagtttattcttccggaattgtttctgaattcttgatattgtatttgtattggagttaagtcaatgtgtgcgtaaaccttttctcctcaatttaacatgttagttattcacacaatgttgtgtattcaacgaatcgctaaaatagtgaacaatgaaaagagaatataaataaaaaaaagatctgtgtaataccttggaatttttttcttcaatttgttttgaccaagtcgggaaatgtcatcagggtgatacaaattcacaatctttcttattgtttccaaaacaaaatcaagaatgttacaaaagattaagtatttgactgaaagatcatggtgaaacaaattcacaatcttttactgttttcgttcttaagtacagttattgattgccattatccaaagattgttaatttggtgtttgaagaataggtatgagcaagatttttagttgaagcaattgggttgctcttcttcaaggcacacacaatggataaagtaaatagagtttgtgccaaagatgaagagcgtccactccgaatcaccagagcaagagctagagccttgagagggattactccctactcaagaccctccttaaaaaatgagcagaaaaacgtgcttcgagctcattccaaaagagcagcaagttctggaaacaaaacttttgcggttgttcctgctgttgtccagcaaaagggaagggcagtgctttcagatatatcaaacatgtgtgcaaaaccacatgataagtgtactaaggcatcaaaatttcaggccaaaggagtttgtacaaagaaaaacaccaagcttgcagcctcaagtgtttccactgacgtttcatcctcacatgacgatgttagagcaaagttagctgaagaattatccacaataaagatggttgaatcaaatgacaccttaagagaaggtgtaacagcagacacctcactttcaatgcaaaactctgtgaaatctgatgaactccggaactctccaaacaaagacatagatataatttgtgagaagctgggagcctcagactccctgactattgtggacattgattcagagttaaaggatcctcaactgtggagtttttatgcccctgacatatacagcaatattcgagtcacagagcttcaaaggaaaccattgaccaactacatggacaagttgcagaaagatattaatccaagcatgcgtggaattctggttgattggcttgtggaggtttctgaggaatacaagttggttccagacactctttacctgaccgtgaacctcattgatcggtatctctcaacaagactcattcagaagcaaaagctccagttgctcggtgttacttgcatgttgattgcatcaaaatatgaagagatgtgtgcacctcgagtggaggaattttgcttcatcacagataatacatacacaaaagaagaggtattgaaaatggagagagaagtactgaatcttgtgcattttcagttatctgtccccacaatcaaaacttttctcaggagattcatccaagcagcacaatcttcttacaaggctccttatgttgaactggaattcctggcaaattatttagcagagcttgctcttgttgaatgcagcttcttccagtttctaccttcccttatagctgcatctgctgtgttccttgccaaatggaccctgaatgagtcagaacatccatggaatccaactctggagcactatacaaaatacaaagcttcagacctcaaaactgttgttcttgcactgcaagatctgcaacttaataccaaaggatgcttcctgaatgctgtccgcgagaagtataagcaacagaagttcaattgtgtggcaaacttgtctccaaaatcggtgcagtcactcttccagaaccaagtgtaaatgtttttggctgttcccttaaagactttagaatttctggcacagtgatggttgaaaccatcatcagttacatattttaccattcttttttatcatcaatcccccacttagtgtctgttccgtaattgtaacatgtaagatgatctcaaattctggttcttccaggtctctttgttttgcaaagggaaaactgttgcgggatgatacagttcaaagagtgagttgatgtactaacaccaattagagactcattttaaggttctcattaagcaacaaagtcgtatagttcctttcaacattttgtaccgaacatttgtatgtaattcaaattacattacctacaat

SEQ ID NO: 95511 - DNA, 353 bp, Glycine max
  Clone ID: PAT_MRT3847_57258C.1
ttcatacgtccgcacacgggaccgtgtgcatagtcagaccagaacagggtgtggtccgactacagggggacgaaatggtgtaagctgctgatgcagccaggaatggcggcatgtcgccaggagacatggacacacagtgcgcgagtgtatggagatcaagagttcctgttatacgaggagcatgaatatcactacaaggaaagggggcggacagatgcctttgatgcagaagataagaaaggcaaggacactcaaggcataccacgggatagactgggccatagcccttcgaaggatagacatactaggccggagacgcccgtgcactaatgaggtgtccctcatcgaggcgc

SEQ ID NO: 95512 - DNA, 324 bp, Glycine max
  unsure (1)..(324): unsure at all n locations
  Clone ID: PAT_MRT3847_57259C.1
attcgtcaaacatattaacacttaaatcacaatatacacgatcaattccaagtaggtgcatggtgatgttatcacatgcaaatcctgaatcaagaactcgacaaagaacactcccatatgcacaaaattacagaaagagagaggggcgccaaacagctgnnatgaattagcagangancaagagggaaaagacaaggggggggaggganncgaaaccccccccccctaggagaaaagaaaacacncaaagcaagcgaggagaacaggcaacaaaaaaaaaaaaaacgccncccggggggagggacccttccaagccccacaaag

SEQ ID NO: 95513 - DNA, 377 bp, Glycine max
  Clone ID: PAT_MRT3847_5725C.1
ggtaattaaagttttccaaactcaaacctaaacatttggcgttacattgattcatcattctgagtttcagacataacaagagaagttctagttcagaaagcacgcacttgtggaagtgaagttacggttttacccttcttctggtggtgccggagaggaacatgttcgtaggaagatcatcatcgacatggcgcgttgtttcggcttaggttccgttctggttctggcggcgctcgcggagtccatggtggtgctgccgttgatgcgcccgccgctcgcgccgccgccgctggttcttctcttcctccccgtcgggatcatggcggcgctcatgttgcttgtgttctcgccgtcggatcagaacggggtcgtttacg

SEQ ID NO: 95514 - DNA, 235 bp, Glycine max
  Clone ID: PAT_MRT3847_57260C.1
accaaaatacaggaacttatcttcatttatattctaacaaaaaaaaaaaaacagcgtaaaacacagagtgattcatttaatcagtgattgggattgtcggataaagttttacacaataggccactcacaaatgaccaaagatgattttataaactggtcaagtaacaacttgctactaatggacaccacttttatgcttgaaaactccttttatttgggccccatcttaaatact

SEQ ID NO: 95515 - DNA, 388 bp, Glycine max
  Clone ID: PAT_MRT3847_57261C.1
gttcctagtatccatgatctttaaagagaaagggatacggccgggcatgtacgccgatgacggaatatttatcacgaaaacctccgagaatccactcgtaaaaatagatgaagacgacgacatctatgaggccgggatatttttatcagaaaagttaaagaaagatgggcgcccaagttgtggaaaatgtgaaggaatattagacttcctaggactacaatgaagatacgggacagacgaagtactaatgaacggagtctgaaaacggagagaactcttaacggaaagagaaatctccaacatagtttgaaaaaactatgacccaaacgcccctcgcgactttaactgagacatcaaagagggaagctatatagtgaaaactcaagat

SEQ ID NO: 95516 - DNA, 634 bp, Glycine max
  Clone ID: PAT_MRT3847_57262C.1
taataaaaataaaaatggagtcactttgtcaaaatctaggcacgaagatttaatcatgaatgtaggactgactatcttgaaaatgtacacttttggtattggtgtatactaaaatttgaagtaaaggttatcatgtccatcatgagaagcttgcatgtctaagacattcatcaagaaacagaatgacgatgaaaaattatcccttagaatagcagaactcggaataagtaactgtcaaaaggaaactgtataaattcttgtcattgacttgatgccatatatgttataacaagtctccttttgatgattagcctaaagagataacagtaaacaaagatcaatggtaaatgcaagtatggaacaatagccacaagctcaagcttgggaaactattagataatctgaacatcctgatctattggtggttctcaacctttcaagtaagtaatatttgtgtaataaaaggaacttagatgtgccaaacttcatgttttcattaggaatgtgtaggttttggaaaacctcttatgcatctttcatgtgtgtgttggttttgtaattgattttttgtattgtcttatacttgagtagctggatgacagtgtttgtttcatgaatcttatttacgaaactg

SEQ ID NO: 95517 - DNA, 323 bp, Glycine max
  Clone ID: PAT_MRT3847_57263C.1
aacagacgtttttttaaggtttgtaggatccaacacgtgggaaaagctaattctcagggatccatcggagtactctggccagttaatcattacgaatacatatcagctgagaaagaatagctggagaaggagggatacagaatcattggaaacgctggagaccaatggaaagacctactggggagcaacaaagggactaggactttaaagctggctaatcccttgtactataaagaagctctcaaatcaagcctctcaggtgctccttactttctatgaaataatatccctgagtattattacttactcctgtaggggcactg

SEQ ID NO: 95518 - DNA, 189 bp, Glycine max
  Clone ID: PAT_MRT3847_57264C.1
ggccgacccacgcgtccgcccacgcttccttacacgcttaaaaacaccttatagatgtcttcctaaatctatctctggagtaaactggcgaaattatccttgactcccagcccattaacttacactccttatatcccaaaaatacaattaaacaacagacccatctaaatctactatctccctataata

SEQ ID NO: 95519 - DNA, 142 bp, Glycine max
  Clone ID: PAT_MRT3847_57265C.1
cacgcctctctttcaaattcacctgcagttggactcaaaaccctacccaaccaatttcaaattcacctgcaaggcagtgttctctgctacaatcggtgcttgatcttgcgggtggggttttcgcgccctgaccatgtggggc

SEQ ID NO: 95520 - DNA, 153 bp, Glycine max
  unsure (1)..(153): unsure at all n locations
  Clone ID: PAT_MRT3847_57266C.1
ctgcangcacgcgtacgtaagcttcggaattcggctcgaggttacgcnggctcaggctccggcatccgcctatcaacaagcttcaccgacaacggcgctggccaacccctgacncggctctncattctgccggcctgccatcgcccatgcatt

SEQ ID NO: 95521 - DNA, 151 bp, Glycine max
  Clone ID: PAT_MRT3847_57267C.1
ttacaaagtcggaaaacccaactgcctcattattctcggccctttccctccctctgaagcttacttcaaccagttcctggaggcccagattctccctctacttgaactcctttcacgaaccggttcccctctcatgaagaacctttacccc

SEQ ID NO: 95522 - DNA, 429 bp, Glycine max
  Clone ID: PAT_MRT3847_57268C.1
ggaaagcatttaggggagattgtttttctgttccatttctacgaactcagacccttcaatcccaaccgagaaaaaaatcatgaagctgaagacatatgcgggtcttagtatcattgcaactctggctattatatatcatgcatttaacagtaggggccagttttatccggcaatggtgtatctgtcaacttccaagatcggtttggtgcttcttctcaacatgggtttggtctttatgtgtattctatggcaattaaccaagaagttgttcttgggttccctccgagaggcggaggttgagaggcttaacgagcaatcgtggagggaggtcatggaaatcctctttgcaataaccatttttaggcaggacttctcagtcacattccttgcaatggtcgcagcattgttgttgattaacgctttgcattg

SEQ ID NO: 95523 - DNA, 255 bp, Glycine max
  Clone ID: PAT_MRT3847_57269C.1
tattattatgtatttctttatgctgtcttcctaaggcctaacgctttctaatggaacttaccatgtcaactggtagcattatgttcaaaactattaatctgaacttgaatgtctcactcatctatttatttattcatcgtcataatacattggctacatggtacatgatccatatccaacagcattcatgctgagtaccgacatcttacagcttacacatgtagtgaccaatctaactagatataatggctttca

SEQ ID NO: 95524 - DNA, 365 bp, Glycine max
  unsure (1)..(365): unsure at all n locations
  Clone ID: PAT_MRT3847_5726C.1
ttaatagnaaannnnataatcatgcaaanntnangnnatctntntannatnngnnaaannaanagaagaaangnatnagncaagtannnnagannganatcnaaatnnngangtaggnnattaannaggaananacagtnanananantagacanatatgtgncngannatacnaaatannnnncnnnngnagtnngntnntnannaatntaanagctnnnntngtanaggaactacanantacnncagnctnnnngcanatancacnaagnatgagcngagtaannattntantangaanaanaatntntagtntagtatnaantatantctantgagacanagtgancagaatagaganncnn

SEQ ID NO: 95525 - DNA, 440 bp, Glycine max
  Clone ID: PAT_MRT3847_57270C.1
gagcggctcgagcaaaaacactgaaagtccagtggctaaacaaaggagtgattgctttttgagtgttcttgctgcaatgatatttggtactggatgtggagctttaacagcatttattgtgctttacttgtggaccatctttggcaacaataaacgtgcagtggtgccagaggagtctcttgtggaacctgtagatgttgattataggaaaaaagtcaaaattgttgtagataaaaccatcgaagatggtaagaagtagaagaacctcgtgagggaagaagaggttggaggaagcttgtgtttgtaaatttatttagtttgtcttgtatttaggttttgctctattgtagtagtagtagtagtcttggtaaagggctatgtacttggttttcctgacgttgtctattgtttatcaaattgagattgagatccaactgtgt

SEQ ID NO: 95526 - DNA, 423 bp, Glycine max
  Clone ID: PAT_MRT3847_57271C.1
ggcttgtagggcttgctactttcttttgccttcattcccgttttatataatacccgcccgagctctcactgacggcttggatttttgtgaatggagtgattgagggttcaatcccatccctgtgtttatgacgagacataattatattggccatacgctccgaatgggaatggctttcactacaaaacatctgggtgaaatgtaccatactgcttccattggcatcttgttgaagaaactaagaaactagatcattttgtttctctcccaattccatctgatgattatatgaagaaacacctagctacatttttttttttaactatgaactattgcaaggtggagcccaacccgcggaagaaataaccacatgaggtgtgtgtggtctttgcttaattttgctggctctatagtagcttttgt

SEQ ID NO: 95527 - DNA, 465 bp, Glycine max
  Clone ID: PAT_MRT3847_57272C.1
ttggggggggggggggggggggggggggggggggggggggggggggggggggggggggggggggtttgcaacaaacaacaaaataattgggtaattggggatgcccaataagatttagaatatgggataaaaaggccctgggggaagttttgggaccagttaataagccctttagcagcacccctgtagggggttaatgtacaccaagaggggaccttggataatagcccgcaaaaagacctagatgccccagctacgtaatgaaaacactgcattccctaattgtttgcagtaacgaggcccgcccttagggaacccccagacggaatcatgcaaaaacttaccgttactgtcacaaacaactgttgggttactagttggatttagtgggagtagagtggtcaaactagggcaattaaggtggcaacgggtcatatctcccggttagtaccccaactaatgaag

SEQ ID NO: 95528 - DNA, 222 bp, Glycine max
  Clone ID: PAT_MRT3847_57273C.1
ccacgcgtccggttacctctaaggtgtgctgaatgaacgtatgatcgttcatggtgtttgcttcctggcaacctatgttgacccttcagccggccataccattctgatgttaatttgaaagctgagtaggtgccatggcactttacagtatagccgataacctattgattgactgacaaatatactattgaagaaaacttaacgatgcggagttgtttctat

SEQ ID NO: 95529 - DNA, 136 bp, Glycine max
  Clone ID: PAT_MRT3847_57274C.1
cacaacatgatcttggacgccagcttgtcacttgtgaagcgctccacctacgtataccgtattaacctggtctctctaggcacttgcattgagaaatacatccacagttgcagctttcacctgaccatacatgccc

SEQ ID NO: 95530 - DNA, 338 bp, Glycine max
  Clone ID: PAT_MRT3847_57275C.1
gttgttggtatatttttttttttttttttttttttttttttttttggaaaacaggggttaaaaaccttcaattgaagaattaatttttttccctggaaaaaaaaaggctggaaaaaaaaaagggaataaggccgggaaccttttgaaaggtccatgtttttaaggctaaacccaaaaaatgggtgtttttataaaagggcccttcttttggggggggggaacaattttataggtgttgagggaaaaccccccccgggttcagtgtggggttccccccggggggcggggccgaaaccaggacaaaacccttttttgggaacaacacccaaccttttttt

SEQ ID NO: 95531 - DNA, 168 bp, Glycine max
  Clone ID: PAT_MRT3847_57276C.1
tacggctgccaaaagaccgcggaagggaatggtgtgttttccggtttggttgttggctcagagtttgcgaataacttcatgcatggtgttgctgcattaacccttgacccaacgttcctagcactactgaaaatactgtcatgggtgtatacgatatccacctccaat

SEQ ID NO: 95532 - DNA, 216 bp, Glycine max
  Clone ID: PAT_MRT3847_57277C.1
gtcaaacttttattggctcatatttcatacctcgtcagccatatactaataagggcctactaatctacgatatgcttctattacttgcaacaattcgtacatccagacatttcctacatacagtaacctttcacactgctgcttctttctcgctcattctagagacaactctaagaactgaaacatcttattattcagatgaaaagaaagctaatg

SEQ ID NO: 95533 - DNA, 1198 bp, Glycine max
  Clone ID: PAT_MRT3847_57278C.1
gctcgcgcgggggattgtgtctcccggctcgttttcttcctatgatggttgtggtgccccgttgcgctatctagctccgatatattattacgttcgctgaaggtgtcgcccagcttctccgtcctcgtttccgttgagggccccagaacctcttctctccgttcacgccttccacaacaaccaacaaggaagggtttcgttcttgtaactcgaattggcgtcgagtgaagtgaagggcttcaaaaaccagagggaaactatgagcaatctcagaaccctatgtagacctcagacggtgttctctttcattagtttccaacaccaatttcgttctagggtttcctttcgaaaccctaattgcaagccccgtttgccatcgccgtttctgtattctacaatcggttcctgggtttcgaatccctggtttcgcgtgaaccagaggagaaccgtggccaaggcaacaaactgggctgaacaaaaatccccatatgaaactcttgaattggaaggagatgctgatgatgagcagataaagaatgcttacagacgcttggccaaattctatcatccagatgtctatgatggcagaggaacacttgaagaaggtgaaacagcagaagctagattcatcaaaattcaatctgcttatgaattgcttatagatagggagaggcgaagacagtatgatatggatagctgggtcaaccccatgaaggcatctcaggcatggatggagtggcttataaaaaagcgaaaagctttcgatcagcggggtgatatggcaattgctgcttgggctgagcagcaacagcgcgagttaaatcttcgtgtgcgtcgactttcttgttcaaagattgatccagatgaagcaaggaggattctggcaagagaaaaaaaggcttcagctgaatattactcgaatacccttaaaagtgcccacccttatactgaagaaaagagattttatgcgaagaaaggctgaggaaaaaaaaaagaagactttcagccggctcttggcagcagaaggtcttgagcttaatgattcagatagtgatgaggccctgtagtcaacatggggctttgtttccacataccaataccaatacctaatatttgatcaaaaccttgatgtcttcctcagcgaatctaattattttttattattatttacaaaagatatatgtacaaatattttgtt

SEQ ID NO: 95534 - DNA, 311 bp, Glycine max
  Clone ID: PAT_MRT3847_57279C.1
ggggaaaaccattcaaaaaccaaggcccttttgaaaatccaaaccccggttttggaaaaccggaaaaaaaaagattaattttccaaaagaaaaatcagccccgcaggggcaaaacaactttttaaattggggcccaaattgggaacaaaactaaaagctcaggggttcccccccccccccccaagtttgggacctttgggcaaaacacccttaaaaacattgcctttccccccgggtttttgggactgggaaacaactttgggttttttagcccttttctaaacctttggtttctggaccccccccttaaa

SEQ ID NO: 95535 - DNA, 466 bp, Glycine max
  Clone ID: PAT_MRT3847_5727C.1
cccacgcgtccgcggacgcgtgggtgcagatatatgatcaaaggtggtgataattatgctctcttcaggcttgggtaatatgttaaatgagctaataataaagccttttgatggaagggttctttgtatttatctttgatagtgtttctttctgccaagttggtcttcgtttggtattgacttaacaaaaagagtgtgaatggggaagctccagtgtccaaaatggactgctttggtgcattacctttagattcttcttgtctttgtgtgcgcagcagctctctgaaagctttaggatttgttgtaacttcgaggatgatatggtagttcttttcatcttgaagaaaatgcgcagcatagcgctatattatatttattttctatgtttgcttagcagggctcagtatgcgtccttaattattcatgtgctaactccttgtaactattaatgggcgggacttctttt

SEQ ID NO: 95536 - DNA, 707 bp, Glycine max
  Clone ID: PAT_MRT3847_57280C.1
cttatgtgtacataagtctgtcacggtggcatgatgcagaggtacaatgtacgaagcaaagggcctttacaaagaggctataaaagcttttcgcgatgctttgagcattgatcccggacatgttcctagcttgatctctactgctgtggttcttagacggtgcagtaatcaatcaaatcctgctatcagaagctttctgatggatgcactacggcatgacagatttaatgcttctgcttggtataatcttggcatttttaacaaggatgagggtacaattctagaagctgcagactgttttgagacagcaaactttcttgaagaatcggcaccagttgaacctttcagatgactgactctgcaagcatttttgtcatttaatctgatgatgatgatgatgatatatatatatataacactttccctaacactctttgtgacgcactatctcctgttaggtaaaggtccggtgagtttcgttttctatttggtgggtcttattcacaaattagtaggatccacctaaattgttagcgaatgtgttacttacactcattgttcaataagaaaagcatgcttcatgtttggtttttcttgtttgtaactgtgagctgctgctttttttgtcctctctcagttgtcgctcaaggttgagcagtgagcaccgtcttcgaaaaatatttaaatgaaattaacattaaacacga

SEQ ID NO: 95537 - DNA, 596 bp, Glycine max
  Clone ID: PAT_MRT3847_57281C.1
cccacgcgtactagtctcaggagtaaggtgaagcgtgaggaaactcatgcataagctgacacataatatgaggaacaatgtgtgtgcctgcgcatgggcctacacagagcacatgagcaccagactcaacgcagaagacgtgagggaggacaccaggatgatgaccaacaacactgtggaccacccgggcgagccgctaagcactgtcctatgagctggcatctcagtgtggcttcccatgttgtttgacatgctctttgactagctgctccaagagcagttgcaaatccagtggaatatcctatccatccgagaaacgattcacaatatggatgaacttgaccatgctcactaccatgctatctgtatatccctcgttatagacgctaatctaaacgcgaaccagatcatgctggagactttcaccgacacgtgcacctacgcttgtggtctacgttgcggtggacactccggcgaaccttgcggcgatgaacggcgggaacaacgcttacgagtctgtttacctggcactgctcgcgatagggctcgacatcttgcccgacgagcacggtgaggagcaaggtgacacgtcgcag

SEQ ID NO: 95538 - DNA, 714 bp, Glycine max
  Clone ID: PAT_MRT3847_57282C.1
acaaacaagaaaaaccaaatcatgaagcatgcttttcttattgaccttataccgtcgtcaggtacacatggaaattatacatgaacaatgagtgtcagtaacacattcactaacactcttttttaacacattcttctattgcttaaaatttaggtggatcctactaatttgtgaacaagacccaccaaatagaaaatgaaactcaccggacttttaactaacaggagatgtatgtcacaaagagtgttagggaaagtgttgttgatacatgatatatatatatatatatatatatatatatatatatatatatatatatatatatatatatatatatatcatcatcatcaaaagcgtcagattgaataacaaaaatgcttgcagagtcagtcatctgaagggttcaaccggagcggattcttcaagagagtttgctgtctcaaaacattctgcagcttctagaattgtaccctcatccttgtgaaaaataccaagattataccaagcagaagcattaaatctgtcatgccgtagtgcatccatcagaaagcttctgatagcaggatttgatcgattactgcaccatctaagaacaaccgcagcagagatcaagctagggacatgtccaggatcaatgttcaaagcatcacgaaaagcttttaaagcctctttgtaaaggccctttgcttcgtgcattgtacctattgcatgaca

SEQ ID NO: 95539 - DNA, 1255 bp, Glycine max
  unsure (1)..(1255): unsure at all n locations
  Clone ID: PAT_MRT3847_57283C.1
ggaccttccaacggtcaagctttcataggatttttctatttgcttgttgaagaaaaggcgggatctgctgtgataaaactattaaagaagttcataagaagattttatggcgaaaacccaatggagtcaaaggtaattgcaagaataataaacatgcaacactttgagagattatgcaatctgggataggacacgattgttgaggttgatttgtttaattcggcaatttcttccaatcttttcttgttcattgagcctacaattttgttagatcctccactagattctgagataatggcagaagagatattcggcccactgcttcctataatcactttggataaaattcaggaaagtattgagtttatcaatgcaaagccaaaacctcttgccatctatgccttcaccaaagatgaaactttcaagagaaagattctatcagaaacatcctcaggaagtgtcgtatttaacgacacaatggttcaatttttatgtgatacactaccatttggaggtgttggccagagtggttttggaaggtaccatgggaagtactcttttgacactttcagccatgaaaaagctgtaatgcatagaaagctgttccttgaaattgagccaaggtaccctccttggagtaagttcaagctcgagtttatcagattggcatacaggctgaactactttggactattactgcacatgctgggcttgaaaagatacaagtagataaatacctcagcacagtgttcatctattcctcaaatacacgttgattaaaaaagaattaagctttattgtgactgaatatgagttgtaggaaaataggagaaagggtccttatttgcagaagttgcacatgtggtgaactttaacttggcgttgtaataaacgaacctttgtatctcttatttttcttgctagtaataggatgtttttacttctaaaaaaaaaaaaaaaaaaaaaaaaaaaaaaaaaaaaaaaaaaaaaaaaaaaaaaaaaaaaaaaaaaaaaaaaaaaaaaaaaaaaaaaaaaaaaaaaaaaaaaaaataaaaaaaaaaaaaaaaaaaaaaaaaaaangggggggccctttttaagggtccaaagtttacaaccccgggatgggaaaaaaatattttttttttggggccaccaaaataaaatccgggggcggggttttaaaaacgggtgggaggggaaaacccgggggttcccccaaataattcccttgggaaaaaacccccttttcccaggg

SEQ ID NO: 95540 - DNA, 306 bp, Glycine max
  unsure (1)..(306): unsure at all n locations
  Clone ID: PAT_MRT3847_57284C.1
gggacgagccacgcgtgcgtaccaccacattctatcgtcctataatatataatactactaggctgtggtccggtatggcttgtccgagccaaggaagaatacancagaagctagcaaacaacatgagtggtgccatggacatggtgcgagccgcgtgacccaaacaaactacatacgcctgcctagctaggagagagcagacattgagagctcagaagcgtgcgtgcacacgtaatgatcgatgtgctgaggaggaaaagagaacgagatcgaagggattattaaagttctgtcacgtcttttttc

SEQ ID NO: 95541 - DNA, 395 bp, Glycine max
  Clone ID: PAT_MRT3847_57285C.1
ggcctgtggagaagaatgagtactttgtgctcgacgaagaggaagaagaggctgccgagattgcgcttagggatgaagaatttgagctttgaagcaatctggctatataactaaatatcagtgcaatatggtttcattcattgatgacttggagaattgatgtttagagcaagtgagcatgcaattgaacaagagtgctgcctggatccatttttcttatactaatagagtaccttgaagcatagcaaggattgattcatgatgggcaagtggggggttttgtggctaactatatcttctaactattcaattggttaatgttagtatgttttatttgctcctggtttatacttgttcattttttgtgaaagatctgctagaaatgttgttgattt

SEQ ID NO: 95542 - DNA, 911 bp, Glycine max
  Clone ID: PAT_MRT3847_57286C.1
accagcttcttcacccttttgtgtatacactgtataatcccccacaaccctcatcttcttcggtccggaattccagctctctctctctctctctcttgaagtgttggaatttgttttcaacttcccaagggggaaaaaagtcaaaaaacaagaaaaaaaaggggattgtgtttgtgactttttatcgagacaaaatcgagtctttatttataaagtgatatattttgcaattatatgtatgaatatgtaccaattgcaacagtttcatattcaacccatgatgatgaagatggataatacgatgaggaagagggagagaagcaaagccatggagaaagagaggcttcatgtgatggacttgagtggcatgtccttggagtttcttcccaaaccttcgcttgatttagccaccatttgcaagttggacctatctaataacaatctccaggaaattccggaatccttaacggctagacttctaaacgtggaagtgttggacgtgcgttccaaccagctaaactcccttcccaattccattggctgcctctctaagctcaaggttttgaatgtctcaggcaacttcatcgaatccctccccaaaaccattgagaattgcagagccttagaagaactgaatgcaaacttcaacaagctgagcaagctgccagacacaatagggtttgagctcatatacctaaagaagctcttcgcactcaccaacattcttggctctcgttgaacctttgaattacactcgacagcttccaaagcgcctgggggaccttttcttttctaatctgcactctgccggcacatatcagactacagcaaatatgttaattttagctgtatgtgtgttactctcttttaatgtatgactttgaagaaaaataaattagaatgtcgtgtcc

SEQ ID NO: 95543 - DNA, 465 bp, Glycine max
  Clone ID: PAT_MRT3847_57287C.1
tgctacttgcggtaccagaggtttctaataacaaccatgacatatgggatctaagacatgtacaaaaaaaagctaagagagcatgtgtgtttcatccaactgctagatgaaacgatcctctcatgtgtgcaataaacacacacatcgttatgaagtaggcgaggtgttattgattctcatactaacactatcttgaaggtaagagatacatataataaccatagcgatatgacactgcaggtcgattacatattggtatggcaccgacaactgtgcttgtattttcacgatatagcagtgaccaacacctcaaatatggatagactttcaatatcttgtggcagttatatgtttgacaaaaaaacaaggataaatagagaccgagcgttaaactgatccaggagcaatttaacacagcataagatccgtaactagatcatgtatagcctgtcgtaggtaatgact

SEQ ID NO: 95544 - DNA, 317 bp, Glycine max
  Clone ID: PAT_MRT3847_57288C.1
gctacacgaccacacatacatgagcttttaccacaatccatttaatccctactacaggctggaatcaaagtctggggtcttaccattaattatcaagatactgcaatttcaattggtctttcttataaacttctgattgcatatatacagcaaataattataaatggcacttcatatgttgagtacaaaaatctcttggctgatgccacaacatagtatggtgtgaaatcttcaagtatataacaacataatctataattcaaaattgattctaaacatatatgccctaatatttccaatgatacataatcctttat

SEQ ID NO: 95545 - DNA, 209 bp, Glycine max
  Clone ID: PAT_MRT3847_57289C.1
gtgaatctcatgctgtgtgtcgatggtctgcatcgatgatggcgccacgctcgttgattccgagacgcctgcctctgctccatctaaagaaggaggtgacgcgtataagatgtcccgtcgcactatatgcctgacgtactgtggatggtcatttctcgacgtatgaatccgctgtgtaatcatgtaacgacttgccttgacgatcatcc

SEQ ID NO: 95546 - DNA, 260 bp, Glycine max
  unsure (1)..(260): unsure at all n locations
  Clone ID: PAT_MRT3847_5728C.1
cggtagnagcaggaatcggtnncgctctggtagcactnggaccctctctctccctcgtcgtttccgncanttccaaaaaacccntcctcattcgcacagtnctcnccattacgttngggtggcngattattttgattgtngcngtctggaatatggaggggggttttgcctctcancacaanaactgcgtggacttttggaatactcatgtnctcanctttngcgtgtcaagangcctcanacttttcttctggaaaana

SEQ ID NO: 95547 - DNA, 269 bp, Glycine max
  Clone ID: PAT_MRT3847_57290C.1
agcagaagagaccgggtaccaaaagcaaggccaaacgaaaagcaccgacgaagcgcccgagaaccaacagaaggcggaggaccaaagcaaaccaaacggggcgaatccaacgaagcaaactcaaccagaaacccagcggagccagggccgaaaagaacaaccaaccgcgactaaaacaaaccaaactataaaccctaagaaacaagggggtcaataagagacaaaggacccagctgatccgcagcaccgccaggctggcgcagaccaac

SEQ ID NO: 95548 - DNA, 388 bp, Glycine max
  Clone ID: PAT_MRT3847_57291C.1
gggaaacaaaaatagaaatttctattattttattggcccaaaaagggaaaaaatttaacccaatttccggccttttcaaagcaacctttatagaaactgaaaaattcttttatttaaatttaagggaaggaaaggatttttatggcaataataaagccagagctgggggcttaatgttccttcttggaaccttcttagcccccttaccctttggattgaattaaccgggaaaaaaaaagggggctaaggcgggctaattaattttccagccttcccccccccttaaaccctttaacatttaatgcgaacccccaacttacctttattttaatttttaaccctactttcaattttacattttcccaaaaccaccttttttttaattttt

SEQ ID NO: 95549 - DNA, 532 bp, Glycine max
  unsure (1)..(532): unsure at all n locations
  Clone ID: PAT_MRT3847_57292C.1
cgcccccaagnaccggggcggaacaacggcgggcgaaaggaagcttttccgaccacacgtttcgagacgggtgcgggcagagcaggaggggcaaagaggaagacgaaggccgaagccgagaaagcacctgacgcggcaaagactgagaaaaggaaagtggagcacgagaagaacatgagagcccaaagcaagaaacaggcggaaggggctactggaggggacgaagaagaagacgaaaaggccgcacctgaggtgaaggaggaagacgagcaggaggaagggagaggcgaagaagaaaaacacgagcagagaatggactgacgacaagagcaggtaggtaggccccgatgatgccgaacaaccgagaaagaggccaggacatccactaagaagaggaggaagcagggcaaaaaacagtgaaccagacccaccgggcggggaaagacgcgacacccaaaacgagaaaagtgcaaagaaaggagggctcatgaggcggaccggcaaaaccaacagaagagcgaagggaggggga

SEQ ID NO: 95550 - DNA, 1072 bp, Glycine max
  unsure (1)..(1072): unsure at all n locations
  Clone ID: PAT_MRT3847_57293C.1
cgtaagnagcgggcattcggctcgaggaaaaattagaaggttgagtggtctagggcccaagtagctccaaccaacccctcacaggtcgaagggaggggccaagcgaagggaaagggttaggcatcattcatacactgaacgaacgctcagctcagtcaggtgccggcgttcctctttcacgttctcatggaaaacgacgacgtcgacatgcacgctgccgacaccagcgaagaattggatgacatgaagaagcgcttgaaggagatggaagatgaagctgctgctttgcgagagatgcaggccaaggtcgagaaggaaatgggatctgcgcaagatcctgcaaatgcttctgcaagtcaggccaataaagaggaaatagattctcgatcagtctttgtaggcaatgtggactattcatgcactcctgaagaagtgcaacagcattttcagtcttgtggaacagtaaacagagtcaccattcgaactgataagtttggccaacccaagggttatgcctatgttgagttccttgaggtggaggctgttcaggaggcccttttgctgaatgaatctgaacttcatgggcgccaattaaaggtaacggctaaaaggaccaacataccagggatgaaacagtatcgtccccgtcggaccatcaatccttacatgggggggtttcgaggcagaaccccatatgcacctccctttatctactctccatatggatatggaaaggttccaaggttcagaatggcaatgcgctacagcccctactattgaaagtccaattctggtaggatggactgaatgacgcctttcttcccccctagtagtatatcatggtcggagttttggccattgaatatgagggagggaaaatccaaccagttctgtgaggattaagcgttgacttatcagcaaaccttgtaaaattgtggtgtttgcccctgctttgctttattatcggtatattaaattaagttcttgtacaagtatccttcgtaagtgtggttaatacatgggttttgggtttatctatttttaaaaaaaaaaaaaaaaactcgagactagc

SEQ ID NO: 95551 - DNA, 191 bp, Glycine max
  Clone ID: PAT_MRT3847_57294C.1
cccactgcgtccgtacggctcgaacacgaccacagaaacgcctacatagtgtatttaagggatcgtcatcacccaccaacgcacgaaggacgacatctttcagagaggggattcctatacgaagggtgcataaccgcgtggctaggatgacctaccccgttaatgtaggatccagttcgattccttacgaa

SEQ ID NO: 95552 - DNA, 591 bp, Glycine max
  unsure (1)..(591): unsure at all n locations
  Clone ID: PAT_MRT3847_57295C.1
nnnnnnnnnnnnnnnnnnnnnnnnnnnnnnggggaagatgcgaagatcatccatgtttctaactgatcatgaaaatacaaaattacaagtctcctaatttaatgtacacacatcagttatatactttcttcaagccaaatatgaaaaaaaaatgtaaaatgaaggacaagaaatacgataaataaaaaggatgtgccatacaagggacacgtcaagtaattgattaatcaccatagctgacacaggtgacagcggggtttatttagtgttgttctaaaacagctctggaatattggtgttttcttttccgtttgacaactcaggcttaaacaagggcacttttctattattattattattattattattattattataattgggggcttttttggctactttgcttctctggggctggccattggttttctttggcatggggccctgaaaacaaacccgaatttcccaaagacgggctggtacccacctttcctttcagattcaaccccaactctccttccctaagctggaagtaccatggcccaactactggctgcaattgggcctccactgatgaaagtaagcatatgc

SEQ ID NO: 95553 - DNA, 305 bp, Glycine max
  Clone ID: PAT_MRT3847_57296C.1
cggattagttggtatatacataggcaaaagatttcaaaacattatccatttttataacatgaaaggtaacccattactgatttgtcgaaggattatgttgttagatgtctcctattaaataacgatatactggaaatatctttctttttgtaagattatgacaatcttatggttctgaactaaacaaccaagaaattcgtttaaaatgagaattaagtcttacggggaggatcaataactattctaatgagccttcttaaagagtatgtatgtgggctgggactaccaaaaaattaagaactccc

SEQ ID NO: 95554 - DNA, 251 bp, Glycine max
  Clone ID: PAT_MRT3847_57297C.1
cggccttctgccaggtatctaccaatccccatcgaccagcacgacgatgctgcgagtggccatctgcacgagcccttcattcaaccagaggatcccgctgtgtgcttgcatcgagtatggatcagattatagtgtgaaaaatggacccagtgtaatggcgctgcttatgactcttgttgcagtgtgtggtgctttcacagctggaacttgtgtgggctattcagcacgcactcaagcggctatcagggtag

SEQ ID NO: 95555 - DNA, 537 bp, Glycine max
  Clone ID: PAT_MRT3847_57298C.1
gggtaaaattccaaaaacctaaaaaaaaactaaggggctaaaccaacccaaacccccaaaaactcggaaaaactcctttaaaacagcaacccaaaaggcccaacccaaaaattttacaacccaatatcaaaaaaggggggccactttttaaaattttttggggcccgccccggctggaaagctgaaacaactggaacactgggggcaggggatactttttttccaaaaccttgggccaaacgctcccccctccgaacaatttttttttttttgggggccttgtttttggcccgttgggccccaaattgaacggacaagggttttttttttgccttttggggtttggacttaaaaaagccccccataaaaacccttttggttttgaaaacggtacccttgacctttatggacatggaaagaaacaagggcctggaaaactttttaaaacccctggttttgcaaaacaagggtttaaacacacccattttcctcatccaaaggattttagggggaaaccttgccccccttggaccctta

SEQ ID NO: 95556 - DNA, 444 bp, Glycine max
  Clone ID: PAT_MRT3847_57299C.1
acccgagggaagggatattttattaggtggattttatggtgggtataacagcctttctcaacatcaaaaggatttggaaatttttcttcctatcttggggagcagggggtaaatatcaactgggcggggttgatgttgaactttaaaaaccaaatcacattttttttattgaattttcttctttgaaaaaaaaaataggggtacattctaaacatccatttgttttaaaaaaatttggcccccctcccttgcttgaagccctcaagaagggacccgaagaagttgctttttttcttgttaacgcaggagctatttttaccattgatgatgggggcaattttctttgcatgactggtgccaaaaaggagttggaccttttaaaaagggttctgggttggggagttaatccaaatgccaaaaattttgatcaacggacccctttta

SEQ ID NO: 95557 - DNA, 788 bp, Glycine max
  Clone ID: PAT_MRT3847_5729C.1
gtttcggtccggaattcccggctcgacacgaccgtccgctccgcacacggagacactgaaaatggaattgagtgagttgagaaaagcggtggaagaggtggagctggtggacgctcatgctcacaacatagtttctctcgattccaactttgcttttatccatgccttctctgaagcctatggtgatgctgttactttctcaccacacactctatctttcaagagaaatttaagagaaattgctgagctgtatggatccgagctatctttgcaaggtgttgaagaacaccgtagagtatctggaatgcaatccatctgctcaacatgcttcaaagctgcaagaatctctgccatacttattgatgatggcttacaattggacaaaaagcatgatatagaatggcataggagttttacacctcttgttggtagaatcttaagaattgaacggttggctgaggaaatccttgatgaggacttgcctgatggatcttcttggacagtggattcatttactaaagcctttgtctcaaagttaaaatcagtttctggtgagatctttggattgaaaagcatagctgcataccgcagtggcctagaaatcaatactaatgtgactaaaaaggatgctgaggaggggctgaggcaggtgttgattgctggaagcctgtccgtattgcaaacaaaaatcttattgactacatcttcttacaaagtttggaagttgctcaattctatgacttgccaatgcagatacacacaggctttgggataaagattggacatgc

SEQ ID NO: 95558 - DNA, 449 bp, Glycine max
  Clone ID: PAT_MRT3847_572C.1
aggaaattgattgagactaggatatatatattaatgtgaaattgatcttgaaagtgaataggaatgggttgttcatcactgaccacgcatgatacatgagaaatgaactacacctacttaattaacccctcgtctgaatcttatgatggaacaattttggagctacaacgtggtggcactgatgatgatcggccaacaaaaatcttttaactggagtaatgtggtggctaaagcatatacttgaccattccgcatacaaactgtgtctttgggaggttgaactcattcgtaatggacctgttgggagacaagacactcacgtacaattgctgaaccacgtaacgatgctctgccatctccgacctgaaggtccacatttcagacctgtcaaaggtcaacatgattgcggaccaagactttgggaacacctgtatggtgtgcctgctgac

SEQ ID NO: 95559 - DNA, 452 bp, Glycine max
  unsure (1)..(452): unsure at all n locations
  Clone ID: PAT_MRT3847_57300C.1
gaaaaaaaaagggtttcccccacctttaaaaaaagcccccaaaagccccggaccagggcatgttcccgggaaggtcccacaatccccagggcccgagaagagaaaccaccccggaagggacccttttggggccacctttaaaaaaaaaccctttccttaataacctttttaaggggccttgggcccaacttcctaatattcttttcccagggcaaaaaaattttaaggggcctaaaaaaattccccttttttctttccctgccaatattaccaagaaacgaacccctttttggcaaaaatgggggaaaatttggggggccaggcgaaaaaaaaccccaacaccnctgggggattgggagatttgcccccggccctttaaaccttggaaaaataaccacctggaaaaaaggggggggggtggtattggttcccatttgaccccggggggcccc

SEQ ID NO: 95560 - DNA, 249 bp, Glycine max
  Clone ID: PAT_MRT3847_57301C.1
ctgcgagaagacgacagaaggggatcggcgcaacaaatgtcaacgctcagtgcttctctcctctgtcatatcctctctctggctatgcttctggctactagggcagctgcaagtgcaactgctcgaagtgcagtgggaggccacgctgtgtcgacgctcttggcgagtcttgttgcttccacttctctccttggaattgggtcttctgcttaccacgccgattgagcagcaagtgtatatggctgagga

SEQ ID NO: 95561 - DNA, 476 bp, Glycine max
  Clone ID: PAT_MRT3847_57302C.1
agaggctgttgaaggtaacacaaacatgtgcaagttttttcatgtaggaactaaaatgaaaaatagtgtcaagcgtaaaccaaatttacaattatatcttttactcttttttttttttaaaaaaatcttggactgcctttctaaaaaaatcaaaaaaaagaaagaccttgtttgggagaaaagagagtaacacaaaaatcaaaatcccaagtaaatgtctattgcgtaggtgcaaatcaaatcatttgtcttgggctaatatgaatacatgacaagcttcctttattgttgaaaacaaaaaagtgatacctactcactcaggtattaaaacaatagtcagcacatcatcaaaagactgattgctgcttactggttggaaggggcatcctcgggtggaacacttccccctttttttcctgaaggagcataaggagatttccggtaacgtttgctgctgcgttggctgtaatttaagc

SEQ ID NO: 95562 - DNA, 252 bp, Glycine max
  Clone ID: PAT_MRT3847_57303C.1
ggaaatctagggacacaacagaatctgagtaatggtaggtgaacaccatttcactccaaagtccaaacactacgtagacaacagaatctttgagtaatggtaggtgaacaccatttcactcaaaaatccaaacattacgtagactctattatttcttttttttatgttttcttcttcccaggttatattatttatttttacctatatttgtctttctttctctttctagctattatctagcattaacccccg

SEQ ID NO: 95563 - DNA, 763 bp, Glycine max
  Clone ID: PAT_MRT3847_57304C.1
ttcgagacaagagagcgaaagacgaaatttacgatagcttttgaaggtaccagtttttgtcatcactctctcagctgatcggtgcttatagatccagcgtcagcagattcaatttgacactggaagcaatttctcatttcaaagattaagtgaaaacatggttgtccttgctgcatccattgtgagcaaatctggcaaagttctagtttctagacagtttgtggacatgtctcgtatcagaattgagggtcttctagcagcatttcccaagttaataggcactggaaagcaacacacatatgttgagacggagaatgtgcgctatgtttaccagccaatggaagcactatacctgcttcttgtaacaaacaaacatagcaacatactggaagatttgacaactctgagacttctctccaaacttgttcctgaatattcttactcccttgatgaagaggatatttgccaaaatgcatttgagttgatttttgcatttgatgaagtcatctctcttgggcatgcggaaaatgtgtctgttgcacaagttaagcaatactgtgaaatggagagtcatgaagagaaactgcacaagctggttatgcagagcaaaatcaatgatactaaggatgttatgaagcggaaagctaatgagattgataaaagcaagattgaaaagaacagaggtgataaagggggatttggtcctttacagtcactaggctctggaaaaattgaaaaagctttagtgatttgagcatatcta

SEQ ID NO: 95564 - DNA, 349 bp, Glycine max
  Clone ID: PAT_MRT3847_57305C.1
aagacaattaaatctattacatataataggaatataaacaatccaagacaccaccctgataagttgttgcaaactgatgaaggaaaccgaaaacaaggcatatctaaccacaaacaagaaacaacagatagaaagaaatagagaaatgtcacccataagcagaatagaggtgaaagaagcagaatccaagacataaaacaagaataaaatacagtttgaaacaaagtcagaagaaaacaagctgcagcaggcgcactgatgcctaacatcaactccccaagggactccagttctagtgacaccctaccattgtgccttggccacttgcaaccttatatatggctgaaat

SEQ ID NO: 95565 - DNA, 404 bp, Glycine max
  Clone ID: PAT_MRT3847_57306C.1
aagcgcagagggctctcatccttttggtttcctttttgacagacaagtttggcaattgaaaaatagttcctaaccccggggtaacagatcatacaaaaattataattggggcccatatttttatccaagtgaagccaaaacttcaaaacttaaaggggggaaaattggttctgaaccaaaaaagagagttcttggggcaaatcctgcccgattggggaggttttgatgaaaaaccaggaaacaacaggtcccacagcccccactttttgaaagggggcctcaatgcggcaaaactaatatgtttttggctttggagccttcttgggtccccttttagggggggggtttttcatgccattgaaaaacaattcagccccgaaaagagccatattttgtggtaattt

SEQ ID NO: 95566 - DNA, 345 bp, Glycine max
  Clone ID: PAT_MRT3847_57307C.1
accacgcgtccgaaaaaaaaaaaaaaaaaaaaaaaaaaaaaaaaaaaaaaaaaaaaaaaaaaaaaaaaaaaaaaaaaaaaaataaataaaaaaataaaaataaaaaaaaaaataaataaaaatataaaaaaataaataaatttaaattcaattgaatttttttttattttctaaagtttttggaagtaaccggctttttcatttatttaatctatttgctttatatcacgctttcttttcgtgagctgttgtcatagcgactctgaccgatttcatttcccttcactatcgttgcgataacctgattgtggaatgggaccttttttgtcacatttaattatgcgt

SEQ ID NO: 95567 - DNA, 362 bp, Glycine max
  Clone ID: PAT_MRT3847_57308C.1
tttttttttttttttttttttttttgggttttgggataacccaaacatgagtgggaaatttaaaacttttgttggtcgggaacgtaataaaaaccatacactctttgtggagaagagacctagtgttattgcctgggagttggatatatattcacccaaaattttgtgtaaatggtttgcaacaaaaagcccaaagagaacagggtatttactttccttaacagggttatatacttattggaacaaaaaagggggacattttgaagttattcttaaaaaatatggagggtgaactttgggctgggggaaaatggattttattttagcccttggggggacaattggtactggttcttgatttt

SEQ ID NO: 95568 - DNA, 255 bp, Glycine max
  Clone ID: PAT_MRT3847_57309C.1
cgctaactcagatctaaatttctttgcttttcatatcaatgccgagaacaaccagaggaacttccttgcaggttcgcaagacaatgtgataccgccagctccctagtcaagtgcaggagcttacgctccctgggtactgctaaagatcttagacaagctattaaagagccaaagtgagtcctactttatggatactcagtctcagcagaccgcggttgggaatacgggtcgaaagggtcctattgtcttcaattt

SEQ ID NO: 95569 - DNA, 274 bp, Glycine max
  Clone ID: PAT_MRT3847_5730C.1
tcgcacgtgcattagcccacgctatcggttggatcatacagcaatggccaacaggtttaattctaaggcccttgttaacaagtatcatccggtagacattcttcactcgtgatgccgctctcggttatcatgactacctcaacaccgacgacgtgcactacaatgacagccgatcctacgaccacagctccgtcattgatcgccacttctaacgctgtatacctataactgcactccgggacgatctattctcatatcgcgtggatccacatgc

SEQ ID NO: 95570 - DNA, 475 bp, Glycine max
  Clone ID: PAT_MRT3847_57310C.1
gctttacgcggtccaatcctctcgccgaatccctgaccataattgcaattttgctcaaggagggaagaaacccggagaaaaaatacggtttccttcccctaagaggacatcctagaatctcctcaaattcttcaacggtcggtctaattggaagtctccaaacgtgaagcatctcaagggctagtcatagtattgtgtgagtgatgcaatggcttctgtggatatctctgctatggtcaaatctaagatcttttcgtacgccttgcggaaggcttgcatttggagaggtcccatcaaccgccccaactccttaatgctggtgatatctaggcccttaatcttgacttgataaaaccttttaccagtttgatctgtccccatgtttactaaagtgaaacaaaaacccggtgcgaatcaaaactccgacatctatcatgggtggaatggatgaatgcatgaaggaatgcacatgaca

SEQ ID NO: 95571 - DNA, 723 bp, Glycine max
  unsure (1)..(723): unsure at all n locations
  Clone ID: PAT_MRT3847_57311C.1
acaaggcctcaagttctgctctcatctttttgcaagaatctaatataatttgcgacataacccaaagaatatgggatgctaattaggtttgccttcttcgaagaacaattaaatgattacataaatttcacgccggggaaaagatcccatgaattgatgaatacaattaaaaataaattgagatttcaccaaaatctccagggatctttgtacggaggaacataattttctgttgggctaagaagacgaaacgaattcaccgctttatcaaggaaaggccccagtttttcccacagagggctgacggttgaagcactgatagagtacaaataacctgcaatcaagtgtttagtaataaaagaagagaatttctaaaatgcaacaccagaaaaataatataacttgaaaagctcataagtngcataaagagaaacaatggcatgtgaattagctcattggtgagctcataaaaatataacagagaaatataactttgtcttgttttgtttttcttcccattgttccttgtatgtctgaaacaagtgtggttctcattgaatgagaaatggaaaagagaacaaaatcatttccaacaggagcttccaagcactttgtatcaatttgcagaggacattctcttattagatgtgcaaaggttgaaataatctaaaccaatgaaaaaaactagaagatataccatctcttttagctgttgaagcaaga

SEQ ID NO: 95572 - DNA, 861 bp, Glycine max
  Clone ID: PAT_MRT3847_57312C.1
gataaaaataaaaaaagggtaagaattaatcaagaaataaaatatagttgaattttaaattgataaaaatattttaattgtaagaaaaaaatagatgtttatatagtgtaaatatctaaaaatcaggattacaaatgaaaagtagcagagaatatctgatcgtgcccaaataatacaagaagcttataaagctcagcaaatcagtcttactgagtcttacaaaagcctaacacaatgaaagcagtgactaaaaatatgtacaacaaatgaattaaatcctacccccatccccaaataaatcaaataaagataaaaagaaatcatcactgcatcatcactccaaattcatcaaagctaagcacgccatctccattcaaatcaaaatggccaatcattgctctgcattgctccatggattttgattctcccaacctattcagcatcctttgcaagcttttgggtgtaataaacccaaacatttcagtgtcatggtacatctcaaaagcttccgccaaatccttcaacttctcatcttcccctgctgcctccattatcttcacaaaatcttccaaactcaaaaacccatcaccgtcagaatccaattcctcaatcaacttttcagcgtctttgaacaataactcaccacccatcatgcatagccggttcctaagctcagatggggaaatcttaccatccccatcttcatcgaaatacttgagaacacgctcaaactctgcgctcactctcatattatcacaactaagaaaatgtactgaaaatagcacttgtgaaattgttatgcacaagattaattgtgtccccttctgtcgtcttctcgcagccgtacggacgcgtgggcga

SEQ ID NO: 95573 - DNA, 480 bp, Glycine max
  Clone ID: PAT_MRT3847_57313C.1
tacggctgcgagaagacgacagaagggcatggtaacaatattcaacattattgctcgtatgagtaatcatccaatggtcacatgaccttgttttcattaagttatatcttgcgtccaatgcgttgttataaacaagtgtccaatcatttgtgaaaaccagtgtgtacacactatgttcttctataacgtccaaaggacttattcacttgcacatctttttatattatgcataagtgatgtctaatcttgtactggattcatgttagctaaaaagagaagtgcacgtacccatattcttgtatattcattttgcctctcttatttgaattgttaacatttgaagccactacatgtattaagtgtggggaggggtatcattgctcctactactttgagctctcagtttatatatgtgacctcttacatagttctagttctagtattatgaaaatctcttgggtttagaactttgtgttttta

SEQ ID NO: 95574 - DNA, 395 bp, Glycine max
  Clone ID: PAT_MRT3847_57314C.1
ggctcgaggctttgttatcgaacatttctttccgattctacaaacacaccgacatcatcatgcatggctgccttactgtccactgacggagctgccaacggagctcttgtgaatctgaatggttctggagctggagcttcagttcccagttcagtctttctttgggaccaacttgaataaggctattggctaaagggttcccatcagcaaggtttccggaggaagctttaaaattgctgttgtacaacagaagaatgagactgatgaaacccagcaaaccgtcagggacagatggaagggacttgcctatgagatttcaaccgaccgactagacataccaagaggaaagggttaggctggctccgttttcaaagctccacaggatgctgcaactc

SEQ ID NO: 95575 - DNA, 456 bp, Glycine max
  Clone ID: PAT_MRT3847_57315C.1
gcacgaggttttttcgtctggatggagcccagataattacatgttcgtcggactttggcaaatgtttttgacgattgtgttgtgtttgaactctgagtgtctctgacttgtttgctcaggtgagtaaatgcttctgtagttttgttttacgtcactttatggtctcaatacttgaatgttttgcttctgttgttatgtattggttttgcacgttgccaactcttgcaaacttggcaggaacattagagtcaagaggcacggtttcagttcttttttcttttgttttgttctaatctttttctgattcatatgttgagaagtgcaaaaaaattaatttcatctcttctacctgcggaatagatggacgaagatttgggtcatttgatgaaagttatttcagttcaatgtttctttctcattttttcatcagctagagattcagattgcaaaaataaa

SEQ ID NO: 95576 - DNA, 244 bp, Glycine max
  Clone ID: PAT_MRT3847_57316C.1
agatgacgcaattttcctactatggacgtggcttacaaatttggagaagggatttaatatgcactacaactactggtcttctaacatcagagcagggttcctaaatagaacaggatagaatagcagtgcatgtttctgtattatttaaatgtttttccagattggccaaactatgttaagctcaattctggattgatacttgtactgttagtacctctggtactcaattaatatatattattaa

SEQ ID NO: 95577 - DNA, 570 bp, Glycine max
  Clone ID: PAT_MRT3847_57317C.1
ccacgcgtccgctggggactgccatcatagacttggcagattgtgggtggacttagagaagaaccttggcttttacgcatttgacggccgaggaccacagaacccagaatcacccactttggttcattcaaatggaccctgtggaaaaaagccgcccttagtcctccttgaaggacagctggacaaagggaaataagggcagggaatctgtataaccattgatgaagggaaagtatgctgaggaacctgaaaccaccttttttactgaggacaaggtttcttctaattcatcgggggccgaagcccttccttcttggaggctaaggcggggatgcccccccgaccagaagaaaatgggcccacttcaaaccgggggaaccatgaccaggagcatgagcctcccttggccttcaaaaccagaagtggaaaagtgaatgggaaggaaccagaagcctatgaaaaaccggagaagaagtctttctatgggtcaactatggaaggggcctctgaaggcgggagtcccgtaaatgggcatacctctattaccaggccttccaatcatagatcagc

SEQ ID NO: 95578 - DNA, 173 bp, Glycine max
  Clone ID: PAT_MRT3847_57318C.1
agttattaaagtacatataatccatagaacgttaataactctacactgaaataaacaagccaaaacagttggaagtttagtttattctttctgtggatctgtagaactgtgctaatttaatccagactatgagcattgttgccgaaaaaaaaaagaacaatacaaaaactaat

SEQ ID NO: 95579 - DNA, 366 bp, Glycine max
  Clone ID: PAT_MRT3847_57319C.1
aaaaagggaaaaaggggggggttcatcctttttcattctaatttaccaaccaactacagattttggagccttttggttccaaaattttttgaagggaatttttgaccaaatacaaaaaggtacgcttttttagggggaacaaaggtaaaagcagatttaggggtccaaattggggagttcccttaatccgggaaaatggacccctagttccccaaatcactttttttaaaactgggggttgggatggaaaaggaacaaaaatggtgagaaaaaagggggaataaaaactcacttttttaaaaaggggccaaaatttttttttaataccgggtgaaatggccggccactttctgaacccattttttc

SEQ ID NO: 95580 - DNA, 422 bp, Glycine max
  unsure (1)..(422): unsure at all n locations
  Clone ID: PAT_MRT3847_5731C.1
ggaagtcttgcaagttttctttacgatcgaccaggacaagaagatccaccattgacttgggctctgagactaaaaatagcagttgatatagcacgtgggctgaactatctacacttcgatcgtgctgttcctcacggcaacctcaaagcaacaaatgtgttgttagatacatgtgacttgcatgcacgtgtagctgattactgccttcacaagcttatgactcaggctggtacatttgaacaaatgcttgatgctggggtcttgggatatcgcgccccagagctttctgcttccaagaagccaatgccttccttcaaatcagatgtttatgcttttgggattatacttttggaacttttaactggaaggtggtgctggtgatgttgtgtctggcgagaaggaaggtgttgatctggcanatt

SEQ ID NO: 95581 - DNA, 435 bp, Glycine max
  Clone ID: PAT_MRT3847_57320C.1
agaggaggaaaaggatgacaaaattgatgtatagaaggtcaaggtgaaagaagatgatggggaagatgaagggaggaaggagaagaagaaaaaggaaaagaaggacaaagatgaagaaacagacacattaaagggaaaggaaaaaaatggtgatggtgaagagaagaaggaaaagaaagagaatgagaagaaaaaggaaaagaaggacaaagatgaagaaacagacacattaaaggaaaagggaaaaaatgacgaaggcgaggatgctgaagagaagaaagaaaagaagaaaaaggaaaagaatgacaaggatgacaaaactgatgtatagaaggtcaaggggaaagaagacaaagagaaaaaacaaaagataaagaaggaaaaagatgacaaaattgatgtagagaaggtcaaggggaaagaagatgatgggga

SEQ ID NO: 95582 - DNA, 338 bp, Glycine max
  Clone ID: PAT_MRT3847_57321C.1
tcggaattccctggagactaaacacaccctttaatgtcttgaccctcctattttctattttttctcattacacacaccaggcggaactctgtcatatcacaggggtacccggaggttaaaatcatcattatattcatgttaactgcccacaattctccatactatacatagctcactgagcaatgcatgttgggattgtatttcactctttctatagatgtgccaaaataatacacttggacataaccgtcctatttacatcacacctccattaacaaaatggtttaatcttgtcttccataatcacccccatgtaactgcgtgccttatcccttacc

SEQ ID NO: 95583 - DNA, 444 bp, Glycine max
  Clone ID: PAT_MRT3847_57322C.1
tttggaacattcttatgatttgtcattcctgtctctgcataccaagttaagaatcagattgggccattattttctttagttgtgcattcctctctgaccatgcctgacatttcaagtgcttaagtataatttagacatcttttctaatattatattgaatgtataaaaaatttcaccctggtcagctgtactgctaagtgctaaacatgtattttggttcgacccttggatttatattaaatattaattgataaacattaagattgaaaagttgattaacttgtcactagtggtagtaagtgataacagtagtctattatactgatttgaacatatgatgaacatccctaattaccttagaatcaacatgaaaccaataattcaacgaaagctcctttcaacataccatactaatcatagaatatattattaaagaaaagaaca

SEQ ID NO: 95584 - DNA, 513 bp, Glycine max
  Clone ID: PAT_MRT3847_57323C.1
tcggcggccgccctttttttttttttttttttccttttttatatcattttttttttttttttttttttttcgggcttttggtttttttttttttcttttttgaaaaaaaaaaaaaaaaccaaaaaaaaacctaaaactgcccttccccacccaaatattgggggcaccccggcacaccaccatgcatagaccaataccccccccctttttttcctttcccattttccaacaaacctttttcccaaccgggacgggatcccccccccaaaagacccgtacccccaaaacaacaacagcaccccccccaaaaacttgggggcccggtttatcccccaaaatttggccacaacaaccagagcccccccccaaaagtcctaaccccacataaccgcgggggcttcccaacaacccggaccccaaataccccccccaccgattttcctcccaccaaaaaccaggcaaacgattacttcccccttggacaacaaaaccttaaccccttggaaaatcccc

SEQ ID NO: 95585 - DNA, 900 bp, Glycine max
  Clone ID: PAT_MRT3847_57324C.1
cccgcgtccggtcccttttgttctattcactctatccgcgatgggaagaccatcctccaccatcgaaattcctcacgaacgctaccgacataacggccgccggacccctgaccccgatgtctccgacgactatcgccgccgccgcagccctagctacgactcatatgaccgccacccggagcgccaccgccgccgttcggaatcgcccgagcacagaaaccctaggcacaccaacggaactcacaacgacaacgctctgccaaagaaattcggccgccgaaacggcgcgtatctggatcgcgaccgcggggattggcagcgttccgattccgagtccgacgaggagttgaagggtttgaacttcgaggaattccgaaggctcaagaggcagaaaatgagaaaatcgctgaagcactgcatctggaacgtcacgcccagtcctccgaggcgcgataacgaagatccggaagattatagcaaacccgatgaaatttctgatcgagacgacggcgctgggaagatcgataaggagattaaagcaaaagcaaaagcaaaatcggaatcagaatctgattccgattctgaatctgagaaatctgtcagtagtgaatcagacgattcgcgttcgagaaagaagaaaaggaagagctctgctggttcttcgagaagatcgtatagcgagagtgaatcggaatcggaatcagagtctgaatctgaatctgaatctgaattcagaagaagaggaacgtagacgaagaaagagtaggaggaatagaagaaaaagaagtaacaggagcaggaagaagagaagatatagcgattcagatgagagagaagacagcgagagcgatgactctgatagcagtggcagaaagcagaagaaacgatcttcttcctcaa

SEQ ID NO: 95586 - DNA, 368 bp, Glycine max
  Clone ID: PAT_MRT3847_57325C.1
aaaaaaaaaggtttgggtttatttatttctttgggggaataaaaaatccctgacagcatgcccccttagttgccagctttaaggggccccacgtgtaagggggtgggctccaaaaacccttaccctgacaaaatccggggggctagggttgtggttttccccctaaaacgacaagaatttcccctcgattcttccgccctagaaaggggaaaaaaggaaaagaaaactacccttttcaaggcctccaaactaaaaccttaagcaagaagacagaaacagccttttaaaaccaccagttcctcatccctggaggggttaaacgggttccaaccggtatcatatccttttttttatcaccaaatattaat

SEQ ID NO: 95587 - DNA, 389 bp, Glycine max
  Clone ID: PAT_MRT3847_57326C.1
cggtgaaatcattccatttttatcctctggccaacgccgcaagctatgaagagaatccccttcccatgagtggtattccatcaccaagtgccctagacaggggtaatcgtttttgcatttttggttgcatttactcctcgtcctcctcgtcgtcaccaccctcaccgccagcagcagcagcggccttctttctgcggacacggccgggacggccaccgccgaagggcgaggtcagagcgaagtcgatgtgcttctgggagtcgagacggacgatgaaagagggaacgttgacgatctgctttccgactcggatgtgacgctggcggatcagaacacgggcgtggtggatagacttggcaagaccgagcttccagacacaggtctggaga

SEQ ID NO: 95588 - DNA, 1316 bp, Glycine max
  unsure (1)..(1316): unsure at all n locations
  Clone ID: PAT_MRT3847_57327C.1
atcaatttggtccgacctgccctctccatgcctgagcaccacactcgacaggtcacctctgaccgtttgaaggaagctgtcaatcgcctctctcaaggccaggcgtctctcacccagagccacacagccttaaacaccaaaatgaattccatccactccttccttaacactaaaattaactccctcatagaccaaatcgcagccatcaccaccaaccccagctcaccttccccttcctctcagccatctccttctccgattcaccgtcctcacatgaaactggacgcacctcgtttcaatggtcacgacccgcttggatggatatttaaaatatcccaattctttgactaccagacaattctggagcaagagcctctcactgttgcgtctttctacatggatgggtcggcgcttcactgatatcagtggatgtctcgacaggttcttttcatcgtggcctgtgatgtggtgcatcacatgtcaggatggaatattatctcaatttttattgttccttttttgtatttattgttattgattgtagtctcatcattcatactcatacatctatttagaatttagatattgaaaagtgtaaatagataaattaagctcttttcatcgtggcctgtgatgtggtgcatcaggtcaggatggaatattatctctgttccttttttgtgtttattgttattgattgtagtctgatcattcatactgatacatctatttagaatttagatattggaaagtgtaaatagataaattaagctcttttatttaaaagatcagaattagaatatcaaaatagatgtaagtaaaaattgagataatattaaatagaaaaaaattattattacatcacaagtaatttgttatgctagatcccaacacatttgtagtatgaattaaccagtgttgtttgtttatcttccctattctaaaatttttttgtcttcaataatttcactttacttttgactccttatctttttttcttcaattaattacttgaaaattgggtatacatcaatctaaatataaataaaattcttataaacttaacccttagactttcattttaactttattattagaacgaattaatacatttgttaatgcattaacacttaatagctggataatactagtatcatttattaaataattattacttccttaaaatatcagtattaagtaaaattattttttgaaccggcatgacagtacaggtatcaatttaacctgcaccctcatgaaagctatnngtcttgttaggtttattaggtctctgtcttggtacattaggagatgng

SEQ ID NO: 95589 - DNA, 374 bp, Glycine max
  unsure (1)..(374): unsure at all n locations
  Clone ID: PAT_MRT3847_57328C.1
ttatacacntgggcggacgcgtggggcgagcgggcggccttttattttttttggggggaaaaataaaaacttgggtaaaacaggggcaatggagatagctagctagagagggatatccaaaaaataacataatatccccttttcttctctagctggttagggaagaggggtaacaacacaacgcaatacaatcagaatcagaaattcaattgtttccttatcagccgaaggaccctccctcaattacaatgggaagcacctctctcccctcttaaatactctgatgcgggttccacaatacctccctgaaaaaaccactngataataacgcattggcttatttatatatattaacatatattggtacataaatt

SEQ ID NO: 95590 - DNA, 243 bp, Glycine max
  Clone ID: PAT_MRT3847_57329C.1
tgaattacggtcccgacccacgcgtacgcccacgcgttcgcccacgctttccttaattatcatttcaaaaaaaacatctcctgggtcgggtcgattttaaggaaatcggagaccatgcttccttcatacctgtattataccactccttcctaagactaatactcattcctaaccaaccaatttagcaatattacccttccattaagttctacaaaactcacacacattacccgattcttgaat

SEQ ID NO: 95591 - DNA, 403 bp, Glycine max
  Clone ID: PAT_MRT3847_5732C.1
cttacaattacacacctgtggtgcatctctacctttccaacatcatggcgcgattcgagcaaattacttgttttattatttccatgattctaatatgcctactagcaagttcagtatccgaaggttctgatgacatattcacctctacagaaaagacagaaaattggttaaaccatggtgggaatatatacaacagaagatatgccagcatggagcacaagatcagcgttgaaactgtttcgaacctaagtttgaagtggaagttctatgctgggaaagacataactgcaactccagtattttcgatggcacactctactttccatgttggaatggggatattttcgcagtaagagcaaaaaatgggtcgctggtgtggaagcagaacttgggggaatttaac

SEQ ID NO: 95592 - DNA, 207 bp, Glycine max
  Clone ID: PAT_MRT3847_57330C.1
accagaaaacagaaccaaactaccaatcaattagcagcaacatcagggtatgtagaatcctacacttgaggggaactagaataacaaatgctaggagtctacagaatactgcgacttcgccaaaaccctccaagtggcgcaatatttcaacgattccaagggaatggaatccttaacctaaacaaaatatattcaaatttggaatgt

SEQ ID NO: 95593 - DNA, 380 bp, Glycine max
  Clone ID: PAT_MRT3847_57331C.1
ctctgctagtctaaccttataagacatagtgagttacactattatcaactggcgggggcgaggaaaattaagagtgtgttgcatgactcttactacatatacctgcaggagatccatgatgagcctatgtcagagagcatggactgtggcgagtcgtgatggagttggggagaccttacaggaccaacgcctttgaacatggaattcgggtatcaagccatgttaacaacccgtgtatagccatcttagatacctggcaccagcaacgacgctctataattcatgttgtgctctgctctctagcacaatccaccagtggagagaaggccaagcattcagaagaatccttgctgaccgacacgctcttaagcagatggcgt

SEQ ID NO: 95594 - DNA, 281 bp, Glycine max
  unsure (1)..(281): unsure at all n locations
  Clone ID: PAT_MRT3847_57332C.1
gctaggctgctcccctcaagacagtttgacaccaanaccaaaacaaacccactaagatggcttcctttgtanccttcctagtgctgcttcttgcagcccttatcctcatgcctcaagggcttggtattactanaaancaattaagaagccancagtggtanaagcctccagtgtacaagccaccagtgtacaaaccaccggtttataagccaaaaccaccggtttacaagccgaaaccaccggtttacaagccaccatataagaggccaccatacaaggaa

SEQ ID NO: 95595 - DNA, 305 bp, Glycine max
  unsure (1)..(305): unsure at all n locations
  Clone ID: PAT_MRT3847_57333C.1
attcggctcgatgtatgaagatttgaggngacgagtgaagcgtgaaaggatgaccaattacaacggactaaggtcgcacacgaggctgccactgccagtgtcggatgacgtatcggccactgccactatcactactatagcaagagcagtactaaagaagcgggattagagagttaagggtcctcggcgcatgctagtgacccttgtcttgaccttcttgactatagatcctatcaaaatcctcattgcctagactaggataacgaatgcaccctatgaggataagaaacggaagaatgacaaat

SEQ ID NO: 95596 - DNA, 329 bp, Glycine max
  Clone ID: PAT_MRT3847_57334C.1
gaaacgtagctctgccatgttcagtcagggtcgtcttcactgaatcagcggcttatgctttgcaaattttcatttctctgagaatgctataaggtacaaagattccaattattcgactcagtaactcgctatatctaatcagtatccatatcttacagcgattcgagagttcagaacatgcatgcattcatcgcatctgcaatgggtataatcatgagtacattcacgttcaatgcatggatacccattagggtttacatagctcagatttatctaatccctatcatcatgaagttagctgagactgccttgttacatgcgatgcattc

SEQ ID NO: 95597 - DNA, 584 bp, Glycine max
  Clone ID: PAT_MRT3847_57335C.1
gattaacccaattttgcttctgcattagataataattgttacatcgcaaaaggcatctatgaataggctcccaatgatgagcttcacccaattattaagggattaaagcactgttcccagtagaaaaaacaataaactttttaaatgagcaagactttgtgaaaatcagctttacaagaatacatacaaagtatattagtttgaacaagaacaacacctggtatctgcgtttattctgtgaaacaacatgccgtgccttaacctgcacagctttcactgcattcttagaagagtcgaccaggcctttcgtaatagttccaaacaaattagattgtccagctgtttcactggaactgtcatcttctacaggagactttggagacaacctcaatccgaaattacttgtgatgcgtgcaaaagttgatttcccaacatttccacttgatgagtcgtcttgggagccagaaaatggctgagaaattttcaagtttttggcccaggatgatatgcccgtgggagatagcctaggtgatgcctcatgtggagaattatcttgcccggaggctacagaagcagaagcttgt

SEQ ID NO: 95598 - DNA, 198 bp, Glycine max
  Clone ID: PAT_MRT3847_57336C.1
gtcttccccccgaaagagcagcgaagaaaagaagatgggcgtaacctcgagaaagagaaagaacacctgaagccagccctaggctcccaccttactacaatccatgaacccctccgggttatggatcaaacacagacagattcttcttgcggctttttcattggggactatattatatatatggctgagcgggcctcc

SEQ ID NO: 95599 - DNA, 1226 bp, Glycine max
  Clone ID: PAT_MRT3847_57337C.1
gcaaattaaacaacaaatactacaaaactgcaaagtcaataagggcaacctctgccttttgccacccattgcagacctgactttctcaacaaaaccagacggtgttgcaccctccaaatccaatccatcttctattctctattctcttattaataacctctttcttttggtcttctctgtgactttctcttcattcatccacttcttagaccgatctctcctctcattttcctccaaaaagttctagttttttagcctgttgatcatctgggtggtggaaattttcctgtttgtcccctccttatcggggagggttgttagaattgcttgcttgagtgatcggaatgtttttctcataattcacagttcttggagagttttggagtttctctgacgtcaactttttgtgaaattttcgcttttgaagatttgcacaagagttacatgttgagtgatagagggggaaagtgacgtgtggctgaattattacatggattgtttctgctgcttcaacaatcaggtggttggaggacgcacttcatgtggctctggcaagggcaagagccatcagggctcagttaagtatggctttagcctagttaaagggaaagcaaaccacccaatggaggactatcatgtagcaaaaattgtcaagcttggagggcaagagttaggactttttgctatatatgacggacacttgggagacagtgtgcctgcctatttacaaaagcatctctttttctaatatcttgaaggaggaggactttggactgttccagccagttccatcattaaagcctatgagacaacagatcaggccattctttctgatagttctgatttggggcgaggaggatcaactgcagtgactgcaattcttattgataatcagaagttatgggtagcaaatgttggagactcacgagcagttttgtcgagaaaaggggtggccgaacagatgactattgatcatgagcccaatactgagaggggcatcattgagaacaaaggcggctttgtctcaaacatgccaggagacgttgcaagagtaaatgggcagcttgcagtttctcgagcatttggagacaaaaatttaaaatcacacttacgatctgatcctgatatacgacatgttgatattgacccagatgctgagcttttgatacttgccagtgatggtctttggaaggtaatggcaaaccaagaggcagttgatattgcac

SEQ ID NO: 95600 - DNA, 3484 bp, Glycine max
  Clone ID: PAT_MRT3847_57338C.1
ctgactttctcaacaaaatccatcttctcttcttattaataacctctttctttatcacaagggacgcttttgctataacctttttagtcttctcttcattcacccacttcataccgatctcttctctctttttcttccaaaaagtttttatttttggattgcttgtcaattttttgagcctgttgatcatctgggtggtggaaatttcctttttttgccccccaccttttcggggagggttgttagaattgcttgcttccgtgatcggaatgttttgcagataaattcacagttcttaaagagagttttggggtttctctgacgtcaagttttttgtggaaattttcggttttgaaaagatttgcccaagagttacatgctgagtgatagagggggaaagtgactgacgtgtggctgaattgtttacatggattgtttctgctgcttcaacaatcaggtggttggaggacgcacttcatgtggctctggcaagggcaagagccatcagggctcagttaagtatggctttagcctagttaaagggaaagcaaaccacccaatggaggactatcatgtagcaaaaattgtcaagcttggagggcaagagttaggactttttgctatatatgacggacacttgggagacagtgtgcctgcctatttacaaaagcatctcttttctaatatcttgaaggaggaggacttctggactgatccagccagttccatcattaaagcctatgagacaacagatcatgccaaactgcatcagcattcagcatcgcttttttctattcaacgactccgttccgttctctttctttttcttcgaaaccctaataagcttctgcacttccttctgattccacttttggtaatataagcccctcctcttcttctcagatctgaaactacttgttttaactttttctattcaacgactccgttccgttctctttcttcttcttcgaaaccctaataagcttctgcacttccttctgattccacttttgcttcaactgggaagatactgtagggcctgggccacctaatgatgagatatccaatttctacataagttgccattgatacttttttaatcaaatggattcagtgcctgctgatgtgtctaattcacatactattaatgacccgtcgaagtcacctccggctaaagagactgacagacaagcttctgcttctgtagcctccgggcaagataattctccacatgaggcatcacctaggctatctcccacgggcatatcatcctgggccaaaaacttgaaaatttctcagccattttctggctcccaagacgactcatcaagtggaaatgttgggaaatcaacttttgcacgcatcacaagtaatttcggattgaggttgtctccaaagtctcctgtagaagatgacagttccagtgaaacagctggacaatctaatttgtttggaactattacgaaaggcctggtcgactcttctaagaatgcagtgaaagctgtgcaggttaaggcacggcatgttgtttcacagaataaacgcagataccaggaaggaggttttgatttagatatgacatatatcactgaaaacattattgcaatgggattccctgctggcgacatgagctctgggtttttcggctatgttgaaggattttacagaaatcacatggaagaagtgattaagttttttgaaactcaccataaggataaatacaaagtttataatctttgttctgagcggttgtatgatgcatcattgtttgaggggaaggtggctagcttcccatttgatgaccacaattgcccaccaattcaactgattatatcattctgtcaaagtgcttactcatggttgaaagaagacattgagaatgttgtggttgtccactgtaaggctggaatggcaaggacggggttgatgatttctagactacttcgttttcttaaagtacttcccaactgctgaggaatcaatggattactataatcagaaaagatgtgttgatggaaagggacttgttcttgcctagtcagattaggtatgtcaaatattttgaacgagtcttgacttactttaatggtgaaaacccaccggcccgcaggtgcatgcttaggggattccggcttctcagatgcccttactggattaggccctctataaccgtctcagatcacagtggtgtgttgttctcaaccaaaaagcatctgagaaccaaggagcttttgccagaagatttttggtttagtgcgccaaaaaagggagtgatggtctttgctttgccaggagagcctggccttaccgagttggctggggacttcaaaatccattttcatgatcgccaaggagatttttactgttggttgaacacaactatgacagaaaataggaaagtattgaacaccagtgatctggatggctttgacaagagaaaattgccttctccgggatttatggttgaggttgtgctggtggattataatggcaatgatgtaacttctaaaactgaaactactacaaagaaatcagatgagagttcaagtaacaatcctgccagttccgccccagtggaaaggagcacccctgcacagaatgcagacaaagaatcagatagtcatgataaagatgatgtgttttcagatggtgaggcagagcaatctgcttcttcaagaagcaagcaaacaaaagcaccttctcaagcagttgaaaaagttaaaaatgacaccagaatctccgaatcaagcagagtttcaaatgaaattgcaaatttatcacatgcaacagaacaagtttccttgggaaacaagagctctacgccaattcgtcatgctagtgagccaagaactaatgttgatggaaaaacagtgtccagtctcgaggtgcccagtacagaaagtgagtttaaggccatggctgcagatgcttctgtttttacctttggagatgatgaagactacgaaagtgattgaactacaacaacgacgggttattttgttatctttatacttcgatatttgtacataaaattgcttgcaacttccctcacaacattattttggtcatccatttgtttgtttgttgtaatgataaatctggctacttcatttgcttaatgcacaagttaaaaataagaatacgcggagttatctgcatgtattggtcccccttcccccaactgccacagtctgcattggatacacagtccaatttaattttataaacatatatctcactgtctttaaaattgaagttcttccaattagatggtgccgttttagtatctccagatttgttttgtgtagattattaccctcatttttctttgtaatttgcattaatacatggagcagtgtgaagatggacatagacatagcttttacatttgaatcagttatgcgtttgttaccaacactaatttacgaattacttgaaatgtcctaccccgaatgcctaattttcctctgctactattcaagtg

SEQ ID NO: 95601 - DNA, 520 bp, Glycine max
  Clone ID: PAT_MRT3847_57339C.1
ttttctttcattggctctttctttctctctcgttctgtttgcccagaaaatcaaagagaaaagaaaagaaaagctaataatctctttgcaattcaaaccgagagagagagcaaaaaaaaaagaaaaagaaaaagaaacttctctgtggagaaaacctttgtgttctcttcagcacttcaacgttgacgctttctgaagaatcacaaaggctcgagaaagaaagaaaataactttgtcacacgaagcatttttatctcttaatatttatttctttctctatatttcttctaagttcagagactctgcgatcactctgatttggctcctccgaggtgatccttttcgcggaggcaggggttaggattcgcgcttcgcgttgattcctcgcggttagatctgaactgtgctcgttgctcttgctcttgctcgaatgagaagcctgaattttgaggatcttgaattcttcggagttttgaagcatgatttgttgttgaaatagaagagagtgttgcttctctgc

SEQ ID NO: 95602 - DNA, 220 bp, Glycine max
  Clone ID: PAT_MRT3847_5733C.1
atcgttgctgttctaaagcactcatccacacattctccgttggtacgacaacaatggatccaaagacaggtgcgataggaggacttgtagcagcatcgaagaaggttcacgagaaggtaatgaactcgttgttcgagaagcgtccgaagcagatcgggatcagaagcacgatgccgtcgaagcgggacatgacgcgattcgtgaagtggacgttgaacgt

SEQ ID NO: 95603 - DNA, 274 bp, Glycine max
  unsure (1)..(274): unsure at all n locations
  Clone ID: PAT_MRT3847_57340C.1
attcataaaattatgatagcnggggtagtttggntctanggggtcctagaggaagaactttccatcgtctcttcagtncnncattcctgaagtcancgncnacanaanaacnnccaccctttatttgctggtttgttcaaaantagcttctcttcaattcactccnaatntntcancatatnnatcttacnatatntaatatgtcnnactgttnctgcantttctgagtttgttngancnagcagctncgtcttaagaagctggtgttggaagt

SEQ ID NO: 95604 - DNA, 563 bp, Glycine max
  Clone ID: PAT_MRT3847_57341C.1
gggaaaccccaaaggaagggggtttttttaggaattaaccggacttaaaaattttggccgaaaatccagatcccaaaccctaaaaaaagccttttccaaaggactttgaaggggccttttttttgaggcccaaccccaaattttaatttttttctcaaggggggcttttttttaaggcccccaacccccggttgggggggggcccccccccccaaaattcctgcacatgggggggggggggccaatttttggagaggcccgctttggtaagaaatctcttggggggtcttgaaagggggggaaccccaaaaaattggccccccccccccaaaatcccttcaccttggggttggggggccctggccccaatttcgagttttcctcccccgggaaagaaaataaaaacttttttttgggggcccccaaatttaatttactgggccgggttttacaaccgggggaaggggaaaaccccggggttacccaaattaatatgtttggagaaaaacccccttttcccaagtggggtaaaaacaaaaaagcccccccccggggccctttcc

SEQ ID NO: 95605 - DNA, 399 bp, Glycine max
  Clone ID: PAT_MRT3847_57342C.1
agatcaaccagcctcgaacttgatagaagctcctactgaaatgtaacatggcagagtgaaatattcttttggtatatcaacagttattgacttgaccaccatttccctgaagccaatgtgtaatttcctccttattaagagccaacgttgcagctctcgcatgtgccaacttgcattctttagctgcgagacctatatgggggtgttcttcaacataacacccatttagcccatctgccggcacattatatttctccttgcgagaaaatcaagcattcacaggcttgcgcggattttgacatgaactaacccttacccttttttagactacacactttgcccacttagggactggccttataaacccctagatatgatatactggtctgacatgatttt

SEQ ID NO: 95606 - DNA, 370 bp, Glycine max
  unsure (1)..(370): unsure at all n locations
  Clone ID: PAT_MRT3847_57343C.1
ttatttagtaataataaattatatttatatattaaataaataaggggggggagttaagattatgtatgttgatgaattnnnncttcgatttttatacactgtataatattgtgtgagggggagataataataagtgattgagtatggataaatattataagtgttgtgaagagaaaggttgtgttagatggcgataaaatgggaaaagaaaagatataggagaacatgtaagaattgttattggttaaagtgaaaagtaatgggttgaaaattgatggagatgggtggatgaaaagaaaatttaattggggagattaaaaatttaaaataaaggaatgtaatggaagaaaagaatggataaagagtaatg

SEQ ID NO: 95607 - DNA, 349 bp, Glycine max
  Clone ID: PAT_MRT3847_57344C.1
cccacgcgtccgcccacgcgtccggtaagaagctacaagtccccatcttacgctcgggatcacatgatcgccgagagaaaacgaagagagaagctcagccagagcttaatcgctctagctgctcttattcccggcttaaagaacgtgctcttcagttcgctatatacaaagcactgattaaattgatttccaagtacaaggagttatttattagtaacaagaatttaatataatttttttgaagtcattttgtagcactcaagagtgtctgtataattattacgattatttgtttatcataattttgaaattgattttacatagatttaaataaaaaacatacatttat

SEQ ID NO: 95608 - DNA, 690 bp, Glycine max
  Clone ID: PAT_MRT3847_57345C.1
gaactaaaaacttcctctaattgaagagagagctattatcaatgagtttgtgatttagaaatacaacaataactgtaatgtcatcgtggaagtgtctcctcactccttgttcaatcttttgaaggtctgagactctcatttctctcttcctagccgctactcgaagcgccgctttcacaagccgcctagcaattccattccgagggctgttgctgactatattcacaacctcttggttgctgagttgctcccataaaccatcagaagcaaagatgataaattgatcttcagggcgaagtttatgcactgatattgctggttcataactaagaattggcttgaagaagggttcaggtagtctaaacttgttcggtagaggctccctgttaaattcgtctttcttcagatatgcatcacctatggatcttgaaacctgtatgatgcctttcacacgccaaacattgtgtttcataaccacgatttgtggatcataagggtgctttgtccgaacttcatctctctcagtttggatgttaacgttgtgctctgcagacaattggatagctgttgtttcccttgttgctctctccactcgccccaacactgccctcgagtctcccgcatttgcaacgtatagcatgccattgctcattatccccgccaaacaacatgtacctgcggatgctatct

SEQ ID NO: 95609 - DNA, 187 bp, Glycine max
  Clone ID: PAT_MRT3847_57346C.1
agaagatcacagagctggaaaaattgtagacgaattgaatggtagactgaacaaatgtggggttattagtccgcgttttgatctaggtgtcaactagattgaaggctggactgctaagctgcacaccatcgcacagtaaccgcatatagagaggacgacctaagctgaaatgatggatcctgaagaa

SEQ ID NO: 95610 - DNA, 496 bp, Glycine max
  Clone ID: PAT_MRT3847_57347C.1
ccacgcgtccggacgaaacctctctacatgaccagctgcaccctgctgtggaaggagctgtccgaccacttctcctgcctggagcatgaccatctccacatattcgatgactttttgcgcaagattcacacgctcgacaactccatcttgggctccttgtcggctgctagaccaccatgaaacctatctggacgtcactctgcagaaagacctccgtactcttgacacgcgcctgaccgatgctctgtggggccttctcgatgttgcgtgactacaccttcgcaagacggaaatgttggatgacacctgtctgcgctaatgcgaaagctcatagtcctgctgacttcgaatgtgacgccatcgagctagttagcaatatttcagcgcgaacaataaggagctggacggtctacacagcgtgatgacggtagcgctagaggaatgcgtcgatccgagcaaatatcgggtgtaggcgtaatgaggagtgtatcgcggt

SEQ ID NO: 95611 - DNA, 1449 bp, Glycine max
  Clone ID: PAT_MRT3847_57348C.1
ggttttcctttttttttttttttttttttttttttttttttttttaaccaaagttctttctttcctttctaattattttataacacgaattattccattaacaagtctacaagattatcagagaattacggaattgaaacgccggggacacttttccatgggtccttcccacaattacctcagggctcaaagattacaaaagcgggaaaatccaatccaaatgagtagatgaatgcataaactaaaactttttccaaagaatcgacttttgatcacaagcaatcccttaggcataacccaaaatacactgaatatctcagggcttttcacacattttcctaaaatcgatgattttgctaggccacccaccagggtcatccaatccacagcataatcaggaatcaacagaattatatagcagcatgcacataaagattcttcatacaaaacttttatcaagtaatgataaaagatcggtcaactagatgaagacataatggaagatgtacctcatacaaactgttgatacccgtgcttactccgagtctactagttttaaccagaaggttttacttgatgtgatgctactcttataatttcgattccttccaattcggcttttaaccttctaacaagactgaggcgagcctaagtatgatatcatcaaggttctggagtcagcagttgagcttttaatctagttggaggataatattgtgggtgggacaaactgccaggggagtctgaaatgtaggtttgcttggtaccaaaaaagattagattgtaatgaattgtggtttgcctatatatttcctcaatgtccatcaatgggcaaatatagcttgcagtattgtaattcaggcagtttgtacccttttttctggtctacaggcaggtgtacctaagtaggtagattctgcctgggccttgtttgtggaggaattgatatactgcatattgttgtttgagtaagatttaatgtttgagttgatgaatagttccttaactattgcttttggcttagtaaaagaattctacaacaaaacttcaatcactgaacacatgttaaaacatcgccaaaaagcaagtccaatcaccagttaatagttttataaaaaaaaaatggaaaaaataaatatcagcctcggggaaagtagtcttggtacgacggactattgagaaaattttgattttgaacatttaaaagtttgatgttaagctagctgttagaatcgaaataaacaaaaaagaaaccaatgccctaagatctcagatcaatacaaaaccatctacagcctttatcactagtttcattcacaaccttcttgcaacttccaaataaacacaaacgcagagcagagagagaagaaaaagtagaggaggaaaaggagatggtgaaggacaagaaaaaggagagtgggatatgcaagtcaggttatgaacaaaatt

SEQ ID NO: 95612 - DNA, 515 bp, Glycine max
  Clone ID: PAT_MRT3847_57349C.1
ccacgcgtccgctgagagatcaatcaagtcaatgattgagcagcagttagatgaaaacagtgaaaaatatgaagaaaatagtggaaggcttgaaaaacatggtggaaagaccatccaaacttcctatgatcaaattgttaatggctgcaatggttctgcagtggaagagggaatagaaaattctgcagtggaagaagggaaaaaaaaggaaaaggaaaaagagaaggaagagaaaaatggaaatgagaagagcaaggaaaatggaaatgagactgaaaatgaaaaggtgaagaacataaaactggttcacatagattatattttggagaaggctgaaactggcattcactttgttggcaatgtcatgcatagcagtaatcagataaggcgggcacactgttggtttccttgtgttgatactgccacacaacgctgtccatttgacttagaatttacagtcagcacagatttcatcgctgtcagcaacggtgacttgctttaccaggtcttaagta

SEQ ID NO: 95613 - DNA, 634 bp, Glycine max
  Clone ID: PAT_MRT3847_5734C.1
aaaccatttgagcaatttatataaattataagttaaactaaacttaacacttacgaacagaaacaacaaacacaattcagcttctcctccgaggaaacgctgctgacatggcgttcgggtcttccgaggatgtctcaggtgtcaaattgcttgtccttctggcggttatgtacggactcttctcggcgctgacatactccgtcatccacatgaagttcgtgaagcctctcgggaatgacgcgccgctcgatcgattctctgaagccagaaccgtacaacacgttcgaatgttgtcgcaagagatcgacggtcgtcaagaagggcgtcctggattgaaaaaggcagcacaatatattaagggtcagttggaagtaataaaggagcgagctagctccaatgtcagaattgagattgaggagacaactgtgagtggctccttcaatatgttgtttttgggccataacatagctttgggatacagaaatcacactaatattcttatgaggatatcatctgtggattccaaagagactgatccatccggttttagtgaatggggcattttgatagtccccttggttccccttgggctgtggacactgggggttcatggggtggcatccctggctggaaa

SEQ ID NO: 95614 - DNA, 600 bp, Glycine max
  unsure (1)..(600): unsure at all n locations
  Clone ID: PAT_MRT3847_57350C.1
ggctcgaggcacaaaccaacgtttcatgccccctcctcctgattaggcaaccattgccactattgttgagatgggcttctcaagggcaagggctgaggaagcattgagaagagttgaaacaaatagtgttgaaatggccatggagtggctgtttagtcatgctgatgatcctgtccaggaggatgatgaacttgcacgggcacttgctctgtccctaggaagtagttctgaatctactaaagctgagagtgctgagaagactatagatgttctaactgaagagggacatgtgaaaaaacctccagttgatgatatacttgctgcatctgtaaagttgtttcagagtagtgattcagtgccatttcagttgacagatttgcttgtaacactttgcagtcagagcaagggtgatgatcgtccaaaggtaacatcttatcttctgcagcagctaatactttgtccgttggacttttcccaggataactgtgcattgagtgtgttagcacatatcttggcactgcttctttctgaggatggaagtacacgggaanatgctgctcagaatggcattatatctaccattatagatatcttgacaaa

SEQ ID NO: 95615 - DNA, 252 bp, Glycine max
  Clone ID: PAT_MRT3847_57351C.1
tcggctcggccttacatacaggtgaaaattaagatgggagaccgggttcagcctgagaaagggccatattgactaaatgaagaactgcggagcattccttgggaagaaaattaatgatgctgggcactgccacttacttaatgatgctaagcaggcacaagatgctgggtattgtggctaagtgctgatataatgacctctgtgtgcatggatggtggcagaaggggcagaaaaattttgtttgcctggggg

SEQ ID NO: 95616 - DNA, 323 bp, Glycine max
  Clone ID: PAT_MRT3847_57352C.1
ggtttgttataaataccatttgccacatctgtgtgaaataataattaatccctgggggggtttaaccattttgttaacatttacctaagctgttgaggccacaaattttaactttttgggctggccagaaataattaggggggttttgtttttggggaaaaagaaagggtttcccttttttaaattcccgattttaatataacattaattattttttttgaaaaacattaattatgggaatagttttggttggttttggccatgggaggaaatgaaaggggttggaggatgccttaatgccttgcccataggctccatttttg

SEQ ID NO: 95617 - DNA, 1035 bp, Glycine max
  Clone ID: PAT_MRT3847_57353C.1
cccacgcgtccgtacgctgcgagaagacgacagaaggggacacaactgaacaagataagctatccatagcagccaaagaaatgaagagtaccttgttcgccctctttctactttgtgccctcacctcttacctaccttcagccaccgctggtgatgtggtcgacactgatggtaatcctgttgaaaatggaggcacatactttgtgttgccaactataatattaaacggcggtggaatagaatatgccacatttggaaatgaaacttgccctgtcactgttgcgcaatctcgcgatcagttctgcaagggctttccgataaccatttcatccccagcccgaatccgtcacatcagcgaaggccttagtttgaacattgggttcactttcgcatccccgtgttcccccgcttctgagtggaccattgtgaaggatcaaccagaaggactcgctgttaaactcactgggtttaaaaatacagtgcccggtgtgtttacattgaagagagttcccgccgatgaaattatcggctacaacatcttgttctgtcctcttgataataacccatgtgggtatgttgcggttcatttcgaccaattccgaaacaggcgtttggtggtgtctgaggttcaggaggatgggttatgggttatgtttcagaaactttcatatgcatcaggattaactctttcatctgcatgaagcaccccttgccctcaaaagtcatatatgtactttcacgtagtgagagacatgagtgagactaaataaatgcttcatgctgtattcaattattgcaagtctaaataaaataatcgaagtttatgtcttcggcgtgttaaaagagcggtcgccccgatgatcaagtatattgaggaagtctatttgttgctattaaagccttgaaaggatagggcatgtgatgagcctgggttgagagtgtcaataaaatttaaactaaaatagagcgatctgctccccatttttaaaagacccatgatttatcaccgtgaatccccactgttattcttttttt

SEQ ID NO: 95618 - DNA, 498 bp, Glycine max
  Clone ID: PAT_MRT3847_57354C.1
tcggtgtgggggttgggcaccgtcggattggccgtagtaatgggcgccaaaaaggcgggcgcctctaaaattgtcggcattgacttggaaaccgccaaattcgagaaagcgaagcatttcggagccacagaatttgtgaatcccaaagaagtgccagcggaacagactttgcaggcatctctgatggacaaattcgacggaggtttcgactacactttcgaatgttgtggaaatgtacaaacaatgcgccaagccctcgaggcagcccacaaagggtggggtgtttcgtgtgttatcggagttgcgggggccggggaagagatcaaaacgcggcccttccaattggtgacgggtcgaacatggaagggcagctcattcggagggtggaaaagtcgcgaccaaattccatcgctcgtcaaggaacatttggacgggaaattggaccttgacaagtttatcacgcacaaattcgccttttccgacattaacaagcattcg

SEQ ID NO: 95619 - DNA, 285 bp, Glycine max
  unsure (1)..(285): unsure at all n locations
  Clone ID: PAT_MRT3847_57355C.1
aattcatattttatcattatcactgatatgaattgcctattgcataattaaacgaactagatgatgttacatnncnaagtcaagtaattaaggagagttgaacgattatattgaatagttaatatgtgcattttttcacttacccgaacaaganaagntccaaccctggaagtgctctccacatgtagacgtnttcatatgacgaatttttggccaatcctcacggatctctccaacacacctngctntacaacttgcattcgaattcgcaagtttcaaagactt

SEQ ID NO: 95620 - DNA, 1857 bp, Glycine max
  Clone ID: PAT_MRT3847_57356C.1
agtcactatgtcaacgtttgtactttcagctagcaaagaagacccttggatagatacaaagatgttttttttaagggccaatttgtttacttcagttacatactatcaaagttagagaacgaaggaacttttgtactttctctggggtgtgtgtgtgtgcctgtctcacaccacaaacactgaaagtacaatcttcttgtggttacaaaaactctgaaaaacacacacacacacacacttcttatgcctatggctggtgagcaaggtgatagattctcctccattaccataccccttctcgatgatgaaaaattgcaccaagtgaatggttcagatgaggctttggtggccaaaacttgtgatctacacacacctcatgtggataacacctcctttttcaagacctgcttccacctcattaatgccctctcaggagttggtattatttccatgccttatgcactggcatctgggggatggttaagcatatccctactatttgtgattgccattgcttgttgttacactggcattttggtcaaaagatgcatggatatggaccctgacatcaagaattttcctgacataggtcaacgtgcatttggagacaaggggaggataatagtatcaattgccatgaattctgagctcttcctagttgtaacaggttttctgattttagagggtgacaatctcaacaaactagtaccaaacatgcaacttgaacttgcagggttaacaattggtggtacaacaatttttaccatgattgctgcccttgttattttgcctactgttttgttagaggaattgagcatgctatcttatgtctctgctagtggtgcattggcttcttccattttcctcctttctatattttggaatggaaccattgatggcacaggatttcatgcaaagggaacaatttttagattgagtggaatacctgctgctgtcagtttatatgccttctgttatagtgctcatcctatccttcctactctctataattctatgagagacaaaagtcagttctccaaggtgctgtctgcatgctttaccgtatgcacccttggttatgcagcagcaggtgttttgggctacttaatgtttggacaggaggttgaatcacaagtgactttgaacctcccaacaggcaagttcagttcacatgtggcaatattcactaccttggtcaatcctataaccaaatatgcattgatgcttactccagtcataaatgctgtaaaaaacaaagtttcatggcattacaacaaaaggttcacacatatgtttgtcagtacttccatgctcattagcactcttattgtagccgtggcaattcccttgtttggatatctcatgtcactcattggggcattactaagtgtctcaacttcaattttaatgccatcagtgtgctacttgaagatttcaggagcttacaagagatttgggtctgaaatgatcatcaattattcaataataataatgggggttactattgctgtagtgggtacttatacatctcttgtagatatagttcataatttgtaagtgttagtggattggatattgcatttggaagctgctataactgaaacttttgaacatgcatgtacttaaatgtgcaatttcaatacttaggcagcgtatcgacattttgtgttgcataacctctatcggatatatcttcttgtcatttgatcattgctacgaatccattgctcaaaagaatgaagatcaaatttgatagagagataaagatcttaaaaaaaaaaaactaccatatatgatgcaccttttcttgctttctttttgctgagttatgctcctctttggtatattgcatttttt

SEQ ID NO: 95621 - DNA, 208 bp, Glycine max
  Clone ID: PAT_MRT3847_57357C.1
ctcgcaccgaatcttctccacgattgccagagtgggcagactcggctcctttcagcttgcccttcatgttagctttcctatcactccaatcagcactccactactccttcaccgactgccagttacctgttcaagggttggtccgctcatcaaaaaagattgctacatgacatcaatgaaatcctcagcaaccttgaacttattattc

SEQ ID NO: 95622 - DNA, 333 bp, Glycine max
  Clone ID: PAT_MRT3847_57358C.1
ataacatgtagaaagcatgaaggataagatagttcatatctacatggcatgaggagtcctgggatggtaacattgtggaccatgttggcctcaaagccatggagtcaggaattgaagtgtttgggagtatactgctcaacccattgcttggcgggcaacaaagaacagattacgataagcgtttatatgggaagtattatggtggagaaaaggatcgagactggtattggatggcttttcttaaaggaggtgaagatagataccaccatgcatgcagccttgctggactcaaagacaaaaaccttgaagggataatctttaccaaaagccttg

SEQ ID NO: 95623 - DNA, 350 bp, Glycine max
  Clone ID: PAT_MRT3847_57359C.1
atcaaacattcataatcccttactaatctatcttttatatacacctgaaatggactggttagggatgacttttggggccctcaaaactacccatttcactgtactgaactcctatatgaaaagcctatcatctctctgaagatgacacttctaaattcagatacagcggtcagtgacaagaagatcaagactgacaaaccttatggaaataatggctgactggcttttacgtacgaaactgttgcatttgtctggaaaggaatagaaaaagttgattaccagtttgtttacaaatacgggactaataaaaacgggtacagacctatctacaacacctaggactagattcc

SEQ ID NO: 95624 - DNA, 313 bp, Glycine max
  Clone ID: PAT_MRT3847_5735C.1
cggacgcgtgggcggacgcgtgtgctgactcgttttacggacgcgtggcgttgttgtacaacgaagggtatttttctttggtggtctgttctgaggtcaatttaccttcagtacctagaaacatttggtggttagattctggggccactactaacatcagtgtttcaatgcagggttgactcatctactggaagccaattgattctgaaacgatggatctacgttggagatggtaaatcggcggaagtggaagctatacggcactttagattattactacgtactagcttttatctggatttgaaagacactt

SEQ ID NO: 95625 - DNA, 340 bp, Glycine max
  Clone ID: PAT_MRT3847_57360C.1
atatattgggggagggtttatacagtacaaaacccaaaaagataaaaatgaaaatgtccaagacaaagaacccctcagaataaatattgctgtagacaatcaaaaccttacatgatagaaaaataaagtttcttttaaaacaaaatccctttatgcatcctataaaaaatgttttaaattctaactaacattaaacatattgccttcatgcgaaaaggaaagattggccttgggctaacaaatttttttcactttaaaaggaaaaaccctatccactgcccttattaaggtagacaaagggggcataaaaatgcccaacccttgaaacaaaaaagtgccc

SEQ ID NO: 95626 - DNA, 239 bp, Glycine max
  Clone ID: PAT_MRT3847_57361C.1
ggcctccccggcgtctgcatcgccatctccgggcctcaccgctgcaggagctgacccttttgcgcccagttgaagcccatgtctgtcgagggtgcatagttgcctcacgttggacggcgttcaatacgatgtgtcgaagaagatttgaggatcaagagtggactgcttctcaaatgccaagccagttcacaggaaggttccagtggttcttcagaatgagatgcccatagcagagtctc

SEQ ID NO: 95627 - DNA, 192 bp, Glycine max
  Clone ID: PAT_MRT3847_57362C.1
ctcgggcatccgatcacgcgttcgctcacttgtccgatcataatgaaaggttttgggtagggggcttgcctttggcatttggtaactattgaatgcctggtatgtggagatgccactgaatcctttaatgacaagcacttcatgctgagtagttgacacgtcatactctcttgggcatctatggccactaag

SEQ ID NO: 95628 - DNA, 419 bp, Glycine max
  Clone ID: PAT_MRT3847_57363C.1
gggaaaaaaataccccttaattgggttttttgggattaaaaccctcttttacaggttttggcccccccattttttagttttaaacttgttggggggtccgcgcctaaacaaatgggttagtttttttcccccccccaaaaaagccccccaagacaaagttctttttgaaatttttggcccaaaaaaaacccggggtttttttttaaaaggggaattattttgggaaaaaacctttactttttttgggcttctttgttttttgggaaaaccaaaaccaaaatttgggatttttttggggaggttggaaaaaaaccaatcccaattcccattagggttccaaaggggttttgttttttttaaaaaaaaaccccgggttacggggggttggttttccccttttttaattggaaaggatttaa

SEQ ID NO: 95629 - DNA, 1961 bp, Glycine max
  Clone ID: PAT_MRT3847_57364C.1
ctgtttcttgtttttctctctcgcttaactttcacaagaaaaaaaaaagatgaaagaatcattcaaagtgtgtttctgttgtgtaagaaacttcaaggtgaaatcaagtgagccacctgaagaaatcaagaaccttttccatgattactctcaagacgacaggatgtctgctgatgagatgctcagattcgtgatccaagttcaaggagaaacacacgctgatatcaactacgtgaaggatatcttccacagacttaaacatcacggcgtttttcatcctcgtggaattcatcttgaaggattctaccgttatcttcttagtgatttcaactctccattgcctctgacccgcgaggtttggcaagatatgaatcagccattatcgcattacttcttgtacacgggacataactcttacttgactgggaatcagttgaacagtaatagcagcatcgaaccgattgtgaaagctctgagaaatggagttcgtgtcattgagcttgatttatggcctaactcttcaggaaaagaagctgaagttcgtcatggagggacgttaacgagtcgtgaagatctgcagaaatgtcttaacgtggttaaggagaacgcgtttcaggtgtctgcttatcctgttgtgcttactttagaagaccatttaactccaattcttcagaagaaagtcgctaagatggtgagtaagacgtttgggggatcattgtttcaatgtacggacgaaactacagagtgttttccttcaccagaatcactcaagaataagatcttgatctcaacaaagccaccaaaagagtatcttcagacccaaatctcaaaaggttcaacaacggatgaatccactagagctaaaaaaatttcggatgcagaagaacaagttcaagaagaagatgaggagagtgtagcgattgaatacagagacttaatctcgattcacgctgggaaccgcaaaggagggttgaagaattgcttgaatggagatcctaaccgagtcatacggttaagcatgagtgagcagtggcttgagactctggcaaaaacccgtggacccgatttagtaaagttcacgcagcggaatcttttgaggatatttcccaagactacacggtttgactcatctaactatgatcctctcgttgggtggattcatggggctcaaatggttgccttcaatatgcaaagccatgggaggtatctgtggatgatgcaaggaatgtttaaagccaatggtggatgtggctatgtgaaaaagcctgatgttttgctctccaatggtcctgaaggtgaaatctttgacccttgtagtcaaaacctcccgatcaagacaactcttaaggtgaagatctacactggagaaggatggaatatggactttcctttagatcactttgaccgatactctcctcctgatttctacgcaaaggtcggaatcgcaggggttccattggacacagcaagttacagaacagaaatagataaagacgaatggtttccaatttgggacaaggagtttgagttcccattacgtgttcctgagttatctcttctgtgtatcacagtcaaagattacgacagtaacactcagaacgatttcgctggccagacatgttttccgttgtcggaggtaaggccaggtattcgtgccgttcggctccacgatcgtgccggagaggtctacaagcacgtgagactgctcatgcggtttgtcttggagcctcgttagcgcttcgtggataatgttcatttcatcactcgtgtcaatgtcggtacacgttttttatgtttgtaatgttaaggtgtcggtatacattagtcagtcatactaagccatacgataataagagatgtgaaaagaaaaaattaaacgtaattaagatcagcaaaattatgaaacgtatgactttaatataaacaatttgtttgaacagttgataaagataattttgttt

SEQ ID NO: 95630 - DNA, 215 bp, Glycine max
  Clone ID: PAT_MRT3847_57365C.1
ctcacttaccaggggtcactgggtcgttttttgactagagcagaatactactcgggtttgataagggcatgagtgacagaagaaccatatgctggcagaacgcaggatgacacacttgctaccatgggactcgggatcatatacatgtgagaactgagggagagacatgtccatcatatggggcacttaacaaaacattatccgtatgttaacca

SEQ ID NO: 95631 - DNA, 238 bp, Glycine max
  Clone ID: PAT_MRT3847_57366C.1
tcgagcatcagcaatagtgtacgacaaggctcagaaatcaacaagcctacttcaagagatatcaagtcaagttcaagagtagaagagagggataaaccgattaccgtgccaggactcggctgcattaatcaggacaagaacaaatataacactctcgaaataccgatttgcggttcgctttagcaacaaggacattgatgcacaaataatatctgctagcattgccggcgatttagtt

SEQ ID NO: 95632 - DNA, 561 bp, Glycine max
  Clone ID: PAT_MRT3847_57367C.1
cgacccacgcgtccgctctcctgttgtgcctacttcagcggcggatatgaccgactactgtgtgactgggacgggctcctcctacatcgacgactggcgaggacatctcacaccacgttgacggcttactgtgatgcctcggtcatcgccacgtcctggttctgtgagcgggcgatatgcgcgactctctggtttgcaacggaggggtactggatcacgactgctacgagcatgagcggacatggcgcggcgatctgccaccactacaaggggccggacgccacctgtggtcttcggcagatgtcatgctgctgaggtggctgccaccggtgacactgatctagtgcacaagcacgaagggcatggcttccacaccatcctcttcttcatagacggcgttcccaaggactacaacggcgcaagaaccaaggaagccatcgtgtcgtgggtcaacaagaagctagctcccggggtgcaaaacatcaccaccgtcgacgaggcggagaagatactcaccggtgaggacaaggccattcttgccgtcctcgactccctatcggg

SEQ ID NO: 95633 - DNA, 128 bp, Glycine max
  Clone ID: PAT_MRT3847_57368C.1
aataacaggaacaagtgggcaaaatactgatgcattttgcgaatctacaggggcaacctattaaacaaacagggggacaaacccttattctcccattcttaattaataaacttggaatcggataattt

SEQ ID NO: 95634 - DNA, 1018 bp, Glycine max
  Clone ID: PAT_MRT3847_57369C.1
aaaattcttggattaggttcaaatccgcctccacactcaatcgaaatccaaaaattccattgtttccattgaaacacggtttctccaaaatcaaaaccccctttcttctctcactcttctccaattccccgccatgatatcatcgcggcaagaccaaaccggcgcgccgctcagctcctccaccaccaccaccacccccgtggtggcgccgatcagcgtggtggaccacggcctcccctacgacacccacaacctctacgacgtctccttcaacaacacccacaccatctacaccctcctcacctccgacccctccctcgtcgactcctggatctccaccgtcctccgcgaccaccagcaccagcaccagcagcgcgtcctcaccgtgggcctcgacatcgagtggcgccccaacacccagcgcaacatgcagaaccccgtggccacactccagctctgcgtcgccgaacgctgcctcgtcttccagattctccactccccttcaatccctccctctcttgtttccttcctcgctgaccctaacatcactttcgttggtgttgggatccaagaagacgtggagaagcttctagaagattataatcttaacgtggcgaatgttcgtgaccttcgctccttcgctgcggagaggcttggcgaccttgagctgaaacgggccgggctcaagtctttgggcctccgcgtgctgggcctggaagttgccaagcccaagcgggtcaccaggagtaggtgggacaatccctggctcactgcccagcaggttcagtatgcagccgttgatgcctttctctcttacgagattgatcgccgtttgagttcttataattaattcatgccttttgtttttttttccttttctcacttgtcttgtgtaggagtatttggtaattttgtgaattgtaacacttggtgttgcttgctatgttaccattcgaatgcttaatttgatttttctgaaatttggaccttggttctgatacatacgatgattccactg

SEQ ID NO: 95635 - DNA, 148 bp, Glycine max
  Clone ID: PAT_MRT3847_5736C.1
tgtgtctaacattatgacaaggcatcatatggggcttcaggtgcacatagcatggtagaatgtccaatcactaatttaaactgatccatccacactttcggttacaatttccaaaacatccttccctaaaatacttgacacataaatc

SEQ ID NO: 95636 - DNA, 579 bp, Glycine max
  Clone ID: PAT_MRT3847_57370C.1
ccacgcgtccgggaatggatagctataccgcgtgatctgcgacaccagcgtgagcttctcgtgccgtgctgactgtatacgatgtctttatgagttgtgacagtaggttgaggccattactcgcggcttgacaacattcgccacatgcaaagccgtgcctgctcgcaacatagtgcactggaagtactagtgccttccacattgacgccttaccatggagaccgtactgctgatctgcttgctgtcttcaactgagaagtgcaagctagacccaactgactggcacacgatctcaaaggctgaactgcagcgtattgagagagaaacacacatggcaaacctactctcataggcttgtcattctgaccggtgtttatggtttctggaatcattgtgttaaccttgaccgcgcgtgagagccgccagtatttaaagatgttctatgttctcaagtccgaaaattggctgactctgcgccccttgctgatgactaaactgaggataaagagtacgataaagaaacttaggaaccgtctctttctttctcatttggactttggagcactcgagtcttataat

SEQ ID NO: 95637 - DNA, 324 bp, Glycine max
  Clone ID: PAT_MRT3847_57371C.1
tcgaccaagcttacgaccatgcgtacggattcggtaaaaccgatcctatccgtttacacgtgacaggtacacatttgaggttaatacaccagctctgtgggctcaatagagacagtgccaatttgtatatagcacatgacaatcttaagccacgtcagattgtactgtctctaagcctttagcggagaaaacctcacattggctagaattattccctcactctctatatacaatacaaccactaatttcggttcggctatgatctactacaacgatttaactgtgagaaccagggtttactcaatggttcgtcgaaaagtccag

SEQ ID NO: 95638 - DNA, 515 bp, Glycine max
  Clone ID: PAT_MRT3847_57372C.1
tttttatatcacagctggaggaaccatactgcgtagggatctattggcaaattttttgacagagggcaattatagagcaagtgttgatttgctgctcactcatcgtattaaagggtatgaataaaaatggtggctcacagtttggtattccctgataatacaggtatagcattgttctgtgctatgaataattcttttaaggggctgtgccatttgctgatatttacactatctgctctcaagactgtgaattatggaatccagcttgtacaaaagcgatgactatgtcatttaatccaaacccgtgtgctgatgcattggagcttggaatttttgaagcgcaccggagatcattgtgatatcatttgtgtcactggatggactgtcaccccaatgcaagatgttcaggtaacaattgattggtatatttcctctcaagaatgtgtacccaggacctatttggtttgaatccacaaaattcttttgtgtaaataagaggatggaaaactgacttt

SEQ ID NO: 95639 - DNA, 437 bp, Glycine max
  Clone ID: PAT_MRT3847_57373C.1
ttgctgtcgcgtgcgaagcctattccaccatggagggagggttcaccctccacggggggcaccgactttgtggtggcctgcaaatcttatgtcaaaaccctaacgggaaagaccttcaccctggaggtggcaagctctgacactattgacaatgacaaagatcagattacatacagaggaggtttcctacctggccaacatacgttcatttatgctggaaaacagcttgaggatggcctgacccttgccgattacaccattaaaaaagaggctaccctccccctggtgctcactctttgtggtgtgatgccaatattagtctagaccctcactggaaagaccataacccttgaggtggaaagctctgacactattgacaatgttcaagctaagattgatgacaaataaggaatccacaccgaccatcagaggctcat

SEQ ID NO: 95640 - DNA, 250 bp, Glycine max
  unsure (1)..(250): unsure at all n locations
  Clone ID: PAT_MRT3847_57374C.1
ggggggaacatacccaaaaccacccattcnacccacgcatttcttacacacaaaagacactatctaaccaacagaggaccataaaaaacaacaacgggcgtaacaaaaaactcnactcctacaccaccacacaacaacacaattacccaatggcccctgcagcgactacaccaccaccaaagcatcgctctcaacataacaaaccaccaccacaaaaacgaggacagcaagcacacttaccatatgaaaa

SEQ ID NO: 95641 - DNA, 376 bp, Glycine max
  Clone ID: PAT_MRT3847_57375C.1
ggctcgagcagccacacgccttactacaccatggtcttattggccggggtacaaaatctacccggcctccatgctctgatcaaaaaagagggtccaaaggtcaatgcgatgatcgagctgaagccgacaccatatacactgaatggtctggagccggtgaggagccatcacacactagccgtatatcgggggaaacaccacaagacatgtgtggagaatatgaagaaactccttgctgggacagagcgtgatgggagatcacgtaggggacgacatagagacatcatgtaggaacggtgacattctagcagctcttaacaccgcaacacaggtatggcaccatcactgattatgggagcgcatgctaccaggtgga

SEQ ID NO: 95642 - DNA, 357 bp, Glycine max
  Clone ID: PAT_MRT3847_57376C.1
cggctcgagctcagtcactgtgatcctgttgtttggaatattgttttgtctgggttttcagggtctaacaaatgtgatgatgatgtgatgagggtgtttaggatgatgcatttgagcggagaggctatgccaaattctgttaccgttgcctgtgtccttcctgtttgtgctcatttgggtgacctggatgctggaaagtgtgtgcatggttatattatcaagtctggttttggacaagacatgcttggtggaaatgctcttgtgtcaatgtatgcaaagtgtgggctggtgtctcacgatgcatatgctgtctttgataatattgctcacaaagatgttgtttcgtggaatgcaatg

SEQ ID NO: 95643 - DNA, 416 bp, Glycine max
  Clone ID: PAT_MRT3847_57377C.1
cttggatctcattctcctaaccctcctccatggctccttcgttatctttgtgctactccttgtgatcctcaccatccttttggttctcttaatcgcattctccctcggactcttctcagttttcctatttgatttgcaccatttttcatcaatcattttcgaatatttcagaatggtaaaggatgatcttcaattgggtgtagttcttgctctcatttccctcacccatcaagctgttgattttgtaatgggttcaaaaacgtggcaaaagcgcaagcttggcgaatttggggccaaggcacaacaatattccaaaagacatcattatgttcatcatggcttgaagactgtcaataaaattcaaattcgtcatggcttcagctagctactcgctccacgatcgttgatcaattctc

SEQ ID NO: 95644 - DNA, 718 bp, Glycine max
  Clone ID: PAT_MRT3847_57378C.1
cccgcgtccgatggttgcttcccccggtcaggacttataccgttcttgtttgcgcgttgtgtgagtcggggagggagctagaggctttgagtctctttggggagatgagggaaagaggctgtgagcctaatgtttatacttataccgtgttgattgattacttgtgtaaggagggtaggatggacgaggcgttgaagatgttgaatgagatggtggagaaaggcgtggctcctagtgttgtcccgttcaatgccttgattgatagttattgcaaacgggggatgatggaggatgccgtgggggttttgggtttgatggagtcgaagaaggtttgcccgaatgtgcgcacatataatgagttgatttgtgggttttgtcggggtaaaagtatggatagggcaatggcgctgctaaataaaatgtttgaaagtaagctctcgcctgatgttgctacatataacacattaatccatgggctgtgtgaagtgggtgtagtagatagtgcttctcgcctgtttcatttgatgattagagatggcttcagtccagatcagtggacttttaatgcttttatggattgcctctgcagaatgagcagagatggagaagctcatcggatcttggagtccctcagggataacatgtcaaagcagatgaacatgcatatacagcccttgattgatggatactgcaaaagctgggaaaattgaccatgctg

SEQ ID NO: 95645 - DNA, 2095 bp, Glycine max
  Clone ID: PAT_MRT3847_57379C.1
gggtggatggagttgtttgtttcattctatgaaccatatccgattcgatcctagtgggaactgactcactcctttctctccctccctctaaatatatatttctgacaacccaaagtcaaacaaagaaaagcaactgaactagaaatagattgattgtttcatgataaaaaggcctcatgccttgtctcccttttgatcaagcgtgacaaacttgtttttttttttattattgtaaatcaaaaagttccctttctttttgttatataataatttggaaaaaaaaaaaactaaaaggcatttttatttgcatctttctttctttctctggtgagtggtgagggcaagatcacagaattggtgtgagagagatgggttcgttcgtgaagctttcaaggagggccttggaaactgagatgcccgttatggttcagatgcaggaattgctccgaggagctaagaatgccgtgtctttggcccagggggtggtttattggcagcctcccaagcaagcattggaaaaagtgaaagaacttgtatctgagcctttaattagtcgttatggtaacgatgaaggtattcctgaactcagagcagcattagtcaaaaagttgcgtgatgaaaataatttgcacaaatcttcagtaatggttacatcaggtgccaatcaggcatttgtgaatctagttcttactctctgtgatccgggtgattctgtggttatgtttgctccttactacttcaatgcgtacatgtccttccagatgactggcattaccaatattctagttggtcctggtagctcagacacactccatcctgatgcagattggttggaaagaatattatcagaaaataaaccggctccaaagcttgttactgttgtaaatccaggcaatccatctggaacttacattccagagccccttctaaagaggatttcagatctctgcaagaatgctggctcttggcttgttgttgataatacatacgagtattttatgtatgatggcctgaaacactcttgtgttgagggaaatcatattgttaatgttttctcattctcaaaagcatatggaatgatgggatggcgggttggatatatagcgtacccctctgaagtaaaagacttcgctgaacaacttctcaaagttcaagacaacattcccatctgttcttcaatattaaaagaatttcgtgtcatgtattggcgggttggaggtacagcatgggttttagacgaaaaaaaaactcttgaaaagaacagaaaagttcaagacaaagctctctcccctcttggagagggttctgcgaaaggaggagaaggtgctatatacctgtgggcaaagctcccagacttagacgctcacgatgattttgatgttgttcgctggctagctaacaagcatggggttgcagtaatcccaggaaaagcatgtggttgtcccagcaatcttagaatttcatttggaggcttgacggagaatgactgcagagctgccgcagaaagactgaagaaaggcttagaagaattggttagagacggactgcgggagtaactgaaactaatcatagaacatccccttcccaagccaagcctccaaaaaaactatagatatcaatagaaagaaatttcacttgccaatgtagcaagtttgcaacttttgcatttgaataaatggaggattttactttctatccggttaaagttgtgggatatcaatagaaagaaatttcacttgccaatgtagcaagtttgcaacttttgcatttgaataaatggaggatttactttctaggatttactttctacccaaaaagaaaatttttatatttttaattttataaatttcaaaattattgctccaaatagatgcatgcagttctttcatagaattttatctgattgatccaaactaccaaaaaatgtggccgaacaagcaggaaggagccttcttgtttatgaaagcttcatcaatatttatttcatcctttgttaacatgagagttattgcagagtggttgttgtagatttatggttcaaactgattaaacagttagccgtctctatacgtgattgtaatctcggtaatgggtc

SEQ ID NO: 95646 - DNA, 557 bp, Glycine max
  Clone ID: PAT_MRT3847_5737C.1
tgtgtggtctccgctttattcctcagaacatggaagacactgcacttgtatacggatttcgcgagggtactgtcttccaggtaatcttcagttgaagctttttacagtttctggtgtgtcctggttaagaatttcaacctccagatgactttgtgatccgtagagggatttacaagggtcctgtcattagaacttaaaaagaatttggcttttttatcgaatagggtacaacaaagggaattgtggaaggagttgtcaaaaagccaatacaataattttattctttattaggcatttggtttgtacataacaaagcactattgtagtccctcttaagtcttaggtcaccgacctcaccttaatccagtaaattagtaacggaatgtgaaaaaggacctcgatcatgatgagtggacttattaaattttgtttgcttattgttgagaataagatacaatatatcatttttgttttctttaaaaaacccccttggtttgggcggccggcggggagtatgctcgtcgtccaaaaaattaattccggtcagatacctgccg

SEQ ID NO: 95647 - DNA, 262 bp, Glycine max
  Clone ID: PAT_MRT3847_57380C.1
gacgacagaaggggtggaatcaaaggatgacccagttgtctcttatactgattaggctcaggaagatgttgttcaaactggtgatgacaccgatactgaatctaagacggtcattggataagatacccctgaagagggtgtacatgatgtactctatgaagtttgaaaacggatatatattgagcggaagctatattccggaaagtgatatctctatcagatgtagtgtgtacatgtgtggattattccctagatcagcgga

SEQ ID NO: 95648 - DNA, 1093 bp, Glycine max
  Clone ID: PAT_MRT3847_57381C.1
gaaacactcttgtgttgagggaaatcatattgttaatgttttctcattctcaaaagcatttggaatgatgggatggcgggttggatatatagcatatccctctgaagtaaaagactttgctgaacaacttctcaaagttcaagacaacatcccatctgtgcttcaatattatcacagtatcttgccctgtattcattggaagtggggcctcaatgggttgtagatcaggtaaaaactcttgaaaagaacagagaaattgttttagaagccctctctcctcttggagagggttctgtgaaaggaggagaaggtgctatatacctgtgggcaaagctcccacacggaaacgctcacgatgattttgatgttgttcgctggctagctaacaagcatggggttgcagtaatcccaggaaaagcttgtggttgtcccggcaatcttagaatttcatttggaggcttgacggagaatgattgcagagctgccgcagaaagactgaagaaaggcttagaagaattggttagagacggactgcgggagtaactgaaacttaattatagaacattcccttcccaaacctccattggggaaaaaaaataatagatatcaatagaaacaaatttcacttgtcaatgtagcaagtttgcagcttttgcatttgaataaatggaggatttactttctaaaaaaaaaaaaaaaaaaaaaaaaaaaaaaaaaaaaaaaaaaaaaaaaaaaaaaaaaaaaaaaaaaaaaaaaaaaaaaaaaaaaaaaaaaaaaaaaaaaaaaaaaaaaaaaaaaaaaaaaaaaaaaaaggggggggccgttttaagggacccaagtttactccccggggctggcaaagtaaaattttttttttggggcccccaaattcaattcccggggccggggtttaacacggggggggggggaaaaccccgggggtcccccaattaaagggcttggaaaaaaacccccttttccccggggggggaaaaacaaaaagggcccccccgaatcccctttccaaaagttccccaccctaaagggaaaagggaccccccctttaaggggccattaaggggggggggggggg

SEQ ID NO: 95649 - DNA, 3170 bp, Glycine max
  unsure (1)..(3170): unsure at all n locations
  Clone ID: PAT_MRT3847_57382C.1
cgttcgggacacattagggtaaccaaagttccaaaccctaaacgctacgattttaattttctggttttctctttttcaatcggtgcttcctccggcggcgcgtgggagtgtctttggcgcgtgattcctagttccccgcttacctatgcttcgctcgacccgcattgtagagttcacgccggagagacggcggaatctcaccggacgatcgtgatttcgcatcttcatggcttccgcctaccggaacgaacctaattggccacggcatagaagcggtggagctggattcatgggaaaagtacctttctctaaccctaaccctaaccctaattctaaccctaaattagcgaatggcaagaagacccaatcggcgtccgatgatgcttcctctatcaaccggagatcgaacgacgccgcaactcactcccagtatgtgaccttcaacgtcgcttcgtgcaccaagaaggagctcaacgacttcaagaatcgcctcgtctcggagctcgaacaaattcagaagctaaggaatcaaatcgggtccagcgagtttcaacccgggcagagcctcaacggacatccaaagaaaccgttaggcaagaaaatttccggcaacaagcgacccttgccatctaattccgcaaaggatttgaaacggtcgcattcggaggttgggaacttgatgaagtgttgctcgcaggttttgcagaagctgatcaaacacaaacatgggtgggtcttcaacgctcccgtcgatgtagttgggttgaaacttaccgattactgcgatgtaattaagcaacccatggatctgggaactgtgaagtccaatctttctatgaacgtgtacgccacgccttccgatttcgcctctgatgtgagattaactttcaacaatgcactggcttataaccctaagggtcacgatgtgtacaccgtggcggagcagcttctggcgaggtttgaggaactgtatcgaccggtgcatgagaaattcgaaggtagcataggtcatgatcgcgaatctgaggaggaattgcaagccagttcgtggagccaagttgagccagagagggtgaagaaaaaggagaatccgatccctcctgcaaaattgcataaagaacctcccccgcagcaccctgcaagttcttcaaaccctccattggtgcagtctccggtgcgcacaccatccccaatgcgagctcctcctgtgaagcctttgaagcaaccaaagccgaaggctaaggaccccaacaagagggatatgagtcttgaagagaaacacaagttggggttagggttgcagagtttgccgccagagaaaatggaacaggtggtgcagatcataaggaggaggaatggacatttgaagcaggatggggatgagatcgagctagacattgaggctgttgacacagagacactttgggaacttgatcgattggtgactaattacaagaagatggttagcaagattaagaggcaggcattgatgggcaacattgacaacaacaacaacgatgtgcagtctaacaaaggcaacggggaattgccttctagcgagaaggttgatggggggccagttgaagtgaagaagccaaagaaagtagaagcaggggacgaggatattgacattggggatgagatgccaacgagtatgttcccccctgtggagattgagaaagataaagatgttgttggaggccatgcaagtagtagttctagtagctctggcagttcaagcagtgattcgtcttcgtcaagcgattcggattcggggagttcctcagggagtgattctgaagcagacaacgggcactcgtagtagtcagtgggtttttggaactaatggtcatgtagatgaagaaaatgcttttgcttcattggcttcctttgagggcgtggctcgaatacatggacgagggattgtgaccgttgtttgttggttcgttttgggagtagcggtttgcattgtggcgctgtccactccaggatttgtggtgtgacatatttgtacaaacaatttcgggaaccgaagtaatcatcaaaacaatttgtaggccagaaagtagtagacttaaatgtggtgaaaattctaggatagaatcgttaaaaattaggaatagaactgagagttagtgtttttgagtttaccttgtacacattacaacagtaaatagatggaagatccttgaaaaatagcctttttttgtggatagtgcaatggaaattttgggatagttaattactttaaaagatcaatcatctttcattttgtatgttgtgtgccaagcacatgcttgaacaccaaggaaaaactacaatgggaataaaggcttcaggcctgtcaataatgtaaatttttctcaccattgcttttctcttgtctggagcatcagggagctagttggcacatcattttcttgctaagtatggtcattctgtagactttgatgttcaggttgtttcctgtccccttgccccctttgctcccatccctcggggaagaatcttagcgaattcccttccctgctatgaatgtgtaatctgttttgttgggctttgccaggggtggagaaggccccaaagnagaatcattctttttaaagtcaccctatcagtcaggttagttgatgcctggtcctcaaaggttcaaaacattcctttgggggtagctgatgggtgtctccttacaaattttcagcgtttaaagggaggcatagctgaggtgtatacccgtcgaaggtttatgaagagcttgagatgtattgcctcaggactgtgataaggttgcggagttttgatactctgctcaaagataatcaaactcagtagtttttcagagttggcctggatttgcgatttagatgtaataggagaacatgggatccatcgctctccaattggctattttattttttgtagccacttggtttctgtaacctcacttgttgagcatcacctatagagcattatgaaacataaagcggatgggtcggtcatatcatgactcaaggtttagctgcttattgttcgtgacgaaggtgttgctgatatgtctttcattgtgatattggtatttgttcaactgttaaagctttagctgttggggcctgtagcatggtgtaaagctcttttattatttaaatgttaccgacgtcttggttgaaaaa

SEQ ID NO: 95650 - DNA, 496 bp, Glycine max
  Clone ID: PAT_MRT3847_57383C.1
tagcacaagttttcctttttgtttgccgtatgttatctcagccactatagataaccatgagacacactccgaagattggtgttcacggtgtctttgtgtgttataatatattggtattgttgttgagcagttttcatgaatcaacatcatcctcttcccactgtaaagcatggttagtgcaatccattcccaccgatatgccccacttatcccatgttccaggcaccctctctactggggatgtacttcggtggctggctgcaaactccaccacgaggcttcacataattgctcagtactggcagctgttaccttctcccaacgatcctcgctctggggactatggttacactcagcatcagatgcatgaatttggtgccgatcagggtgtttccctttatcaagcattagatgctgctgctgaccgcaatgttagcatcaggttactgtcccactctggagtgtatccaacttttgcctcagaaccatccaaact

SEQ ID NO: 95651 - DNA, 536 bp, Glycine max
  Clone ID: PAT_MRT3847_57384C.1
ctacgaaagctcgtaatgcagatctagggctagcattggactactcctatgctttcatataatgacatcttactcagtgactcaatatgacggatcagcccttataacatcatcgaatgctgaagttctcagagggtatcagttctcattccgtaatgctcaacatcaatgtagccatagacagaactgccttgactagacgggctctgacgacaactgtgcatgatcagatgaaactggcacgactccaactatgctgacgactatcaataggcacatacctagtacgcacccatcatgtcattaggtctgatcatgatatcatgtaacccatcaattgctaagcaggttgatgatatctgctattggcattaacctgcgaatgtactttatgtgacagtctgaaattccataatggtgctggatcttctcatgtgaaaatattctagatggagatcgttgccccattcattacgatactatgactatgtcaaaagattaagctggctcacatcttatgctaaactcttgagctg

SEQ ID NO: 95652 - DNA, 1927 bp, Glycine max
  Clone ID: PAT_MRT3847_57385C.1
gtattgctctgttgttgatgataattgataatggttcttatttacttcaattttaaatcgcattcaaggaaagggagaaaaattaaccaactcacacaactcaaacaccacaaatacaaacagcctaagggtcacgacgtgtacaccatggcggaacagcttctggctaggtttgaggaactatatcgaccggtgcatgagaaattcgaaggtagcatagttcatgatcgcgaatctgaagaggaattgcaagccagttcgtggagccaagttgagccacagagggtgaagaaaaaggagaatccgatccctcctgcaaaattgcataaagaacctccaccgcagcaccctgcaagttcttcaaatcctccattggtgcagtctccggtgcgcacaccatccccaatgcgagctcctcctgtgaagcctttgaagcaacgcgtccgcaaagccgaaggctaaggaccccaacaagagggatatgagtcttgaagagaaacacaagttggggttagggttgcagagtttgccgccagagaaaatggaacaggtggtgcagatcataaggaggaggaatggacatttgaagcaggatggggatgagatcgagctagacattgaggctgttgacacagagacactttgggaacttgatcgattggtgactaattacaagaagatggttagcaagattaagaggcaggcattgatgggcaacattgacaacaacaacaacgatgtgcagtctaacaaaggcaacggggtaaattctctaccacttagttcattttgattaatgggcatgttcttatttagcatttactaatattgctgcttttgatgtcattgaattgacaggaattgccttctagcgagaaggttgatggggcaccagctgaggtgaagaagccaaagaaagtagaagcaggggatgaggatgttgacattggcgacgagattccaacgagtatgtttccccctgtggagattgagaaagataaagatgttgctggaggccatgcaagtagtagttcttgtagctctggtagttcaagcagtgattcctcatcgtctagtgattcggattcggggagttcctcagggagtgattctgaagcagacaacgggcaatcataacagtcagggggtttgtgactaatgatcaaacatgatcatgttggtaggcggatgaagaaaatgtttgcttcattggcttcctttgagggcgctgcttgaatacatggacgagggattgtgattgttggtggttgtgttgtgggttggggttgggagtagctgtttgcattgtggcgctgggaaccatgctcgaggaatggtggtgtgatatatttgtacaaatgatttcggaaaccaaattaatcatcaaaacaatttggcggccagaaaggagagtgaaatgtgatgaaatcctaggatagactcgttaaagatttgggaatagaatgcagggaattagtgttttttgagttgtaccatgtacacattaacaacagtatatagatgaaactttttccttcaagtccctttttgtgtatctgtgcgttgatgttttttgtgatcgttaattagttaaaagatcacctcatttcatttttgatgtaccgaggagatgcttgaacaccaaggaaactaggggtggagaaggccacaaagaagaatcattctatttaaagtcagcctatcagtcaggttagttgatgcctggtcctcaaaggttcaaaacattcctttgggggtagctgatgggtgtctccttacaaatttcagcgtttaaagggagcatagctgaggtgtatacccgtcgaaagtttatgaagagcttgagatgtattgcctcaggactgtgataaaggtggcggagttttgatacctttgtcaaagataatcaaactcagtaattttttca

SEQ ID NO: 95653 - DNA, 345 bp, Glycine max
  Clone ID: PAT_MRT3847_57386C.1
gtatgagatcctccttctttgggggggggggggggacactaaaaagatagtcagctaccattaaagaatataggataataggtatcctaaaattataaataaaatgaatacaaaggaaagtgaaacgactaggcggtataacacaaaagaaaggtcatgaacggtaaacgaaaagaaggtagcaaataaagggaacgtggcgtggtaaatgtccacacaccgacgtagtgcggttggtacgtttggttgtgcatcaacggtacgcatacgtgcgcgtagtgcgcgagttacttgttaacccagtacaacatagtagcgtttacgcagtaaatatataggcgccca

SEQ ID NO: 95654 - DNA, 542 bp, Glycine max
  unsure (1)..(542): unsure at all n locations
  Clone ID: PAT_MRT3847_57387C.1
ggggccccccccntttttttttttttttttttttttttttttttctaagcgtaattggcttcatttcacttcacgaattccaaaatttaaaataacacatgagaatgcctgattgttaggacaaacatgcagacatttaggacggtcaattaccaaggtacagcatccatattaagttatgaaaatagaaataaacatgctatttcacaatagataagaaaatcccccatagagtatattcaatcagaatcatgtcttctcctctccttatctttcttgtgtctcttcctgccatctgaatcacgagaatgccccctctcatgtttctctcgtttctcttgcttcctatcctcgcgagaatgatgcttctcacgcttttcacgtttctcctccttcctctcttcacgtcttctctttcttctactttcatcttctgaatcatctgaagtcttcattgctggttgacttggcaaagatacattttcctcctcagctggtgtatcaccgagtgaaggctttgaagaaccaggttcttccctcgt

SEQ ID NO: 95655 - DNA, 311 bp, Glycine max
  Clone ID: PAT_MRT3847_57388C.1
tttttaacgagcgcataagcctgcttctacttttgaaaatgagaaaaactataacatgcgctatatgttcataaatcgagcgagcaagatgcttccgcggagaacaacttaaatgtcactgaaaaaccaaacggatctcgacttttttgtaagaaacgtacacgagcaccgggtacggacctgacgaacatctgaacattactcaaagatgtcgggggctgatttatggatacagcattttttcaccctcactttctatggcagtgccacacttaatcgttgacactcaccttacttaggaacgcacatgc

SEQ ID NO: 95656 - DNA, 492 bp, Glycine max
  Clone ID: PAT_MRT3847_57389C.1
tacggctgcgagaagacgacagaagggagaatccagaatccatattaatctatctgtgttggaacatagaggactagtatataagggtaattgggtaaatgaagccattgttgattcttgatgcctttatttttacacactgcacaatcatttatttgagcactctgttttgtcattaatccaacatttgagtagctgaaagtctcatagtaaagttatatgatatgatgtattgttaactttgtgttttgaccttgattgtgaagtttcaggatgcagtttgtgttctaacctctgtttcttaaccaggtaaagttggaagaagaggaaaccaatcatttcaaagatagtcttcttcctactgtaattggattgcttagaactgtaagtaattagttattgtgaaagtttgagtattattttttattgggaaagaactttagtaagatcagtgctgtgagattttcccttttgtatttttgaggataaatt

SEQ ID NO: 95657 - DNA, 424 bp, Glycine max
  Clone ID: PAT_MRT3847_5738C.1
atgcattaattaattttcacttttataagggttggaagtgtgaacttctccattatgaaaaaagccaggggtacaatagttctcatgcgcggtctgccaaattcaaaggcaagcccaaaaagtaaacccccgatctttatatataaatcacttctggccaccaccaaccttttgaatttttacctaattaaacagctggtgcccacttttcaaattattttagagaagaaaaaaaaacccttgaatggggagagggaaaaaaaagatagattgtaaaagaaagaaacatgaatttccaaggccatgacttgaatcaaatcaaaattcactggaaagaggtgcctgtgtagagctaatgaagacatttgcctagattagggcctccctaccaccaccccataagaggtccaacccaggagatcca

SEQ ID NO: 95658 - DNA, 418 bp, Glycine max
  Clone ID: PAT_MRT3847_57390C.1
ttccaaggaagcgtttcccgatcatcagctgtatgactgtcctcctgtctttggggggggggggggggagcatctaaagagggggtaagaccgtaaatgggacaatgcaagtatgaatatccgttgacagaaggcaggatgggatgtaaagtttaaaatagacggtattcaatactaaataaagatgtccgccgtcttagcagtgcgaaagcgaaggaatacgcaagagtgtaagaccttaaaaccagggatacagaatggccgcgataaaagaaaatgccatgtgttaaaacctaaagccgtagccaacggtgtcaagccacaaagagcagtattaaagagaccaaaggaccacagttgcattatagtccttatgagaaaaaacgagtacggtaggagtacaacgtagtagtagtgg

SEQ ID NO: 95659 - DNA, 218 bp, Glycine max
  Clone ID: PAT_MRT3847_57391C.1
acgaggaacatcggaagcccgctgacattgctattatagctccatcttattcctttgctgctgtatggaaatctgagaatgaatagctgatcatttcttatgatctaaatcaagctaactacgcagatcactatatattgatgcactacccttctggacttaatgatgaaaatgatgccagtggagaggaggaggaagaggatgatgaggaggaagag

SEQ ID NO: 95660 - DNA, 672 bp, Glycine max
  unsure (1)..(672): unsure at all n locations
  Clone ID: PAT_MRT3847_57392C.1
cgtcgctgccgcgtcgtagctcgnatttcgctcgagcctgaacttggagagccatgggtactaccatgcgttcggaaaactgagctgttgatggcgcagaatgattcgcttaatcacgagtacctccccgtgttggggttcgaaccattttgtaaagctgctgtcactcttttgctcggtgacgtcgagacttccacaccactagccgaaggaagggcttttggagtgcaaacactgagtggtactggagcactacgcgttgcagctgaattccttagtaaaattctcaaatacactacattctacgtttcaaatccaacttgggaaaatcaccgactcgtatttttcaatggaggttttaaacaatgtatggaatacaggtactggaatgaagagaagagaggacttgacatcgaagggatgatcgaagatcttcgagcagctctcacatattgattgataatccttcacgatagcgcccataatcctactggttgcgatcctaccaaagatcaatggaaaatcattgcagatattggtcaggaaaagaagctgttcccacttttcgactacgtctaccaagggttcgcaactggcgacgctgaaaatgatgcgtgggctgtcagatattntgcgaatgaacggaacattgaactgatttgttgtccatcg

SEQ ID NO: 95661 - DNA, 277 bp, Glycine max
  Clone ID: PAT_MRT3847_57393C.1
gcaaatctttgtcaagactttgaccgggaagaccatcacccttgaggtggaatcctcggacaccattgataatggtaaggcacagatccaggacaaatagggcatccccccagatcagcatacgctgatttttgccggtaaacaacttgaggatggaagaaccctagctgagtacaacatctcgagagaatccaccactaacttggtgcttcggagtgagagagtggtatgcagagttggagctagaactctgaactgaaagaccatagtccttgga

SEQ ID NO: 95662 - DNA, 274 bp, Glycine max
  Clone ID: PAT_MRT3847_57394C.1
tgcccaaattcgcattgggggttttttttaggggagaacgggccaaatcctgcagcaaacacttagttggaacagatatggacccaaacctgaaaatgcagatcagagcatactcagttgcgcctttcacagccgcatggcccattgtggtggctacataccctgaacccattgagcctattgaaccagacatgaattcaaggcttaagaatctgaggaccactaccaatggtgattttcggcaacgaaaagacctccccatgcgttaaaagta

SEQ ID NO: 95663 - DNA, 290 bp, Glycine max
  Clone ID: PAT_MRT3847_57395C.1
cttacaaatatctgccccttttctctcaaccacttccaacaaaaacgggtggggagcttaccaaagcggcgggtttacgaaaaaaaagggcccggcctataacccttttttttggtgggggaactatcgcgcgggaaaacaacacttttcaagcagcccttcccaattccctattttcaaaatatcgggcgataaaccgcctaacaagaagccctggctacgcctgtttccccaacaccatgaccttttgggagatccccttggctttctccccctccgtcaattgtggg

SEQ ID NO: 95664 - DNA, 371 bp, Glycine max
  Clone ID: PAT_MRT3847_57396C.1
gcaaggtgttcctattgttctcttaactctatttcacaccttttttcaattgcttcttgcaggatttctgcatgtactggtggagcaaattccaaggtgaaaggttcacgtttgaccttattacatgtttgaacggactattattcattcgggagcaattgagtcgcttggagagtgtctttcttcttctagaaaaaagaacagacccttgtctacaagacacatctgtgtgcactgccaaccgtaccgggaataccccaactctctttgatggtctcgacaggcttctcttattacgcgattgcatgtgcttcccacagcgaccgttgggattgtttttctctttggaacctttttttgttctaatcatc

SEQ ID NO: 95665 - DNA, 248 bp, Glycine max
  Clone ID: PAT_MRT3847_57397C.1
ataccttcctctttccctctattggaagtagctagctaggcacgcccttatccatttctctcttgtatattcatattatctttctcttttcgaatcatgtttaaattgctcatggcaaacacaaacctccgaattgcctgtgttctcctcttgttttttatcttacaccaccaagatctctatgttgaaggaaagaggcacttgaggcttcggttgaacaatcggtgctcgaaagatggtgaaaaatt

SEQ ID NO: 95666 - DNA, 177 bp, Glycine max
  Clone ID: PAT_MRT3847_57398C.1
tcggttggcgtatatccacctagggatctgacctgacttgttgccctttgaaccacaccccgactaggcagtaagaggacttgcttctttttttttagggttccacaaacaacaacaagcctttttttttttttacaagcttaacaatgaatagcacccctagacgagattataaac

SEQ ID NO: 95667 - DNA, 325 bp, Glycine max
  Clone ID: PAT_MRT3847_57399C.1
actcctgctataagactactttattttattatagtcattgcaattgaaagacaaggtacctatccaaatgtcaaatctacctccacatgccacatgtgctatcaacaacatcgatgaaatctttgttatccattttaatcacttttttccttccccaaggcctctgcaccataatctgagatcaatacatccctatatatttatatatatttattcactattcattctccaatttctgtaatgctaaatacatcatttttaaaacaataatgcttgaaatataaggttctctccatcctctcctattcaatactcaacccaattt

SEQ ID NO: 95668 - DNA, 616 bp, Glycine max
  Clone ID: PAT_MRT3847_5739C.1
ctgcgacgctgctaaggcgtgttcaacaatcagcggccttgctcgtctcctgcggcgtgttcaacaatcggcggcgaaaatgccttcccacaagacgttcagaatcaagaagaagctcgcgaagaagatgaggcagaacagacccatcccttattggatccgcatgagaaccgacaacactatcaggtacaatgctaagcgcaggcactggcgccgcaccaagctcggattttaaggtccatgtcaacctccgactcgagatttttatattgtttttgttattctagaatgttactagcaatgtgtaaactggaaaggttttagcttttggtcatgtggtcacacagagggatcattgttgagcgtttccatatctctattttgtttttgtactttttttggatattaatctgagactgagatggtagtttttatttactgccttagatttttatttttctttctttttccttcaagtttgcaaacccaatttcgtaggaatgttgaatggtgttgttctctactgcttgatgatagttagagtattacaatgcatagttgcttataaaaaaaaaaaaacatagtttcatgagccttgctattctatacagattta

SEQ ID NO: 95669 - DNA, 1220 bp, Glycine max
  Clone ID: PAT_MRT3847_573C.1
gaaaaagcctgtgtttgcttatcgattgctggctcatggaactatggcggcgagaagacgccagaaggagggacttgctgctagggtggttgatagacagcaggtgcataggaccatttctaaagaagaaatgctgcatctgtttgagcttggtgatgatgacaaccctgagactttggctgatctaagtcaagaaaatgagcatcaagacaaccctattttggttgggcattcactgaaacacacagcaccacattcaaatggcagtagttattctgataagttaatggaaagcttacttagcaagcatcatccgcggtggattgccaattttcatgaacatgaatccctgctacaagaaaacgaagaggaaaagctatcaaaagaggagcaagatatggcttgggaggtttaccagaaatcgttggaatgggaagaagtgcagagagtaccacttggtgagtctattatgcctgaacagaagccagaaatgccaaatgcaatgccccaaaatgtatcagaaagctgcagcatcttgccaactaaactaagcagacgtttcacgacacggaaatgtaccaaccttgcacatatgttgacacttcgaagccaaggaacaaaatttggatgcagtactgtctgtggggaatgtgcccaggagattaggtgggaggacttgaagaagagataggaatgtggtaacatgaaggatgacataatttgatctgtttatatataattaaatctaattttttatgtcgtaaatggttatatcccatgttaaaatcttttatggatgaaacagaaatgttcgtcccaaaaaaatgaaatagaaatgtttcttttgctgctgtaagcagtgatgccccaaaatgtatcagaaagctgcagcatcttgccaactaaactaagcaggcgtttcacgatacggaaatgcaccaaccttgcgcatatgttgacacttagaagtcaaggaacaaaatttggatgcagtactgtctgtggggaatgcgcccaggagattaggtgggaagacttgaagaagagataggaatgtggcaacatgaaggatgacacaatttgatctgtttatatatatgattaaatcttttttttttttttttgtcgtaaatggttattccccatgctaaaatcttttatgggtgaaacagaaatgttcctcccataaaaatgaaatagaaatgtttcgtttgttgctg

SEQ ID NO: 95670 - DNA, 1472 bp, Glycine max
  Clone ID: PAT_MRT3847_57400C.1
attcccgcggtacgaccccacgacgtgccgccaacaacaacgacaaaaaaaccatctcctctctctcttctcgctcttcacacattgcacttcttggtcctatgtacctggttctccacatcctcagccaaagcaacctcctacaacgtggtggacttcggggccaaacccgacggcgcgacggacgcaaccgcggcattcctaagcgcgtggaacaaagcttgtagttcgaacaaacccgcaggcattcacgtgccgcaagggaggttcctgatagcacgtgccgttacgttccatgggcaatgtgcgaaccgtgctatctccataaccattcgtggaaccttggtggctccttcccaatacacgttcgtggggaattctttgtattggttgacctttgaccaagttagtggggtttccattcatggtggggtgcttgatgcccgaggcagtttcttgtgggattgcaagtacaaagccacccctaattgcccaattggagctgcgacacttgggttcacaaactctgaacacattgtcatcactgggttgacttctcttaatagtcaactggttcacatactgatcaatgcatgccacaacgtgaaaatgcatggagtgaagctcatggctgatggaaacagccctaacaccgatggcatccacgtcaaattctccaccgatgtcaccatccttgcacctagaattcgaactggagatgattgcatctctgttggccctggttgtagaaacttgtgggttgaagatgttgcatgcggacctggtcatgggataagcattggaagcttaggatgggacttggacgaacctggtgtgaaaaatgtgacagttagaaaagccacattctcttaaaactcaaaatggttttagaataaagtcttgggggaggccaagcagtggatttgtggaggatgtccattttgaacatgcaacaatgtttgatgtccaaaaccccattataattgaccaacattattgcccatttcgcaatggttgccctagtcaggcctctggggtgaagataagtgatatttcatacaaagacattcatggaacatttgcaacgcaagttgctgtgaaatttgattgtagttttgagcagccatgcgaaagaataacgttggaggatattagattcacttacaagatcaacaaagctccccaagctttgtgtaatcacgctggtggaaccacattgggtatagttcaaccggggagttgcttttagggcaaatgttagatatggctctgaaatttgaaatctggagacaaaactatatcatttgctaaaattaagatctattgattatgtgagaatgtcagtaacatattttttaacattcatattttgttattggttgaaatttattagaatttttttttaggtttcatttttatttaaagaactttacttgtgattttatagtttttaataaattttaattagttat

SEQ ID NO: 95671 - DNA, 457 bp, Glycine max
  Clone ID: PAT_MRT3847_57401C.1
ttcgataatggtggccacaggtggtattcctgagaatacaggtatagcattggcctgtgctatgaatagctctattacggggcgcgcccaatttgatactacacacttatgtgcaccaaaagactggggaaagaaaaatcctgcttgcacaaaagcgatgactatgtgatttaatccaaaccccatgtgctgatgcatggagcttggaatttctgaagcgtaccggatttcattgtgatatcaaacgtgtcactggatggactgacacccctgtgcaagatgaagaggcagctggtgaaagcttggattactgctcccactgtgctaccaggacctaagagtgtctggaaagcaccaaaatacttttgtggcaaataggaggatgggaaaactgactatcccccagggcacttcccgaagtgttaaaagaaagcctctttctatagggggaggagct

SEQ ID NO: 95672 - DNA, 461 bp, Glycine max
  Clone ID: PAT_MRT3847_57402C.1
catgtaggtatttcgcaatcgctgagacacgagatcaatgtcatacaaatattttcaatagcaatttacgaatcactttacagaacaatgaagagggaagcaaaggccatcactgccccaaccaaacccatcttcgtggtcgaagcactgctagcagtaacatctgccggagcaacatcatcagccaagggacctggagcctcagccccaactgggcttgttgctggggcttcagcagcaacctctggagactcggcaacgctttcactagcaggtgaaggcgaggccgcattctccaaaggagttggtgccttggcactctgagctggcacaggagactttgcaacctgtgcctgaacgggtgccttcgcattgacaccttgtgatgatggcataggagttttagcctcttgtgcagtaactggtgccttggcactttgtgctgcaatgggggccttggc

SEQ ID NO: 95673 - DNA, 353 bp, Glycine max
  Clone ID: PAT_MRT3847_57403C.1
ttttcacagtaatatataaatattttatattcttcaataacaattaagtcttgtcccattagataaggtcaattagatggatcacatgatgtcattggagttggttaaaagccaaatttttatttattgtaaggttccctttgataatttcttctatatccttcttggtctccttttacccctttttacatagctaaaagccgtagcttgttccccgagtggcctcttggtgtggcaaacaaccttcattgtttttctctcatcctttctttgataggtactgaaccaatatcttcttgcatataatcattccatatctagtcctttcttttgtgggaatagcaaatatgact

SEQ ID NO: 95674 - DNA, 389 bp, Glycine max
  Clone ID: PAT_MRT3847_57404C.1
gaagttgtcagtatcttattgtcctctatccttggtatccctgatggtttcaactctattcaactcctttgggtcaacctcgtaactgatggtttcccagccactgctctctctttcaaccctcctgacccacaaatcatgaagaagcctcccaggaaacatgatgagcctattattacttcatgggtgttcgtccgttatcttataattggaacatacgttggtctcgccaccgtcggaatattcacatactggtacactgcttatgactggtcaggtgatggtcattcacttggaaagttcagtgagctcgacaactggagtgaatgcacagactgtggaagtgcctgctatgctaacaacaatggaaactacactcaatctaagac

SEQ ID NO: 95675 - DNA, 229 bp, Glycine max
  Clone ID: PAT_MRT3847_57405C.1
gcacggactgcttcacgtactctatggcttgcaggaagacaatgcgggaaactacgcgaaagcgttccctctctacatgaacgccttggagtacttcaagatcaagggagccatcacgcagaaattcaccgagtacctgcgccgggccgaggagattcgggccgtgctcgacgatggcgtgcccggcccagcctacaacggggacacggcggtggctgcaaggcccaag

SEQ ID NO: 95676 - DNA, 271 bp, Glycine max
  Clone ID: PAT_MRT3847_57406C.1
ggctcgaggtgagactttgacctcattactttgaccacaggaccacgcatcactgcgacgacaatacttttttcaccgaacctgctatccattacaatggcaccaagagaacctcccactcgtaaggatctccgggaaagaccactcgctggagcaccagacaatggcagaagaatgccaagacccaaacacccggtctcaatagttgattacgacagctgcccgatataaaaaaataagccagggctaactgaaagggcagcctattaac

SEQ ID NO: 95677 - DNA, 558 bp, Glycine max
  Clone ID: PAT_MRT3847_57407C.1
aattaatcttcctagatgctaatgatgagtttgggagtatgattaattctttttctgtttgtaatatataatataggcatcttgctttctaatcagtcaaataaataatgcttattgggaagatattgatccagcattaaggatctaaagctataactaaattgtcgggatacaaggttacgtatattgatttgctcaagtttgtatgtagctttgacactgacaccacaactttcccccaaccaataaaaaacagtgattaaaacttaacagtgcttaggttcatgattaacatcaattatacattgtaaagagggtgtggctggccgtagaggacatcaaccgctcattcaattgccagaaacatggcaaagacgacagaaaacatctcagggatatgtgtctctggctgcttcaacttggactaagattagctaaaaaacaacaacatagatgcgtttgtaaacccatttaatgtaatattcttaggttcagcgcacttataagccgataattagtaacacctcattcacatactaataaataataaaaattaat

SEQ ID NO: 95678 - DNA, 886 bp, Glycine max
  Clone ID: PAT_MRT3847_57408C.1
atactctattttttctcttttccgtttttgtccgcgaatttccgatcaattccgattcctacaactagggtttcgaaaccgattccttcttctccctctttccccaacacacacgatcgcgatgcatctctagggtttctccctctccctggttcgaaatttcgattctcgtacatgccatcggtggtgaccggaggagcaagacgatgtatagcaatttcaaggagcaagccatagagtacgtgaagcaggccgtgcaggaagacaatgcgggaaactacgcgaaagcgttccctctctacatgaacgccttggagtacttcaagacgcatctcaagtacgagaagaaccctaagatcaaggaagccatcacgcagaaattcaccgagtacctgcgccgggccgaggagattcgggccgtgctcgacgatggcggccccggcccagcctccaacggggacgcggcggtggctgcaaggcccaagaccaagccgaaggacggggaaagcggtggcggtggtgacggcgaggaccccgagcaggccaagctccgggccgggctcaactcggccatcataagggaaaagcccaacgtgaagtggaacgacgtcgcagggttggagagcgccaaacaggccttgcaggaggctgtgattttgcctgtgaagttccctcagttctttactgggaaaagacgaccctggagagctttcttgttgtatggacctcctggaacgggaaaatcatatttagccaaggcagttgcaacagaagctgagtccacgtttttcagtgtttcttcatcagaccttgtttcaaagtggatgggtgaaagtgaaaagctggtttcaaaccttttcgaaatggctcgagaaagtgccccttc

SEQ ID NO: 95679 - DNA, 1911 bp, Glycine max
  Clone ID: PAT_MRT3847_57409C.1
ccacgcgtccgctcgaatttccgatcaattccgatttcaacaacagctagggtttcgaaatcgaccacaccttctcctccctctttccccaacacacacgatcgcgatgcacctctagggtttctccctctccctggttcgaaatttcgattcccgtacatgccatcggtggaggaagaagatgtatagcaatttcaaggagcaagcgatagaatacgtgaagcaggccgtgcaggaagacaatgccggaaactacgcgaaagcgttccctctctacatgaacgccttggagtacttcaagacgcatctcaagtacgaaaagaaccctaagatcaaggaagccatcacgcagaagttcaccgagtacctgcgccgggccgaggagattcgggccgtgctcgacgacggcggccccggtccggcctccaacggggacgcggctgtggctgcaaggcccaaaaccaagccaaaggacggtgaaggcggtggcgacggcgaggaccccgagcaggccaagctccgggccgggctcaactcgggcatcataagggagaagcccaacgtgaagtggaacgacgtcgcagggttggagagcgccaaacaggccttgcaggaggctgtgattttgcctgtaaagttccctcagttctttactgggaaaagacgaccctggagagctttcttgttgtatggacctcctggaacgggaaaatcatatttagccaaggcagttgcaacggaagccgagttacacgtttttgcagtgtttcttcatcagaccttgtttcaaagtggatgggtgaaagtgaaaagctggtttcaaaccttttcgaaatggctcgagaaagtgccccttctatcatatttattgacgaaattgattccctgtgtggtcagtgtcgagaaggaaacgagagggaagcttcgaggcggattaaaacagagcttctggtgcagatgcagggtgtaggacacaatgatcagaaagttcttgttctggcacaaacaagtaagccctatgccttttgccagaaaataatgtgcctattcgttaatcaaatatagtattccgactaccagttttgaaggctcgccgacacaacttcaagttacttctcggaaatacatttccataatttgactgacagtgaattggagttttcggctaccgagacagatgtttgttctggggctgatttatctgtctgcttttcggatattttaatatgacatgttcttaataacgcatgatgcgaatatgttcattaaaagtggagaagatatgtggatcccagttgaaactaaaaaacagggtgttgctccgaaaggacttgctgagaagatcgtaccaccacctatatcgaaaacactttctgccaaagtacttggtagacaaagtcccactgtacgcaattctgaccttgatgttcacaggagattcacacaggaattcggacaagagatataataatgaaagaatttttcttaagtcatcttcactagtatatacatgttaagatccgtaattgtttcagatattttgttatatgaagtactttattagccttaggatgattattatatgcatcttttttatttttggggatataaaagccaatttttatctgaggtggatttataaaggtcgatactcatttttcttcttcaaaattgtgtataacagaatctgaaagcatttgaaaaaagcaaaagttagagtccgtgaaacaagcgggagatgaagacaataaagggcggccgccgaaagcgtttcagctttacatgaacgcgttggagtatttcaaaacgcatctcaagtacgagaagaaccctaagatcaaggacgccatcacgcacaaattcaccgagcatctacgccgagccgaggagatccggtcggacctcgacgac

SEQ ID NO: 95680 - DNA, 380 bp, Glycine max
  Clone ID: PAT_MRT3847_5740C.1
ctcgagccgattcggctcgaggcgaaaatgccttcccacaagacgttcagaatcaggaagaagctcgcgaagaagatgaggcagaacagacccatcccttattggatccgcatgagaaccgacaacactatcaggttccgactaccctaatttttgttatagctcgttctacaaacttctaccaaacgctgcgttttgcaaattttgcctctgcctcatttagttcttttgatttttatctatatttcgtcaggtacaatgctaagcgcaggcactggcgccgcaccaagctcggattttaaggtccatgtcaacctccgactcgagattgttatattggttttgttattctagaatgttactagcaatgtgtaaactgg

SEQ ID NO: 95681 - DNA, 167 bp, Glycine max
  Clone ID: PAT_MRT3847_57410C.1
tatacctatggtctagacattcttatctacctgagagggcgtttactaaggacacgctggcaagctatgacaccaaatctacaatactcaactttacgctcgccttcatccgaacccatacatcttatttaccttcacaatcattcacctaaaccaactttgtcatt

SEQ ID NO: 95682 - DNA, 264 bp, Glycine max
  unsure (1)..(264): unsure at all n locations
  Clone ID: PAT_MRT3847_57411C.1
ccgggcgctggtgctggaaggcagcaatcgacgaaagctgctaaggatcctaacaagccagagagccctccaagcgctttcttcgttttcatgtacggattttcgtttgcttttgataccgaatctgttttcgtatcgtttcgttttgatttntnttttgtgtactggcgattgcagcctntgtgattgtttctttaggtccgagttcagagagcagtttaagaaggagcatcgtaacgacaaatcggtcgctgtagtgagtga

SEQ ID NO: 95683 - DNA, 274 bp, Glycine max
  Clone ID: PAT_MRT3847_57412C.1
tgaaggttggttctgattttttgattaaactattgtttttttaatgactgggttttaggcttttaattcggggcttaattttaaatttaaacaatgaaccttctgcatattattctttagctttaaggaggggtttccttggataaactcacggtatttatcctgtacctctccaagtacagttttttactactcctatgaatctatctgtcataagtttgagttgaattttacctcccactcccctacaaaagataataataaaaaaaaaaaa

SEQ ID NO: 95684 - DNA, 346 bp, Glycine max
  Clone ID: PAT_MRT3847_57414C.1
cggctcgagttctgtaagaagtgtggcaagcaccaaccccataaagtgacacagtacaagaagggcaaggattctctgtacgcccagggaaagcggcgttatgacaggaagcagagtggctatggtgggcaaactaagccgattttccggaaaaaggctaaaactacaaagaagattgtgctaaggcttgagtgcgttgagcccaactgcagatctaagagaatgctggctattaaaagatgcaagcattttgaactgggaggagataagaagagaaagggccaagtgatccaattctaagtgtcatcttttattatgaacacaataaaatcttgagtttatgttc

SEQ ID NO: 95685 - DNA, 352 bp, Glycine max
  Clone ID: PAT_MRT3847_57415C.1
gcaaaagcttcagttccttaatgccaaacggaagggacatggtgttctttcttttgaacaaacagtttcaatatgcctctcattcatggtgtaatcgatcatttctgatctgtgctgcattgtcacgggcgcaacaaaagtgggtgctcaccgcttaactgagatgactacgccagtgcttaccatagggcaggaggacggtaaaagcaatgtcactttgaaggcttacgcaacaaccacgacggaaagtgagtggctaccgagctcagaagtctaagagccccgctacacggggccatatgattggtcgtctgtgcacaggtagggtacactcttgtttgcagcgactaaa

SEQ ID NO: 95686 - DNA, 552 bp, Glycine max
  Clone ID: PAT_MRT3847_57416C.1
atgcaaagaagggagagacatgtagccgagctatcaattgagtgggttgtgcgtggtgaagtcagagaagtagtgatgttggagaagttgaaacatatggaagagagcgataaaattgggttgttagaagctcaaaaagaacatttgaagggaaggagaggttttatgatgaagatgctatcaaactacattagggcacttgggggaaaggtttgtgggagtggaaggaatgcggaaagagaagtcacaataaacatttatgcaccgtgtgagaggatgcaaaagagaaggtgggaaacttattcacttaaagagaaattgaaggagttgaagaagggattgatcatgaaagtgtggaacttggagcattttgggaacatagaaacaagacaaagtcaaattgaaaaagagatgagaatgaaggctcctatcctggctcactcaagcttgaggatagagaattccaagcttgaagatagagattttccaaactatttatcttatcggtggaccatgagctactacatgaggaaacttgacaccacattttaa

SEQ ID NO: 95687 - DNA, 307 bp, Glycine max
  Clone ID: PAT_MRT3847_57417C.1
ttttctcttgggggacatctggatcagactgaagagggtattttgtctaatccatatcatttgctaggagaactcgcatctgacgtactgaccgattcttcaacagatatgatgtgggcaagaaagcattatttgctgcatgacatgcagaaacatggtaacgttgaaatggcgggccagatgctacacttgccatcgcataataacgaaggcgaacatgatcattctcatcatacagggttagaggatagcccctcaactgatgatgattgggactgtttctcaccactactgtttaatgcaacgt

SEQ ID NO: 95688 - DNA, 1775 bp, Glycine max
  Clone ID: PAT_MRT3847_57418C.1
gtccgaacctaggcacgtcgagtcagaacctaggcaggtcgattgacataacacccgaatccaagtgaaacgaaaaacactcatcatcatggattcagttgcattaaatggcaaaagcaatgataagcctcttcacgttgccatgctcccatggctggccatgggtcacatatacccttacttcgaagtcgccaagattcttgctcaaaagggtcactttgttaccttcataaacagccccaaaaacattgaccgcatgcccaaaaccccgaaacacttagaaccattcatcaaactcgtgaagctacccttgccaaaaatagagcatctcccagaaggcgcagagagcacaatggacattccgtccaaaaaaaactgtttcctcaagaaagcttacgagggcctacaatacgccgtttccaagttgctgaaaacgtcaaaccctgactgggttttgtatgacttcgcagctgcttgggtcataccaatagccaagagctacaacattccttgtgctcactacaacattaccccagctttcaacaaagtctttttcgatccaccaaaggacaaaatgaaggattactcgctcgcaagcatatgtggtcctcccacgtggcttcctttcaccacaacgatccatatcaggccttacgagtttttgagagcatacgaaggtaccaaagacgaggagacaggtgaaagggcttcttttgatctcaacaaggcatattcaagctgtgacctttttcttctaagaacctccagagagcttgaaggagactggttggattatcttgctggtaattacaaggttcctgtggttccagttgggttgcttccaccatccatgcagataagggacgttgaagaggaagacaataaccctgattgggtcagaatcaaggattggttagacacacaagagtcgtcatccgtggtttatattgggtttgggagcgagttgaagctgagtcaggaggacctcactgagttggcacatggcattgagctttcaaatttgcctttcttttgggcattgaagaacctgaaagaaggtgtgcttgagttgccagaagggtttgaagaaagaaccaaggaacgtggcattgtttggaagacttgggcaccccagcttaagatcttggctcatggagcaattggagggtgcatgagtcactgtggctctggctctgtgattgagaaggttcattttgggcacgtgcttgtgactctgccttatttgcttgaccaatgtctgttttcgagggtgctggaggaaaagcaagtggctgttgaggttccaaggagcgagaaagatgggtcttttactagggtcgatgtggctaagacattgagatttgcgattgtggatgaggaagggagtgctctaagagagaatgccaaggagatgggcaaggttttcagttccgaagaacttcataataagtatattcaagatttcattgatgcgcttcagaagtataggattccttccgctagctaagcaggattcatgctttccatttttccccttcttcattagcgtgcttttttatcctgtaataaacaaggttatttcaaccctgattttaaaaaataattagcaaccgcgattttagttggaatgtcaagttaaggtttgttcttgtttctctctgtattttagtttttactctttaaatatttttggaataattcttatataaaaaaaaaaaaaaaaaaaaaaaaaaaaaaaaaaaaaataaaaaaaaaaaaaaaaaaaaaaaaaaaaa

SEQ ID NO: 95689 - DNA, 226 bp, Glycine max
  unsure (1)..(226): unsure at all n locations
  Clone ID: PAT_MRT3847_57419C.1
gacactatagnaatagctatnngacgtcgcattgcacgcccgtacgtaagactcgggaattctggtatatgagaccggatcatgacctgtgtttgtttgaggtacgaaaaaaatcgccacgtggagcaagctcttgctgggtcttcgagtaaccgattttgctttcctgattggtgtccttcttcggggttcgccaatgataagaaacagggctgggctatcgact

SEQ ID NO: 95690 - DNA, 470 bp, Glycine max
  Clone ID: PAT_MRT3847_5741C.1
cgcataatgaatacaattacataaacaatgcatgtttagtcttcatttaggttgacatagtgtcttttaaatgacatcaagcttgtgtattgctgcattccactaatatatggagttgtccaccgctttgtctgagaataacaattgcttgaccacaacaacgctggaggcggtaaggggcaatggtctttcaaataaacctgtacaaaatgatttccaaacatgtgaccgacacatatcatgcggtgcctaaaagaatgaggtggtggttaacttctaagaggaaaaaatgccatgctttgttctcgggacaacgatacaaggattacgttatactgtgatgcaatcacatatctcatctccgttatatccatccacttgtccacactaacctgaatcaagcaaacatacacatgtaagtaatttaaagttttttattaaaaaaaaaacctaaaaacatacctttaaaa

SEQ ID NO: 95691 - DNA, 1006 bp, Glycine max
  Clone ID: PAT_MRT3847_57420C.1
aattcggctcgagcggcaattgcctggcaggcatgaagaacgacgttaccatcatcggcatggaagaagaacccatggagcgtgtcatgggcaaaaaggttggaaagatcttccgtggattgctagagaagaacggcgtcagatttaagatgggagccagcgtggagaaagctacagcttcaaagagcgattcgtcgaaggtcggcgccgtgcatctgaaggatggcaccacacttgaggccgatctcgtcattgaaggtgtcggcgtcaagcctgcaacagagtacctcaaggacaactcgagtgtcagtctggagaaggacggctcgttgaagactgacgaatcatttgccgttaccggactaaaggatgtttacgcgattggcgatattgctacatacccataccacggtcctggtggcaatggtgcaccggttcgtatcgagcactggaatgtggcacagaatgctggccgttcagtggccaattcgatcaacaatccctcggcgaagcccaagcctttcatccctgtgttctggtcagctctaggctcgcaactgcgatactgtggtaacacagttggtggctacgacgatctgatcctgcagggcaagccagaggagccatcattcgttgcatactacacgcagggagagactgttgtcgcggtcgcgtctatgatgaaggatccatacatgacccagagtgcagagctgatgaggagaaacaagatgcccagcaagagcgagctgcagaagggagtggatattctggaggtggggttgcccaatgagatcaagatctaaggggaaatacgggtaagtccgtattactctggtgcaacagcaaagtacgaaccaatgcattgcggatgagatgcggatcaaagtttagaaaggtccgaaacagtcgagcataccccaagtttgcagcacctgaggattggtgccaaacataattagaaaataaccgtcttacgaggcgattacgcttgtgcagggcgacc

SEQ ID NO: 95692 - DNA, 324 bp, Glycine max
  Clone ID: PAT_MRT3847_57421C.1
ggctcgagctcgtgccgctttttatgttgttaggggtccgagtatgttttttgtttcacacgaaaacgtcttgctggggaggatactgaggttgcggcagctacggcatgagcggtaacagggtgcagaggctgcacgatggacccagactcgagctacactgagtaaaccaccagcgctaccttggctatgggagtggcacctgttaaggctaactccgagggtgctgaaatgggcgtgcccactgagaacgatggctgcgaatgtggaccacactgatgctgcgacccctgcacttgcaagtgaggtgttgggagagcgagc

SEQ ID NO: 95693 - DNA, 1524 bp, Glycine max
  unsure (1)..(1524): unsure at all n locations
  Clone ID: PAT_MRT3847_57422C.1
ggtccggnaattcccgggtcgacccacgcgtccgacacaatttcatcactttcttcttcgaaacctagcgtttcagtttattcgaatcggctcgagatgaaggcctccgtctccagcaatgccgatttcctcaagatgggactcttcttcctcttcgtggcactttctttttcgtgggcaaacacttctccgacagctcctcccagcagctcatcttcttctccgccaccaccgccgccacaccaccaccacgtccgccgaggtcaccatatcccccaacttcaaccaattcttcaacgtcaacgccctaatcgaagcccagacccccaaaacaaacccctcccaacaacctcccccctccgccggagcttctcgacacgatcaagcgcttcggcatcctcaacgacaacggcaccatgtccgacgacttcgagatcgggcatttcgaggaggggttgccggaggattggggaaacgacaccgtcgtcgaggattccgtctccgctcccagaatcgctgtgagcaagttcgggatgtgtccgcgcggcatgagcgagcatataccgtgtttggataacgccggcgcgattcggagactcaagtcgacgcagagaggggagaatttcgagaggcattgtccggaagaggggaaacgactcaattgcttggttccgccgcctaagggataccgtcctcctattccgtggcccagaagccgcgatgaggtctggtacaataatgttcctcacactcgtcttgttgaagataaagggggtcaaaactggattaccagaggcaaggataagttcaggccacgcgtccgcaggtttcctgggggtggtacgcaatttatacatggagcagatcaatacttagaccatatttctgagatggttcctgatattaagtttgggcagaatataagagttgctcttgatgtcgactgtggtgtagctagttttggcgcatacttgttatcgcgaaatgtcataaccatgtctgttgctcccaaggatgttcatgagaatcagatccagtttgctcttgagcgtggtgtgccggcaatggtggctgcatatgcaactaagcgtttattatatccaagtcaagcttttgacttgatacattgttcacgctgtagaattaattggactcgagatggtatgatctccagcagctaattgaccagtgggagtgcatgttgaatttagttataagtttccttcctactaagaaaaataatagctagttattgtgtatgcagatttgatagcaattttaacctgatacagtggttagcttgatagtaaaaagggaattgaagggggagggagaccgggagagggggggcggnggagagcaggactctnttctgaatgcgttaaatcttattacttcaatttcaatgtgctcctncaatctctatgttggttgctcacttggaatttcttctgacacctcttttttttacttgtgngtgaagatggtattttgctgctagaaagttataggatgctaagggca

SEQ ID NO: 95694 - DNA, 566 bp, Glycine max
  Clone ID: PAT_MRT3847_57423C.1
ggctcgaggttcaacactggagacattcttaccaagatctactacatggtaccacatgtcccatccctgctgcgaagaacttcacctacacactccaagtcacagatcatattgtaagtctcttctatttttcatgtattgctttccacatggtagctgcagcatccaggtgccatcaaaatccttagtaggccaaggatccctgtggccattccctgacccagctggtgacctctaccttcttatacgtagaccggtaccagatgagtcacacgacgcttcagactgttctagatcttggacacaaacttccattcgcttaagccgttctcatcaatggccgatcaagggtggcaaccttcacagctatacaagggacatcattcacgcttacaatctcaaaggttgagctgtagaacacactcaactttatgattgaaggccacgacatgaagctggtggcagttgaaggaactcacaccatacataccacgtatgcctcgatagatgttcatgtgtgacaatcttattccgatcttatcacagctgatcaagcccccttgact

SEQ ID NO: 95695 - DNA, 294 bp, Glycine max
  Clone ID: PAT_MRT3847_57424C.1
gcgaaaatatattttcgagagggtggggaataaaaaatcatctattatccccaaatcacataacatgtttttccaaataatgacaatggctttactacaaaataaggtttttgcggatcatcaaatgattacatttcaaaaatacccaactttcctgtgttaaaactatatacccagattacttgtctcttttaggctaaccactcaagagcatgaagaaaataacaccatgcgcacaggtgcggtttaattttatcattggaacattaactctggttttttgcacataagttt

SEQ ID NO: 95696 - DNA, 173 bp, Glycine max
  Clone ID: PAT_MRT3847_57425C.1
ttttcctcttgtttcaactggctgcggggcggctccctttcttttctgggcggtgccatttccgggcggaaccgagttgcccccccgttgcctgtactttggccggccctctggcgctctttctttttttggtcgggtgccgtttcctcggggggccgctgcttggattttga

SEQ ID NO: 95697 - DNA, 330 bp, Glycine max
  Clone ID: PAT_MRT3847_57426C.1
ggcggaagttcgcatcaaatcctgggaaagccaaggacattccaatccccaatcttcctcccttggattttccatctccagaacttcctcttatggagctctacgaggatattctgaaaggatttatgaataattaaaatggaacgccacagtaaaggcgaatagaggaaataataacagtcatcgttgatccagcaaagagaaatgaaaagggaaaaccacatagaatggaatgccgagatgcttcatctgtggactggtgagcagagcattgcaggaccgtgaacagtcactgtaaatgcgctggtattcatcactcattagctatga

SEQ ID NO: 95698 - DNA, 281 bp, Glycine max
  Clone ID: PAT_MRT3847_57427C.1
cacgctccggtatgcaatattttatagagtttaaagcgatacctgttagctgcgatagccattcataagaaactggcagacaaatacacttacatccatctaagaaccattaatctgttcagaaaggttaacctggcatacacaattatatacgcaaagacagataatgtaggaactctaccattcaaatgtaatattgataaaatcacacacatatgatactactcaagtcttggaactttaatctgacctagcgcatataaagaagactctgtcatcac

SEQ ID NO: 95699 - DNA, 332 bp, Glycine max
  Clone ID: PAT_MRT3847_57428C.1
tcgcgcacgcgtacgttgacctatcttggtgtagatttgaagtttataccttcaaattattggaaccattttatatagccttggggttctgagtctctgctgctatggctctacacgttcttcttgtgttgatgttgttgctgatgtccagccttagatacgctacatctgatccatatattgaatacgatatactagaagcatacgaagacctgaaattttctgatatcgagccacttatcatgagagtctcttacagaaggctaatgcaagatatggattgactctagtcgtgcttgactagatgcagtgcacatttgaggcccaacttg

SEQ ID NO: 95700 - DNA, 106 bp, Glycine max
  Clone ID: PAT_MRT3847_57429C.1
cacacgcgtacgttcaggccgacagggatatcagcgctccacttgcatgatctggctgactgggacagaatcgcgagctatagaaaagacgcacccaactgggagt

SEQ ID NO: 95701 - DNA, 930 bp, Glycine max
  unsure (1)..(930): unsure at all n locations
  Clone ID: PAT_MRT3847_5742C.1
ccacgcgtccggcaagataatgtgtgattntattagccgtgtcntgctatatatatagatggttgtgaccgagcaattgcttcattttgtttacaaaaaaatagacacgcgtgaacatgtttcgtgtttacgtttcattcagaatgtgtagtcaagtcagtcaatgtattgtcgcgctcaaactttaatacgcatgcatttcattatgtgttgtcaattatgacaatgatgtatgctacacgcgtaaatgatttttgttggaccaacaatttttttgcttaaccaaacgagtacttaataatattaattggttagtaatgggttacaacaaattatattgcataatgaatacaattacataaacaatgcatgtttagtcttcattttggtcgacatagtgtcttttgaatgacatcaagcttgtgtattgctgcattctactaatatatggagttgtccactgctttgcctaagaataacaattgcttgaccacaacaacgctggaggcggtaagagataatggtctttcaaataaacctgttgtacatgaacaaaaattatatcatgcggtgaccgtgtcaaatgaaccagcgaagtcattacataattgtcatactaactatattcaatgtacatgaacaaaatgattttcaaacacgtgaccgacacatatcatgcggtgcccagaagaatcaggtgatggttgacttctaagaggaaaaaatgtcatgcttggttgtcgggacaacgatacaaggattacgttataccatgatgcaatcacatatcccatctccgttatatccatccacttgtccacactaactcgaatcaaccaaacatacacatgtaagtaatttaaagtttgttattaaaaaaaaaacctaaaaacataccttcaaaaacctatcaacaagtagggacaactt

SEQ ID NO: 95702 - DNA, 130 bp, Glycine max
  Clone ID: PAT_MRT3847_57430C.1
gcatgtggggccaccagcgggcacgacaaaggatgagactctttactacctgctattacttgatgatgcacaataggacgaggaagtagcatacctccttaggaaggaaaggactccttgctaggaattc

SEQ ID NO: 95703 - DNA, 588 bp, Glycine max
  Clone ID: PAT_MRT3847_57431C.1
cgaaaaccttctaccatggtgcaaaagatgcaaaacatcaagaggttacgcgtgggtcgcaatgctgtctattgtgctatatttgatcgggcaggaagatatgtgattactggttccgatgaccgacttgtaaaaatttggtcaatggaaactgcatattgtttggccagttgccgtggacatgatggtgacatcactgacttggctgtgagttcaaacaatgctttagttgcatcctcatcaaatgactgtgtcattcgagtttggcgcttgccagatggcttgccaatatcagttttgcggggacatactggagctgttacagccatagcatttagtcccagaccgaatgctgtataccagcttttatcttcttctgatgatggaacttgtatgatatgggatgcaaggtatacccagtcaagtccaagattatatgttccaaggcctcttgattctgtaattgggaagagcaatgggccatcttcaagatctgtcccacataaccatcagatattttgcttgtgattcaatgcttatggaactgttttttaacctgtagctctaacaatttagctaggttttgca

SEQ ID NO: 95704 - DNA, 447 bp, Glycine max
  Clone ID: PAT_MRT3847_57432C.1
tttttatttttgttctgtttttttttttttttttcttttttttttttttattgttttcttttttttttctttgttgaattggtttctaggccccaaaacgaactcaagccaaactaaagggcgcaccaactactgccaaagcgaagaataaagggggggaaaaacccgggagggaaaaaccaagaggggggggatttaccccaaacagtggggcaaaaaagaaccgcaagccaattttccaaagggggaaaaacccaaccgcggacccctacaagactgagccgaattcccaaagaaaggccccgcccgcaaaaaaccaacccgccgaaacacccccagttgtggaaaaaaaaaggggctccgaaaaaaaaaaaccccgcccggggcgcccaaataatgcccaatgtccaacccccgactcgagggcccccacccgaaaaccctttg

SEQ ID NO: 95705 - DNA, 486 bp, Glycine max
  unsure (1)..(486): unsure at all n locations
  Clone ID: PAT_MRT3847_57433C.1
ccgggccggattcttggggcgcgggaagcccgaacaccaannnacagagacagaaacgcgacccncacagagagcnccagagcacacagcagaaaagaacaaacgcatgcccccaacagaaacggcgccgaagaagagaagaacaacccaagnnnnnccttcttcttctcannaggaggtggaanaagnngnnaagggaggggaggagaagaggcaccagangagggagaanggggggggagaccaacccgaggaggaggaagagcccgacggcgacccagagcacgaaccaaacccgcaacccaagcacccccccgacgagggggagggggagggggagcaggagggcgaggaggagggccagggcgaggaggagaccgagagcgacggagacggggagcccgaccgggagagcgagggcgagagggagcagagcccgcaggaagcggaggcngnggagagggaagaggagagcgagggaagaga

SEQ ID NO: 95706 - DNA, 216 bp, Glycine max
  unsure (1)..(216): unsure at all n locations
  Clone ID: PAT_MRT3847_57434C.1
cctcaaacttcaacaaccaaacctctgcacctatacaatttgaccctctcaacagtaacagttanataagcagtgtctccaaatatcctaaccatattattctttactaacaacctatctaaacaacgcgttttccttccttcacaactatacctatcatatccattacacctacacctacttatcagcgctactaatgtgccgatctatacttaa

SEQ ID NO: 95707 - DNA, 1409 bp, Glycine max
  Clone ID: PAT_MRT3847_57435C.1
gaagacgacagaaggggatagcagtagtgagtggagagcgagaggcataacataacataagaccacacaaagctggctgtgttgcgcgttgaagagagaaggaagaagatgtcgggtatgggagatgggtacgtgggcaccgcccaagacgcggtgaggattcgacggttggagaagcagagagaagcggagcgtcgcaaaatccaagagctgaaaaccaagtcggcctccgccaagggccaacccggtcttctccaattcggttccagcacttccgagattctagagactgcctttaagaaggaaactgtgggtttggtcactagagagcagtatgtagaaaagagggttaatattcagagcaaaattgaggaagaagagaaggagaaacttcagaagcaacaacaagaagaggaggagcttcaattaaaaaagcggaaaaagaggaagatcaggggcaattctcgattgtcctttgctgaggatattgacaatgaaccccaagaagacgaaccacatcacagtaaggataatctggaggcaaatagattcggtgtggtaagcttggacaaagctgttgaaactagctttctacctgacaggtgtgtgtgtggcatctcatctcttattctttcttatcccccctttagtacccctgtcctttctttattggttgttgccctaacatttgggcataggagtgctgaggattcttgttcagtgagcgagaggctgaggagcaagctgagcgtgaaaggctgcggaaacagtggcttcgtgagcaggagcaaattcgaaatgagcctcttgaaatcacgtacagctactgggatggaactggccacaggcgtgtgatccaggtacgcaagggtgacagcataggagagtttcttcgagcagttcaacagcaacttgctcctgaattccgagagattcgaacaactacagtagaaaatttgttatacgtgaaagaagaccttatcattcctcatcaacatagcttctatgagctaattgtgaacaaagctagaggcaaaagtggaccgctttttcatttcgatgtgcatgaggatgtacgaacaattgctgatgccactatagagaaggatgagtctcatgctgggaaggttgtagaaaggcattggtatgaaaagaacaagcatatatttcctgcttcaagatgggagatatatgatccaacgaagaaatgggaacgttatactatccacggggattgatttgaggctgccaaataatttgcattagcatttcctgtattgacatttaatttggtcatgcgtttgtacgccttggtgataattatgcttttgttagcatttcctgttattcattacagacaacatggacaattagtcagatctatattacagtggatttcgtgtcaaaaa

SEQ ID NO: 95708 - DNA, 400 bp, Glycine max
  Clone ID: PAT_MRT3847_57436C.1
aactaaacatatttcccaattcttattgcaggagtgtggacacttataatatgagagaaaagtgatgaacctcgtgatttaccctggcatcattggaggctgcgactactcggaatcttatgttttagcacagaaaaagttcaattaatcatatttgacaatttttatcgccggattggggagacggataagatgagagaaaagtgatgaagctcgtgatccaccctgccatcattaatttctgtgatgtccttgttctcttatcttttattgatggctaacaactagctggacaaggattatttgttattaaactgagtggatcatttcttttttctttaagtcatgcgtggatcgaaatgattatagacaggaaacaagctctatgcctactactatg

SEQ ID NO: 95709 - DNA, 944 bp, Glycine max
  Clone ID: PAT_MRT3847_57437C.1
ggctcgagattttatcaatgtagtgccatgttgccaagctgtttaaatagagatttgtgaatgttcattgatcaatgctttagaaaactttgttatgcttctagcagataatctggaggcaaatagattacggtgtggtaagcttggcaaagaccctactgttgaaactagctttctacctgacaggagtgctgaggattcttgttcagtgagcgagaggctgaggagcaagctgagcgtgaaaggctgcgcaaacagtggcttcgtgagcaggagcaaattcgaaatgagcctcttgaaatcacatacagctattgggatggaactggccacaggcgtgtgatccaggtacgcaagggtgacagcataggagagtttcttcgagcagttcaacagcaacttgctcctgaattccgagagattcgaacaacatcagtagaaaatttgttatacgtgaaagaagaccttatcattcctcatcaacatagcttctatgagctaattgtgaacaaagctagaggcaaaagtggaccgctttttcattttgatgtgcatgaggatgtacgaacaattgctgatgccactatagagaaggatgagtctcatgctgggaaggttgtagaaaggcattggtatgaaaagaacaagcatatatttcctgcttcaagatgggagatatatgatccaacgaagaaatgggaacgttatactatccacggggattgatttgaggctgccaaataatttgcattagcatttcctgtattgacatttaatttggtcatgcgtttgtacgccttggtgataattatgctattgttagtcatttcagtgtttagaatgactaggttttgtgtttctgttattcattacagacaacatggacttaagtatttggtaattattatagaggatttcgtgtcaaataagctaacttctaatcc

SEQ ID NO: 95710 - DNA, 512 bp, Glycine max
  Clone ID: PAT_MRT3847_57438C.1
caaaccaaaagctgagttggtagtagtagctatggcgagcccagaagaagcaaagctcgaaactttcatgcagtggctacaggcaaatggggtggagctacgaggttgcaagatcaagtggtgtggttccaaacgagggtttggcatcttttctgataaagatgtttctgatggggttatgttggttgttccactagatttagcaattactccaatgagggtgttgcaagatcctcttctaggaccagcatgtagagcaatgtttgaagaaggagatgtagacgacaggttattaatgatgctgttactgactgtggagcgtttgcgtaagaattctctatggaagccgtatcttgatatgctaccaaccacttttgggaatccactttggtttagtgatgatgaacttcaagagctaagaggaacaacattatatcgtgcaactgagttgcagaagaaaagcctgctttctttgtatgaatctaaagtgaaggatatagtgaagaaacttt

SEQ ID NO: 95711 - DNA, 324 bp, Glycine max
  Clone ID: PAT_MRT3847_57439C.1
attgcatcaaatcctgtttttcatgaaaggacccagcacattgaagtggactgtcattttattatacagaaaatcgagtcaggtgacatcatcactagatttgttcattcatgtgatcatggcagatgtgtttaccaaatccttgaggggtccatgggttaactacatatgcattattgcattaggtacaaataaatagaggacataatgattcctctaaatcaaagatacagtttccatataacactatataaactggcatccgtgaagtctctagacccacagtgttgttctgcctttctctatgttatttgttgctctgtt

SEQ ID NO: 95712 - DNA, 248 bp, Glycine max
  Clone ID: PAT_MRT3847_5743C.1
gtttgtcatgggggactgcctttaaattttaagtgacactacagccaaacacaaaaaggtgatgggttgtgttatgcttgtattgaatgctgtcttgacatctcttggcttgtcctccggtatgttctaaagctgtgtctgagatctggatctgcccatcactttggctagtgacagggctaattaatttgctttatacattttcagtaatctgcctttttcctttctggaggcatcacatgctggtg

SEQ ID NO: 95713 - DNA, 329 bp, Glycine max
  Clone ID: PAT_MRT3847_57440C.1
tccacgcatactatattaaacattttctcttacgtctgttccacattatcccagcgtatggactctatcatctgaaacaatgtcctataataaacacatatctactatcaatataacttatccctatacatacaacattcatgacttattaaaactccataccttacccaatctttatcttatttcatcacattcaactttctccacatttctttatacctaaaatgtacttactaaacgctctcatcatcatctatacatctcttaattgctaactgtactctctcctatatacaggctttaaacgctttttgtttttacatatactt

SEQ ID NO: 95714 - DNA, 1458 bp, Glycine max
  Clone ID: PAT_MRT3847_57441C.1
aaacagtacccattttcttgtgtagaaaaaagagagcgagagcagaagagaagagtgcagcgcaagcttagaagagcaaagtgtgtgatgtggttggacattcagtcccaatcacatggcttcttcttctccttctcctccatcttatctcacacaccttcctcttcatccctctcaccaaggtgagagtgagaagcgcgtggaggacgatgaatcgcgcgttccgattcacatcgtgaccgcggcgacgcaacttcccgtcgaatttctggaaccctcgcctcaatccaagctcgtcatcggctttgactgcgagggcgttgacctgtgtcgcaaaggcactctctgcgtaatgcagcttgcatttccggatgctgtgtacttggttgatgcgattgaagggggagaggagcttatcatagcgtgtaagcctgcacttgagtctaattacatcacaaaagtgattcatgattgcaaacgggacagtgaggcattatactttcagtttggcatcaagttgaacaacgtagtggatacccagattgcttattcacttatagaggagcaagaaggacgaaagagattgcgagatgactacatttcatttgttggcctccttgcagatccacgttattgtggcatatcatatgatgagaaggaagaagttcgtgtccttcttcgacaggaccccaagttttggacacacagaccattatctgaacaaatgatccgtgctgctgctgatgatgttcgttttcttctctatatttatcgccaaatgatggagaaattaaatgagcggtctttatggtatcttgcagtccatggtgccttgtattgccgatgtttctgtttgaatagtaacaattttgctgattggccatctctaccttcaattccagtagataacctgaatgctgatggaaatgatctcgaggaagaaattctttcagttcttgatattccccaaggaaagatgggacttgttattgggaaaagaggggcaacaattttgtcaattaagcggtcttgcaatgccgaaattctcacgggaggtcccaagggcccacctgacaaggtcttcatcatcggaccggtgaaggaggtgaggaaagccgaggccatgattcggggtagaatcttggatatatagttaagaaatgtgttacttctctttgaaccaaacttctgcaataaatcatttttctgatccaatagttactagcttactgcctctgatagttggactgagtttttaggggcaggggtctgttgttcaatacttgaaattccttttcccatgcttgtatctactggaaaagagaaaagaaaaaagaaatagttttcttatcaacaaaactgaataatatttgatctggaagatatttattggaattagaaaatagacttgcccatatggattgccacgaaatcaatcagtttggagctctgatgttg

SEQ ID NO: 95715 - DNA, 754 bp, Glycine max
  Clone ID: PAT_MRT3847_57442C.1
ggagtgctcactgggaaatataagaaaggagttataccacccagatagcagattcgctttggaaaattacaaaaatctggcgtcgaggtcgctggttgatgatgtgcttaagaaggttgatggattgaagccaattgcggaagagcttggtgtgccgttgtctcagcttgcaattgcgtggtgtgctgctaatcctaatgtttcctcggttatctgtggtgctacaaaggagtctcagattcaagagaacatgaaagcaatcgatgtcattccattattgactcctgttgtgatggagaagattgaggctgttgttcaaagcaagccaaaacgccctgaatcgtaccgatgaatggaagttttttttaaggcggacacatgcattagatgggaggctccatcatccctgagcaccggagtggaaattcatgttgacatttattggtgtggttgatttgatttcttgagactttgctttttcttattttttcttcctgagactgattatgccttattttttatgggttcaaactttccaaattgattttggaagcaaaggattaagatcttggatttttaggtttacattgttatcattacatgtttttgcttctaggtttggttttgcccccctatgatccatgtatttctttcttacttgcttaacctagttgggattaaatgtctcattgtgatgcttaagcatgcatttttgcttaaaaaaacccggattaaagatctcattgtgatgctt

SEQ ID NO: 95716 - DNA, 1558 bp, Glycine max
  Clone ID: PAT_MRT3847_57443C.1
ccacgcgtccgtgtagaaaaaaaaaaaaaaaagcgagagaagagtgcagagcaagcttagaagagcaaagtgtgtgtgtgatgtagttggacattcattcagttcagtctcaatcacatggcttcttcttctccctctcactcatatctcacacatcttcctcttcatccctctcaccaaggtgatagtgagaagcgcgtggaggacgatgaatcgcgcgttccgattcacatcgtgacggcggcgtcgcaacttcccgtcgaatttctggaaccctcgcctcaatcgaagctcgtcatcggctttgactgcgagggcgttgacttgtgccgcaaaggcactctctgcgtaatgcagcttgcgtttccggatgctgtctacttggttgatgcgattgaagggggagaggagcttatcatagcgtgtaagcctgcacttgagtctaattacatcacaaaagtgattcatgattgcaaacgggacagtgaggcattgtactttcagtttggcatcaagttgaacaacgtagtggatacccagattgcttattcacttatagaggagcaagaaggacgaaagagattgcgagatgactacatttcatttgttggcctccttgcagatccacgttattgtggcaaatcatatgatgagaaggaagaagttcgtgtcctccttcgacaggaccccaagttttggagacacagaccattatctgaacaaatggtccgtgctgctgctgatgatgttcgttttcttctctacatttatcaccaaatgatggagaaattaaatgagcggtctttatggtatctcgcagttcgtggtgtcttgtattgccgatgtttctgtttgaacagtaacaattttgctgattggccatctctacctccgattccagtagataacctgaatgctgatggaagtgatcccaaggaagaaattctttcagttcttgatattccccaaggaaagatgggacttgttattgggaaaagaggggcaacaattttgtcaattaagcagtcttgcaatgccgaaattctcacgggaggtcccaagggcccacctgacaaggtcttcatcatcggaccagtgaaggaggtgaggaaagccgaggccatgatacggggtagaatcttggatatatagttaagatatgtgttatttctctttcaacctaacttttgcaataaatcatttttctgatccaatagttactggcttataggggcaggggtgtgttgttcaatacttaagattccttttcccatgcttgtatctactggaaaagaaaaaaaaaaaagttttgttataaacaaaactgaataatatttgatctggaaggatttgttggacttagaaaaaaaaaaaaaaaaaaaaaaaaaaaaaaaaaaaaaaaaaaaaaaaaaaaaaaacaaaaaaaaaaaaggatccaaagcctaaaataacaaaccatgcaaagtgatagcttttatctagtgtaacctaacataaattaactggccgtcgatttacaacacaacgactgaaataaccataccgttacctaacttaa

SEQ ID NO: 95717 - DNA, 655 bp, Glycine max
  Clone ID: PAT_MRT3847_57444C.1
ctccccacatagacaactttttagggttctgaaataattcccctacctctttctgcttgttcctagcagctttttttccccttgtcttagaaaccatagtacatagatggcgaccgaccaaatgaagcccattgccacccttcttttggggctcaacttctgcatgtatgtcatagtgttaggcattggtggatgggccatgaacagagccatagatcatggctttgttataggtccaggatttgatcttcctgctcatttttcacccatatactttcctatgggaaatgctgccactggattctttgtgacatttgctttgattgctggagttgctggtgttggatcaatcatttcaggagtcaatcatgtccgttcatggacttcagagagcttgccatctgcggcttcagttgcttccattgcgtgggctcttactgttcttgccatgggctttgcctgcaaagagattcagcttaccggcagaaatgctcgcctgaaaacaatggaagcttttatgattatcctttcagctacacagcttttctacatagctgctattcatggtgctgctgcatataggagatgaaattgatggttgagagatgtgatgctgtgattgtcatttttcgtcctcttctcttctttttcttac

SEQ ID NO: 95718 - DNA, 234 bp, Glycine max
  Clone ID: PAT_MRT3847_57445C.1
ccggctcgagaattcactgcaatgaacgacatattaggacaagaagcgatgtgatgtcgagcgcctagagtctgtctcgatcgctgcgaccacttgcctcatacctgtgagcatcctgacatgttgtagagctatccgtggcctgggcgtgagcacacatgacatagcactaggatcgacttgagctcagacaacataggttgacactactaagcttggctactcatcctatca

SEQ ID NO: 95719 - DNA, 2805 bp, Glycine max
  Clone ID: PAT_MRT3847_57446C.1
gtgaattcaaagtcaacttagtccttgtataaaaaatcttcagtcacaaaataattagtaaatagttcttgacgagaatggtagagaacagttttataattaaacatgttatcgaccagctcactacaatgaatgaaatggtgtagcagatggcaggggattcaaattcaaagaggcgtgtcagcagaagcactgaatccaaaaacacacaggacataaacataaacataattgaagggaataataacccaaaagcgcaggtgcaagaacgtgctgcagtttttgaccaacatttctacgatggaatcccattctttgctgatgtatgctttctccacaagtctagctgaatccgaaagaataatccttctagaaccaacgagaaggcttctaccactgcgggtgaagagttctacgacggaatcccgcgcttccccgaggactccttgccgaacaagcctaagtcaaaggtctcagaggtgagtttacgcttgggcaaagctgttactactggaattgctattggattagagaaagcagtagaggttttggacactcttgggagcagcctgacaaatttaaatgtgagcagtgggttttcttctggagctgcaataaaggggaataaaatttctatcttagcatttgaggttgcaaacacaattgtcaaaggttttaatcttctgcaatctctttctgcaaaaagcattaggcatttaaaagaagaggtgcttctttctgtggctgtgcaaaatttagtatcaaaggatatggatgaacttcttaggattgttgcagcagacaagaggcaagagttggaagttttttctaatgaggtgattcgttttggaaatcgttcgaaggatcctcagtggcgcaacttagactgttactttgagaaacaaacccacatgctcaaagatggaaatcctagtaggattagcaaagaattaaatggtcaaagattgtcaagagacgaggcagaagcaataatgcaacaattgatgactttggttcagtttacagctgaattgtaccatgaattacatgctttggatagatttgaacaagatattcagcgcaagggtgaggaggaggagggggatcaaagaggtgatggccttgcattcttgagggcagaaattaaaagtcaaaagaagcaaattagacatttaaagaaaaaatcactctggtgcagaagtttagaggaggttgtgaggaagcttgtagccattgtcctttttttgcatttggagataagcaatgccttgggcaatgcagatgaccatggaccattaactggacatatgagcaattgccaaagattgggccctgcaggccttgctttgcatcatgcaaatatagtgcttcaaattgatactcttgtagacaaatccactatgcctgcaaatacaaaggatgcattatatcaaagcttgcctcctaatataaaattagctctacgttccaaattaccatccctccgtgttgtagaagagataagtgtagcctatatcacatatgagatgcataaaaaattacattggttgtcccccatggccattaacacatccaaagcacataagagatttggttggctaggggagtgggcatactcagggtatgaagtaaaaaagaagactggtgtaatgtggattgagacattctaccatgcagatagagagaaagtggaacattgtattcttgaacttctcttatggcttcatcgcttggccatcagaagtaaggctcacagtgatgctggcaaagtaaggcctgccatcaagtctcctgttggcactgctttgcaaaatacaaatgagcaaatatcattgttaacaattgacgagcaaaacatgctgctggatttaaataagaaaataccaattagacggatcagtaaaagcttggattttgacagtttgaatatcagattcagggagaactgcagattggccaagagtagaagtcattcatcaagtagaagcaaggagatatcttttaataggattttctctaagcttccagtcattgattttgatattgacaaagaaagagcattgaacgtgattgacagactggatgtggtcagataatttgaaagtttgcccgatcgcctttgaaatgaatggaaaggagaaataatacatgtagacatggtagtgggtttcctttctgtgcatatgcaacgttcttgctgcaagcgttgaatgccatatttttgccgcacctttggtactttggattctcattggcttcattagggtgctttgtttcggtgtagttccacttccaggtgatgtagatatctttatatggcaccaaggtaattgttgagacgataggcatttatgcttgtttcaatgtgactgcaaagccctctttagtattggagcggagtggaccggtccattctcgagtgtatatatatatattgaggtaatgaggatatagtgcccaccatcaccattttgcacagcttttatttttgtgggtttggctacccatgttcactgctgaatctagaatttttttattaactatgatttttccacgtctcaatttttacatctactttatgctttttttttaatcgcattgtatatgacatctataaaaaaatttcctttcccacttgaggtgtatgcactcaagggggtgtcaactgtcaagtgattgttattctttcagaaacatagttcttaatattgtgataattgtagggcttgttttgtagtagagatgaacacgatcagagttggatgtcaagtgtgatagtagtagtggtagtcggtgcagcaacat

SEQ ID NO: 95720 - DNA, 498 bp, Glycine max
  Clone ID: PAT_MRT3847_57447C.1
ctcgaggtcggcgtgttttattctatgtaaaggaacatcctgttttcccaaccaacttgaagctccttctaccaaaaccaacagcatcatcatccatggcatctcaaggtcacggtaacaagctcatcgtttcaacatcaccaaagagtgatagtggcggcggcggtggcggcacgggatcattgcccaaaggacagtgcttgtgctcaccaacgacacatgaagggtccttccggtgccgtttgcatcgtgggcatacagcttcaccagctaattggatgaaacgctccaagtccatgcctgccaataagcctgtggtttctgactccacatgctgatgataacaaaaaaaaaactattgtgagttatgtgttcatgtgtacctttatatgatatgatatgaatccttgcttgcaactcttgaattttggcagtgttgattttatatatgctttggaactttgttgttccacctctcgaaaaaaagaaataaaaaaa

SEQ ID NO: 95721 - DNA, 238 bp, Glycine max
  Clone ID: PAT_MRT3847_57448C.1
cttctcacaaaaccttaggtcagatttctaggtctgtcttctctgatcatctgcgactgcagctaagtcattataccgtaggtctcctagcctgcggatctcgaaagtcattgtgttcgcttcgagatctattcccgtgtgattctgtaattaaattgctcaggtgtagtcccattaggttgcaaagcaactcttggcattagctgtgctccgtttcatttcaaaacctgttaggggg

SEQ ID NO: 95722 - DNA, 631 bp, Glycine max
  Clone ID: PAT_MRT3847_57449C.1
aaaaccttctaatccaaatctgaaaatcatgaacagactaatcatgccttggatattcaaagggaaaaaaaattggcatccttagcagttcaaaactctgacccaaagaaaacatctcagttgggttttctcacgggcaaaactggtaaagagaagggtaggaaaaaaaaaaggaaaagtcttggggtcaaattaacaacattgggtgaagtttcaagtagtcaaggaaaaaggggttcaacaattccaaagagggggggtacctcctttccttactcaagggttagtaaatcactaaaagccactttcaataacagttatttttgggagttacaatggtaccttggttgaattggtaccgctttcaaaagttgaaaaaaaaatccttccaaacttacagaatcaaaaatggcgaatggaacaatgaactcgggaacccacaaacttaccaacccaccaaccaggagccaagactatggctaaaacctatgaaacaacgaactcacttacccgttgttaacattctaaagggagaaaagggttgagcacccacgtacctaaatcacgggagtgacaaacccgaactcgtggagccccacacaaaccttaatggcaggttgagtggcatacc

SEQ ID NO: 95723 - DNA, 341 bp, Glycine max
  Clone ID: PAT_MRT3847_5744C.1
cgattatttattttttggtagatgcgtgcatatacgattatttaggttgtggtagatgcgtgcatatatacgattataatgaccttttcagatttatatgaattatcaagaacacttattaagcgattggataagaggcatttgaagcaattccacataagcctttcttggcacgtatgtctcgcttgatcctcatgtaccaaaaaataaataatcgtatatgcacgcataggttgtgctagtactaaaattgcgtgtaaacttttatttcaaccatatataatgagaataagatattgctagtatgaaaaaaaaaaaaattcaaaacacaggccagaggt

SEQ ID NO: 95724 - DNA, 276 bp, Glycine max
  Clone ID: PAT_MRT3847_57450C.1
ctttggagaaagaattgcttctcatgatgacaggtttctactacacttagcggacaaaactggtggcataattgtgacaaatgataatttcagagaatttgtgaatgagtcagtctcttggagagaaattattacaaaaaggctgctgcagtacacgttcgtgggggacatatttatggttcccgatgatcctctgggaagaagtggacctcgattagaggagtttcttcagaaggaagtctgtcttagagatatgcagcccctactcagtgccct

SEQ ID NO: 95725 - DNA, 193 bp, Glycine max
  Clone ID: PAT_MRT3847_57451C.1
tctcgtttcgcaaatccaaggaggagaatggaggtttttttgtgtatgtcacccttgtgctgtgcggttgctctgctggtaaggtgtgcacaaacattcctactcgatcaccatcctaaggtaccagcttttgacatccatgaatgaacggttggaggaagaggccatgtctcaccttcatttgacgccaacg

SEQ ID NO: 95726 - DNA, 621 bp, Glycine max
  unsure (1)..(621): unsure at all n locations
  Clone ID: PAT_MRT3847_57452C.1
ggtaacgccctggcgcgccccgggtccggacctcccgggtcgacccacgcgtccgcttgtggtactaagctgtccctcttgatgaaactatttttgtcttgcatcactactctcataaagagtggcctctcaggctctaaaactagaacaacaaacccttctccttctttctcattagtgtgagatgatgatgatgatgaagaagaaggacgcagcatactcctccattctcacactactcctcattgccacactactctccctaaccgtgtctgcctcttcactctccgacgccgaagcaatgtacgtcaaacaacgccagcttctctactaccgagacgagttcggcgaccgaggtgagaatgtcatcgttgacccttctcttgctttcgaaaatgaccgtctcagaaacgcttatatagccttgcaagcttggaagcaagccattttgtctgatccccgtaaccagacagccgattgggttggatccgacgtgtgcagttacaccggagtttactgtgctcccgctctggacatccccaagatccgnaccggtgccggcattgatctcanccattgngacattggcgggtatttacccgaagagctggagttggttgt

SEQ ID NO: 95727 - DNA, 268 bp, Glycine max
  Clone ID: PAT_MRT3847_57453C.1
tctgtgacgttgccctattcaattactctatctctctctctatctctgtcgcgatcggctttgccctagaaaatactatactagagagacatcgattgcgtgaaacaagatccgtgaagattgcatcaaagagagagcatggagcgtgattgcagaggaatcgcgtcccatgcacactgacgtccggacgtcaaaggcctgtgagtatcgggattacctaccagcttatcatcctcgtaatgttgctgaagcagattcccccttggat

SEQ ID NO: 95728 - DNA, 455 bp, Glycine max
  Clone ID: PAT_MRT3847_57454C.1
catcgagctctacaattacattacatgctacactgaatatattaacctacatgcatggatcagagatctagagactcacaagaagatcactttataataataatatttaagccataactgcttaaaatttgataggcctaccccaacgattctggggttttcccctagggaggtttgcaacaggtactccatagtttacaacatctttgtttttccgaggcttttgatccatgtcgccattagggacttgatgaaccacccaaaagccttctcgtcggccggggaacgcatcattgttggcagggccccttcgaccgtagagcttgtctattaaatcgaagccttctagagcaatctttctgaggtctgtttgaggtgatcccatggatagtatatgcgtgtgttgaattcaggagtagcagaatatggccaatgtatatagttgctggtttttg

SEQ ID NO: 95729 - DNA, 638 bp, Glycine max
  Clone ID: PAT_MRT3847_57455C.1
tgggtccctcgggcgggccggggatattaaagcaatcttctccatcccagctcacagattatttggtctgtagttttacctcgatggcttcattgggcaaacttccttaccagagactgagaaatgaagaagaactggacgaagaagcactagaattacaaagagaagtgaaaaaagcaagggcgtggcttaagcttagggctctagcaggtagaagaaggccaaggcttcgtgttgcagccttgaggagattccttagaaaaagaaccaagtttctctctagattcagagtctcatggcgcaaggcgttgaagaaattgaataatggccagagtcatgtgaatgatctctttggaggcaattttctgttaatgcaaggcaatcttactccttttggatgtggtaagaaaccttattacatgggttatggccttcaaggattatcgacaacgatcgcctaataaattttgctttcatgcatgctataagaggaattattatattcctatatattactcttttgtatagttatttctactaagataaaaataaaataaaattgaaatgatgattgatgtcatagatggatattataaacatgtttgtaaaaataaaatgatgatatttttttccttacg

SEQ ID NO: 95730 - DNA, 370 bp, Glycine max
  Clone ID: PAT_MRT3847_57456C.1
tgaagactttttgtttattatacttaaagaacttctgccacatcgaccagaactgaacctgatttcgatgactgctaccctagcatgctgcgctcttctcttcatactctaatgccgccccaattagtgttaatttccgaggactttacatacacccgttatgaactcacatcttctccgagaacatcactgtgaagcatgacgggctacaggatcaacgtccttataatcaagccatcatcatgcccactcaaaggatgccggacaacgatcaaacctgccccacgactgagaagaagccacatcgctcctgctctacaggatgcttctatggcagccgatctccaaagattacacgcctacagacacc

SEQ ID NO: 95731 - DNA, 537 bp, Glycine max
  Clone ID: PAT_MRT3847_57457C.1
gtatagtatatttatagacattttatttaaaactaaatacagtacagtacaacgtttaaaatggcatacaatgttttagaacatacaataaaaattgggcagtttgtgagcaattatagattaccatgaaacacaaatctcagtcgtttagtcgaattactggtatatttagaatttaattacaaatcacaatggaatggcactgtttgtacacattttacacaagagcacttcttgtgtaaagtcccctcttctttcacagccatttcgaacgcacgaagggttcgataccttctgacttgagtcgtgacagtattgggcggtaaatttcgcggctgaatggcaaaaccatgccgtggctctggatctctccgtcaagcaccatcttggcggcgatggcggcggggaagcccaccgtcctggccatggccgagtggccgtgggggtcgccgtaggtcaccaggttgatgccgcgcagctctcggggaccgtccgggcccaggatgtccacgtcgtgcctcaagatcacgatgtccc

SEQ ID NO: 95732 - DNA, 445 bp, Glycine max
  Clone ID: PAT_MRT3847_57458C.1
gaactgagtttacacctgctgtacgagattataaccgagaagctcacagaaggagattgtcaacagaaagcattagaagtgacttaagttctctaaggaatactgaaacatcaaatttaactacgaccactttggttcaggatgcttcacataaccttgctgggagccatgaagtctcaagaaattcagatttatttttgacttttccattggatgagcggcacaagttgaacaaaattcttaatacccagaaacagagattggtcactgcaaaagctgatgttgaagatcttatagcaagattgaatcaagaaatggctgcaagacaatatcttgtgacaaacgtcaaagatttggaagttgaacttgaaacaactcgactgaactgccgagaaaacatgcagcatgctgttttgactgaaaaagaaagggttacacaaatgca

SEQ ID NO: 95733 - DNA, 388 bp, Glycine max
  Clone ID: PAT_MRT3847_57459C.1
gggagaaaacaacgaacacttccttttttggagttttacataggaagtatcctacgaaaaggacctcttgaagggggaccatgcgtactggaacactatttgatagctaacattgtagaggggcagattttttttttttttaccctaaaaaaatacgtattacaaatttgaaaaccaattgaaatttgagtcaccgtcaaaagaatcatggggaatcttgaaagccttgagtaacacttttaacatgccttgcaacttttaatgcaacagccagaaaggcccggtgatccaaccctataagtgggattaccaatgcattctccaaggggagcccaactatcacaggtttcttgcttatcattggaagcccccccatctgccaccattt

SEQ ID NO: 95734 - DNA, 574 bp, Glycine max
  Clone ID: PAT_MRT3847_5745C.1
gaaattgggtcttacttttaaccgtgaacagaaggaaggaggggaatagatggaactttgtgtggaaatggaaacaatggttgggacacatacttccttacacgcttacccaagatcacaactcctttattccgcgccaggtaccaagacctaacagcattttcttcacaatcccttcctttcttctatcaaccctgtcgctatgctaatgctaaaacccttcgggccaaaaacttcttcaaacccattttcctttcccacttaaatgctttttttgaacaaggtgaccaaacttacattatgggggaagccggacgcgtccaacgtggccttgtgggaaaaaatatttctaaggttggaaaaaaagggtttaaagttactggctttgagccttttcagcgctcaaagaattgccgagagcatacacgacctaaacaaagcattttcctagctgatgctatatactcagtctgtggtgatgctaggagtgtgagtatgatagcccagctatagctcaatctttatctgacagccatagagagactgtgtcacagaagatgtgtatgagtgcacc

SEQ ID NO: 95735 - DNA, 1418 bp, Glycine max
  Clone ID: PAT_MRT3847_57460C.1
ccactagctattccggctgcgagaagacgacagaaggggattgcatttgagctcaagtcattttttttcctctcactcactagtattttttatgtcttgtttcttgaaactacaagaagggtcttttctctttttctatttatctcatctcacaccctttaatgtaacctagagagaatcaaaataataccactttcttagtttcaaactcaacttttgagggtcttttctctattaaaaacacacaagagttttagtcttttagctaacagtgttcatatgatgaatgcttcaaagttcattaaatgtgttactgttggagatggagctgttgggaaaacctgcatgctcatttgctacaccagcaacaagttccccactgattacataccaacagtatttgacaatttcagtgccaatgttgctgtggatggaagcattgtcaatttggggctatgggacacagcaggccaggaagactatagcaggttgaggccactgagctatagaggagcagacatttttgtcttagcattctcactgattagcagagctagctatgaaaatgttctcaagaagtggatgccggaattgcgtagatttgcacctaatgttccaattgttcttgttggtacgaagctagatcttcgtgaagaccggggttatgtagctgatcacatgggatctaatgtcataacatctgctgagggggaagaactgaggaaacaaattggtgcagctgcttacattgagtgcagttcaaagactcaacagaatgtcaaagcagtgtttgacactgcaattaaggttgttctccaacctcaacctccaaggaggaaagaaatggcaaggaagaaaaggcatagaaggtctggttgctcatttgtaagtattatgtgcggaggctgtgctgcttaatacgcacatcaattgcaccgtcacttacttttgaactggatgttattttgcaaaagcttcaagatctaagtgtggaaaccctgacatctgatcgcatatctaaatgtatccttatgcttgtattgtaacttatgtaagatgtaagatagtaatatccagttatttccactttacattttacaagaccctattagacactgaagggaatttttcattctctcagttatgtatttattttatattgccaatttttgccattttttccttgaaaaaaaaaaaaaaaaaagcggccgctctagaggatccattccagaggatatataatgatttctcagcagcagcattccaaaatctcagatatccatttttatagggagaaaaaaaaagtgacatgttctctctcactaacttagaaaactatgaagaacaatttctcgttccttgacattttgcattagaataaaaaagatctttttctgagtttgcagttggttctgcaa

SEQ ID NO: 95736 - DNA, 978 bp, Glycine max
  Clone ID: PAT_MRT3847_57461C.1
atttgctacaccagcaacaagttccccactgtaagtccctcaaaaaaataataagaccccatccatcaaagatgcttcttttatccattaagctcccttgttttcattttttgaaatttggaggtatttcatctgaatggtacttttctgttcagactcacactgattacataccaacagtatttgacaatttcagtgccaatgtagctgtggatggaagcattgtcaatttggggctatgggacacagcaggccaggaagactatagcaggttgaggccactgagctatagaggagcagacatttttgtcttagcattctcactgattagcagagctagctatgaaaatgttctcaagaagtggatgccggaattgcgtagatttgcacctaatgttccaattgttcttgttggtacaaagttagatcttcgtgaagaccggggttatgtagctgatcacatgggatctagcgtcataacatctgctgagggggaagaactgaggaaacaaattggtgcagcagcttacatagagtgcagttcaaagactcaacagaatgtcaaagcagtgtttgacactgcaattaaggttgttctccaacctccaaggaggaaagaaatggctaggaagaaaaggcataggaggtctggttgctcatttgtaagtatcatgtgtggaggctgtgctgcttaataaacatcaattgcaccgtgacttacttttgatatggatgctgttttgcaaaagcttcaaggtccaagagtggaaaccctgacatctgatcacaatgtctaaatgtatccttatgcttgtattgtaactggtgtaagatagtaatatctagttattttcactttacagtttacaggaccctattaggcacagtgaagggaatttttcattctcagttgttacttaggcgtgctatgtatttattatatattaccaatttttgttaaaggaggaagagaaaagg

SEQ ID NO: 95737 - DNA, 307 bp, Glycine max
  Clone ID: PAT_MRT3847_57462C.1
gcgttcgtaaaagtgcgagcccagagagaacgcgggctggggagcccgtccgcagcaggagaaaagaccgcctagagggctggatgaggcggcgaaacaaagccaaaaggacgagaccaaccgtgaggggcgcgtggccccaagaccagaagagggggggtgcgaatgacgaaaacaggggtgaagaaggaaaagcaaccagcctgctgataagaaaaccccgctggtgccgcccctgggcaccgatggcccgcgggaaaaacaacaaccgggcgtccgggctggagcaacaagggaacccaaagaa

SEQ ID NO: 95738 - DNA, 595 bp, Glycine max
  Clone ID: PAT_MRT3847_57463C.1
cggggaacttgttaccgtcgagacggagagtgaggaggtgggtcaagtggctgaccgtcgccggtatctcgccggagaagttgttgttggacagatcgagacggtagaggcggaagagcgacttgacggtcgccggaaactcgccggagaaggcattgcgagataggaagagaagttttagagcggtgaggttggagaggtttggaacgggaccggagaaacggtttcctttgagactcagaactcggagctgagtcagagaggttaaggggtgaatggaaccttctaggtcgaggttttcgagaacgagtcgcgagactcggtcgcgaatgcacgacacgcccttccaggaacacgggttagtgctgttaatgttccatgttgtgagcttttgggatgtgtctgaagcggttttgaaggacaaaagagcgtcgaaatcagggttactaaaaccttgaaccatgagaagaagaagaagaagaataagaaaatggaaaacagcaacgaggtgagagagtgttgctgccattgttgttctcacagagagaaagaggagtgaggggtgaagactgaagagggtgggtgttttgtgttt

SEQ ID NO: 95739 - DNA, 310 bp, Glycine max
  Clone ID: PAT_MRT3847_57464C.1
aaaacccatacaaaaaaacgtttaatgaaatacaaacatttataacaaggggaaaccaaaatttccccaggggaaaatttaacccttaaaaacatcttaaaaaacaaccagagaacggaatttattattgctaaaagtaaaggcaagcgttttgaaccattatgcccaaaacacccaaaaacaggattaaggggggccagttttacaagcttttttcaaaggaaggcgttctaaggggtgataaaagcaaatccgttccctacgggcccttaggggtaaagccccatcaaaaggtttgggactaaaacgg

SEQ ID NO: 95740 - DNA, 308 bp, Glycine max
  Clone ID: PAT_MRT3847_57465C.1
ctcgatattggactcctgtctgttggaatctgcaacaactcccaccttgggttacggcttaaatacttcctaacggttctcggctcatttgatctcgacacaaatgaaaaagtatttacctctgggacactggtgtctaaaatcgtctcaatataaagggagacccacaacagtctcgcgcgccctttcctcatcatgtgatgcctgcgcaaacagtggggcttaaaccatgaaatggagagcagagaagcattctcagaagggaactggaactcaatttgaacctgagggggcatggaatgtaattg

SEQ ID NO: 95741 - DNA, 1207 bp, Glycine max
  Clone ID: PAT_MRT3847_57466C.1
aagctcggaaagcgggtcgagtgcttggaaagggtaggttttggactgcttacagagcggtgctcgatgatggaaatgtggttgcggtgaagagactcaaggacgcgcagattacagggaagagggaatttgagcaacacatggaattgttgggaaggttgagacatcccaatgttgttagtttgagggcttactatttcgcgcgcgaggagaagttgttggtctatgattacatgcccaatgccaccttgttctggctccttcacgggaaccgaggacccggacgaaccccactagactggaccacgaggctgaagatagccgtgggagcggcgcgaggtgtggctttcattcataactcgtgcaagtcccttaaactcacccacggtaacatcaaatccaccaacgtcttactcgacaagcagggaaatgcacgcgtgtctgattttgggctctccgtgttcgcgggcccaggcccagtgggtggcagatccaacggctaccgcgctccggaggcatcggagggtcgaaaacagacgcagaagtctgacgtgtactctttcggtgtgctcctgctggagctgctcacagggaagtgtccctccgtggtggagagtggagggagtgcttacggcggggtggtggacctaccaaggtgggtccagtcagtggtgagggaagagtggaccgctgaggtgtttgatttggagctgatgaggtataaggatattgaggaggagatggtggggctgcttcagattgcgatgacgtgtaccgcgcctgcacccgatcaacggcccaggatgacccacgtgctcaagatgattgaggagttgcgtggggtcgaggtgtcgccatgtcatgactccttggattcggtgtctgagtctccttccttgtctgaagatgcgtgtggaacaaccagtcagtgattttaggactaggttctattggcggcttttgtttttctaattatttttaatctcctatgcaaatccttttgcctgttctcctgaatatgtcaagattaattttcgttcaaggttttcggctaattattaaagctattatgtgaaatgatgattgtaggggttattaattaattaattgggctctaattgaggtaaagggtgtaggttggtgaagacattgctgggtcagttcaataatgattgacgtggccttgaatgaaatcggtttcaaaaaa

SEQ ID NO: 95742 - DNA, 244 bp, Glycine max
  unsure (1)..(244): unsure at all n locations
  Clone ID: PAT_MRT3847_57467C.1
agcaaanangcgaagacccctttttcnggttattnncagagtcatccnanncccangtctnctangctctgtagctcnnatggtnggctantattntcngacctttgggttggggttgtnatggcttgcgcaagcgataggttgatnagcttgactgcacttgaatctctgtagtctcatgagnngcntatgatcggntgaatgtggtgnaaatagtgggntaggngtgaacnttanngccggc

SEQ ID NO: 95743 - DNA, 353 bp, Glycine max
  Clone ID: PAT_MRT3847_57468C.1
ctgctggtcccgctcgcgccgtcccggatttaccgacgcgtccactttctcctttttcgtactgcgatcgagaattgtatttgcacagaccaaatgtggcccgcctatagagaaggaatgctgtatttcatattgttagtgatgggaaaggctgatgagcctaccataacacaggtttgtgagttccatgcgaggcaaaggatggtgattgctcccgcttcaaaggatcaggttgatctactgcggagcattgatagggtgggcttaccaggagcaggtagtggttttaccaagacgaatgcttctgctgagcatgtggtagcgactaacacactcaatttctgtgatggaag

SEQ ID NO: 95744 - DNA, 1275 bp, Glycine max
  Clone ID: PAT_MRT3847_57469C.1
tacggcctctcctactatctttaaatccttttgtaccctcaacttccctaagcactagcacaacccctctctcctactatcttttaaatccttttgtaccctcaactccataagccactagtacctcacaatgcccattgtagcaacctctcttctcttctttcttcttaatttatgcctcagaggcacttatgctgactatggaggtggttggcaaggtggtcatgccacattttatggtggaggtgatgcatctggcacaatgggaggggcttgtggatatggaaatttgtacagccaagggtatggcactaacactgcagcactcagcactgctctattcaacaatggcatgagttgcgggtcttgctatgagatgaaatgtgacactgaccccaaatggtgcctccccggtagcataatcgttactgccacaaacttctgcccccctaactttgcattggctaacaacaatggtggctggtgcaaccctcctttgcaacactttgatcttgctgagcctgctttcttgcaaattgctcaatacaaagctggaattgttccagtttccttcagaagagtctcctgtgtgaagaaaggagggatcaggttcaccatcaatggtcactcttacttcaacttggttctcatcacaaatgttggtggagctggagatgttcattctgtgtccatcaaagggtctagaactgggtggcaaaccatgtctagaaactgggggcagaattggcaaagcaactcctacctgaatggccaaagcctctcttttcaggtcactacaagtgatggcaggactctcactagcaacaacattgtgcctgctaactggcaatttggacaaacatttgaaggggcacagttctaggaaccttaatgatttttaagtacacattaatttgtgtgtaatatatgatggcattgttcactagtttttgttatagttggaaagggtggggaaagagaagaaacgaaggtagattaggaggagtttctggccaacatggcccctaatgctgtggtggctatatggcacccgctaggcctaatataatatatagtcttttattttatatctatcatctcattgataaatgccttttgatgaagtaaaaggtgttgatgatctcaattgccttgtatatttgatcccccacaatatatggtacaaaaaccaatttgggggcgatttaatatcaagttgaatatgctttttgattacaagtcaaaaaaaaaaaaaaaaaaaaaaaaaagggaagg

SEQ ID NO: 95745 - DNA, 468 bp, Glycine max
  Clone ID: PAT_MRT3847_5746C.1
ttgttttttttttttttttttttttgattattttgtttttattttttttctttgtattgtttattataaatgttacatttgtatttacaatgcataatgacttttgttcagtgttttttttttataaaaaaaaaaagtaaaacggatatatacacatacgcaaagatcccatcacgctgaaaagaaaaactatagaaccccaatggcgtaagagagaacgtcggaaacagcagccgcatggaaggtgcagacccgtaataagcggggaaaaaacaacgggggcaaaaaaaggggggggcgaaaaaaccggcgcttcttaaaagaaaagtttttttgaaaagaggcccccataaaaaaaacgggacttttttacacaacatagcaaaggggccgaggggggacaaaactccgggaaaaaccccaccaaaagtcttcaatggagcgaacccatgcgggggttcttacggg

SEQ ID NO: 95746 - DNA, 462 bp, Glycine max
  Clone ID: PAT_MRT3847_57470C.1
gcgagaagacgacagaaggggggcctagggtatcacttatcattcattagtgtaactaaaaagccagaaagatagagaaaattaataaaatcgaagtgaactgctaatcattgagatctcatatcacttgtaattaattaagaaaaggaaaaaggaaaaaggaacgcaaacgaaaagacataaactaaactgaactatgagcattcgaattgtccaaaccttttaccctttccagtttgataaatgatgtaatcctattttagaaggctgccgtacagctggaagtttatgcttttatgcatggatgggattttttttaaaaaaaaatcttaaaataaagtactcaaatttaaaactaataaattaaaaataattttatacccgttaattcacgtactcaacgataattgcacggaagttgtataaaattaacgtgactcgatttatcatattctctaactt

SEQ ID NO: 95747 - DNA, 560 bp, Glycine max
  Clone ID: PAT_MRT3847_57471C.1
cactaggccgaaaacaataaaagctctttacattgataagttcccttaaactttgaaaaaggcctttgcataaaaccacattgtttcgaggagcaaaacctgtttacctatctatggtctctttcaaagtgagcaacccttagagccccaagaggcattagcacttaaattaaacataactcccagaaccttgtatggaaccactctaactaaaaatataaggacttacgatcctgaggcaaaatttactacattgtgattcatatcatgacttaagatcatcagacattgctgatggaatacagcccgttgcaggactatcaagataccctggttttgcagtcttcatgccaagcacctcgatctcgtcataatctagatcaaattttagatattcttcatggcacctctctaccatagagcctaggctcttcacgctttacactggttgaccattgaaagcacggacctgcgtgtgaacaatatcttgatctccaatgtcgatatcagccaccctcacctgtaagaccacgacaagttgctcatccggagattgcggc

SEQ ID NO: 95748 - DNA, 180 bp, Glycine max
  Clone ID: PAT_MRT3847_57472C.1
tacggctgcaggtcacgacagaatggtaccgctgctaaaacacgacagtaaggggttcatgttttatgctgtggaaaaaatgaatacgttccttgctggggggttttggtagttttacaactttggacgcctttttacaactgttgggtttgatgttgttttaactcaaccttttttgtt

SEQ ID NO: 95749 - DNA, 1170 bp, Glycine max
  unsure (1)..(1170): unsure at all n locations
  Clone ID: PAT_MRT3847_57473C.1
ggacgcgcggggtcggggtggtcaagtggctccattcaccaagcgtccggtgaacgaagttccactttttttttcttgtactttttgctttatgattcttctattcctaaccagaatcattttaagttgaaaagtttctgaaatctcagttacacagtgtacaatcactagcatcagccaaaaagcctagtgtgctgttatctttctcctgtttggatatttgcttttgcatttgcatttggggctgcaaactttggcttattctttagatttttttgagtttgtttgtttgcttggttgcatctgaaagatataacccgaacttttaagtataggggagatttttgttgatgggtgcttgttggagcagtaggattaaggccgttagtccttccaatacagggttcacttctagaagcgtcagcagagatggccatgacatccagtcaagtagcaggaactcatcagcttccatacccatgacccctcggagcgagggagagatcttacaattttccaatttaaaaagctacagctacaatgagctaaaaatggccacaaaaaatttctgcccagatagtgtcctaggagagggtggatttggttcagttttcaagggctggattgatgaacattcgcttgctgttaccagacccggaacaggcatggttattgccgtgaagaaacttaaccaagacagtttccagggtcacaaggaatggttggctgaaatcaactatcttggccaactgcaaaatcctaatcttgtgaagttgataggctactgcttagaggatcagcaccggcttctagtttatgagtatatgcccaaaggcagtgtggagaatcatctgttcagtttcttatctcattagcagcagctttcttggactttgagattgaaaatatcccttggggctgcaaggggtcttgcttttctccatagcacagaaactaaagtcatataccgtgactttaagacttccaatatccttcttgatactaactantatgccaaactttctgattttgggctgggccagagatggaccnacctggtgataaaagccatgtttctacttanggtcatggggaacccatgggatatgcagcacccagagtatctagcaacaggtcacctcactgccaagagtgatgtctattagtttg

SEQ ID NO: 95750 - DNA, 773 bp, Glycine max
  Clone ID: PAT_MRT3847_57474C.1
accagactatccggtggcgtatccaagctgccatgcctgtgctccctccctctatacggtgctctttctcatgccagctgccaactgttccagcttctgctcttgcatctcttcaacccagcactacaaattctgggtttaactccagctgttcaactgtccctcagaggaacctggtttcatcgtcaaggactacagcatcagggaggtcgaaactgcaggacaatgattcggatgttgacccttggacacttttagaagatggcgctggatcttgttcatctgcaagtaatactgctatcataggaagcggtgaccgtgttaatattcgagctgctagctggcttaaaggggctgtaagggtgcgacgaactgacctttcatatgttggtgccgtggacgaggatagttgatttacaagattttttattggttgggagtatgcaaaccccttatcaggtgtatttgttgtttcattgtccgttattgatggcatgactggcatgaagatgtcattttgtgcttgcccttcctgtgttgaagggaagttgaggggtcatcaatttgagaaacaggtgaagggatgttttctttgttgaagagaagtgaaggttctagcctggttgactaactaacctgttgatcaccccaccctggacctgtgcacttgcagacacagttcagtggtttgttgtatatataggatcattgtttcaactttcccaatttatttgatgatatatctcaaatggtctgttgttccgttctaattt

SEQ ID NO: 95751 - DNA, 3694 bp, Glycine max
  Clone ID: PAT_MRT3847_57475C.1
gccagacgaccaacacctgcaccagattcttctccactttctcctgctgctatttactttatttgtctgaccttcagtcacaggagtacttgctgttggcttacttggtcctcgagtaactaaagttatttgttgctcaatataatttaattgtttgatcaaatcgcttgcaaaggaattacgagattcatcagagctttgatctatgcaaggaagaattaactcaagaagagccctctcagtcccatgctgctgcttactggttgagctttcagagtcaaacacttgggagaacccttttatggaccttttcacatccattccctcttcagcaacttctccttcttcaagaggcatagaatcaactttcattttatcccccttgacagcaactggatctttacatggggtgcaccaacccccagggttctgaaaactgtgtcttaacagaaaatcttttagtctctgcaatgttaatcagtcgttgcttaatggtcttccgaccaaagaggacatcttgacctgcaaggaaccatttagcctgtaacaacattgaatcctctagtgacttcccaaaaagatgaaccaactccgagaaaaggggtgcagcatcaggtctaaccagtaacctagtgagaattatttcaataaaattgttctcgttctcagaagcagtgcccttctctgaactaggtgaggacaactgtatagcatcagctaaagacatatcatgtgtcttcagtttttcaatgagggcttgttcatttaaaagcagccttagttcaacccattgccagtgaaacttggcaggctgcagagcatctaacacatctacaagtttatcccgaagtgtagattcactatcagtaaaatcaattttggattcaccatgtccagaattccggcttccttcatcctttgtataaatagagtgaggcatcttacaatcatcatggcatttaagaaaatgtctagcacggagcggaacaaatgccagagattttgaatgcatatcagacccattcaactctagcaaggttgcaaactctgcatcacttgtatctgcagccataagatcataaaggccctgacactctcttaagcatacatctcggaacggcaaatgttttattgcatcacttatggccattgttagagactggtaaagttgattcatgtcttcacgaactgctacattggccgttccgagatgtatgcttaagagagtgtcagggtctttatgatcttatggctgcagatacaagtgatgcagagtttgcaaccttgctagagttgaatggctctgatatgcattcaaaatctctggcatttgttccgctccgtgccagacatattctaaatgccatgattgattgtaagatgcctcaatctatttatacaaaggatgaaggaagtcggaattatggacatggtgaatccaaaattgattttaccgatagtgaatctacacttcaggataaacttgtagatgtgttagatgctctgcagcctgccaaatttcactggcaatgggttgaactcaggctgcttttaaatgaacaagccctcattgaaaaactgaagacacatgatatgtctttagctgatgctatacagttgtcctcacctagttcagagaaaggtgctgcttctgagaatgagaacaattttattgaaataattctcactaggttactggttagacctgatgctgcaccccttttctcggagttggttcatctttttgggaagtctttagaggattcaatgttgttacaggctaaatggttccttgcaggtcaagatgttctctttggtcggaagaccattaagcaacgactgattaacattgcagagactaaaagattttctgttaagacccagttttctgaaccctggggttggtgctccccatgtaaaaatccagttgctctcaagggggataaaatgaaagttgatcctatgcctcttgaagaaggagaagttgctgaagagggaatggatgcgaaaaggtccataaaagggttctcccaagtgtttgactctgaaagctcaaccagtaagcagcagcatgggaccgagagggctcttcttgagttaattcttccttgcatagatcaaagctctgatgaatctcgtaattcctttgcaagcgatttgatcaaacaattaaattatattgagcaacaaataactttagttactcgaggaccaagtaagccaacagcaagtactcctgtgactgaaggtcagacaaataaagtaaatagccgcaaaactataagaggtggcagccctgggttagccagacgaccaacacctgcaccagattcttctccactttctcctgctgctttgcgagcatcaatatctttacgtgtgcagttactcatgagatttcttcctattctttgctcagacggggagtcttctgcaaggagcatgagatacatgcttgcctctgtacttcttcgtctccttggcagccgggttgtgcatgaggatgcaacggtgaatcccatgcactatactccattgagaagggaggcagagtcacatgctgaagcttcttttgtagattcttctgctgagggcctgtttgatcatctgctgttgattttgcatggattgttgagtagttctcctccaagttggctcaggtcaaaacctgtttcaaagacaactaatgaacctacaagggaattttctggatttgaacgtgagccattggaggcattgcagaatcatcttgataatatgcaactgccagacactatccggaggcgtatccaagcagcaatgcctctgctccctccctctatacggtgctctttctcatgccagctgccaactgttccagcttctgctcttgtatctcttcaacccaacactacaaattctgggtttaactccggcagttcaactgtccctcagaggaacctggttccatcatcaaggactacaacctcagggaagtcaaaacagcatgacaatgatttggatgttgacccttggacgcttttagaagatggtgctggatcttgtccgtctgcaagtaatactgatatcataggaagtggtgaccgtgttaatattcgagctgccagctggcttaaaggggctgtaagggtgcgacgaactgaccttacatatgttggtgccgtggatgaggataattgattaacaagattttttattggtttggagtatgctaacccctcatcaggtgtatttgttgtttcattgtccattattgatggcatgactggcatgaagatgtcatttggtatttgcccttcctgtgttgaagggaagttgaggggtcgtcaatttgagaaacaggtgaaagggatgttttctttgttgaagaaaagtgaagttgatgtcctggcaagctcatcctgttggttctagcctggttgactaactaacctgttgatcaccctaccctggacttgtgcacttccagacacagttcagtggtttgttgtaaatataggatcattgtttcaactttcccaatttatttgataatatatctcaaatgatctgtagttgttccgtctaagcgataatatatcccaatttatttgatgtcctggtaaagtttgtttttagtctttaaaaaacaatttgtttcatttgtgaaaacgtgttagatgtgatatttattcatataattaaattgtctccc

SEQ ID NO: 95752 - DNA, 363 bp, Glycine max
  Clone ID: PAT_MRT3847_57476C.1
aaaaggaaggccaaaccaacactgaaaaaacccgggtcggaaaccagcggggtaaaactttaaggaacatttatgaacagttcccaaaaagaagattcctttaataacccaaaaagaaaaaggggatgggggacaaaaagttggccgggatgaaacatttttttggggttttaccaaaggtaaaaccttttgttataaccgggaccgcattttttataaagggccccagggccaaccagcccctcgggtaggttaacttctttatgggccttgaaaactttcgggacccggcaaaaaattaggggtaaaatcaggaaaaaagcctggtcatgccgggggtttttttgaacctgggttggaaca

SEQ ID NO: 95753 - DNA, 636 bp, Glycine max
  Clone ID: PAT_MRT3847_57477C.1
caaattataaaaacccccacatactaatgcatctatatcacgaacagaagatcgaattacattaagaaagccccaaaaaaagatgtcgtccgagtgcaaaggtaagagctcatggcctgagttggttggagtggaaggaacggtggcggtggctacaattgagagggagaatcctttggtggacgctaacactgtgctgaaaggaaccatagtcacccctgatttccgatgtgatagggtttgggtttgggtcaccaaagacggaattgtttatcaggttccaacaattggataagaagtgtttacactaaagcacacttcatatgatgatctaagaagtcatgaatataatatttaaataaggagttattcttccaactatgttacttgattgaaaataaaaacaagcttataagaaacttctttttcttatttttagttatgttctgcactgcaaataaatatacaaactgtgtgtttctttttctttttgtacgcaataaatcatttatctccatttgtatattgtttttcttcctttttttattgctggttaagcaacttaatctgatataataaaaattgtgttctgactaatgaataaaatttttaatattatttgatcaatctgtcatt

SEQ ID NO: 95754 - DNA, 728 bp, Glycine max
  Clone ID: PAT_MRT3847_57478C.1
gggagcagatagtaggtgaagaagttctcaagagttttctgggacggagaccaaaaccaactttgaactggcatggcaactataggaattggagtaggagtgacaaagcttcaacaaccccacagaccaaagtctaagtccttgtttcttggacagaggcttagaattagtcccttttggggggagcctcaatgcagtgaaagaagactattcggtgtctcaaacccaccaagagtggttcaagtttttgcactagggggtggtgaatggcttgacacagttcataatctctttgtgggtgttggggttggacttccttgcagtgtgatgcagtgtggtgatgtgatctatcggagcactcttcctaagtccaatggcttgacactcactgtccctggggtgattctggctttggggacagtcaaatggcttgacactcactgtccctggggtgattttggctttggggaccctatcttacctttgggccacacctggtgtggcacctggtttctttgacatgtttgttcttgcttttgttgagaggctgttcagacccacttacaagaaggatgattttgttctggggaagatgttgggggagggatcatttggagttgtttatagagtgtctctggccaacaaaccctcttcaaaggaaggtgacttagtcttgaagaaggcaactgattatggtgctgaagaaatttggatgaatgagcgtgtac

SEQ ID NO: 95755 - DNA, 406 bp, Glycine max
  Clone ID: PAT_MRT3847_57479C.1
gctaaatcatagtacggaggagtgacaaatacttacagaatccaaagctttttttttctggggcttcttcttcttggtaacgccatgtctgcgacccaccaagagcagccactggtagagaactcggtcatagaataagacgagctcgaagaaacagcttatgattcggcagacaagatagtggtggttggagcctacgagtacgatgacgatgagaattgggggagagcgccccaaatctcgcggaagaagctatggctgtacaccggcccgggctttctgaggagcatagagttcctggaccatggaaacatagagggggaccttcaggcgggtgccattgcatggtactcattgtcgcggcttgagatgcgggccacaagaatgggcctgctgatccagctcc

SEQ ID NO: 95756 - DNA, 221 bp, Glycine max
  Clone ID: PAT_MRT3847_5747C.1
tggctaccgattcctttccaggaaggtttcccgtcatcactgtatgacgtcctccttctttgggggggggggggggtagtaaaatgttagtatcgcgatgaacctaatagcatacagggagatgtgggccatgtgtacaagctacgtgttgactcaacgctaatgccgaaaggcttagagttcagcaacccgtgaaatgacgtggtacagtttatcacgaa

SEQ ID NO: 95757 - DNA, 353 bp, Glycine max
  Clone ID: PAT_MRT3847_57480C.1
cccattcttccgcccacgcgtccgaaaaaaaaaagggagaaaataaaaaacaaaaaagggggtatataacactaataatatagaaaacaaaaaacttggaaagggcgggcccctccagagaggtccaacttctgtgcacgggtttataacccatgaattcttttattgcgccgcctcgattgataagacgacccctgtgatcacaccatcttcagtggggaaacactgaggggaccgaccttaattgttgtggagcaaattccccttttttatgacgcggggtttacgattgggccttccccgaagttcattactaccagattgttaacatcttggattaatggaacccccct

SEQ ID NO: 95758 - DNA, 487 bp, Glycine max
  Clone ID: PAT_MRT3847_57481C.1
ggctgcaaatacgcactagcgctaatatgcgtcgagaaaatggctgacagcagacagtggtggggcaatacgaactggcctaagagcatgtcccttttgggggaacccaaccacaagcataatgctcgcttaaatgatgaatgctcataagaacatgcaggaaacaagagctgatgccaaaggagaccgagtggctcacaagaattatgcctattgtgctaacatgaccatgaataccaaagtgcttccataagcgggacaccttgcatttcattactactctcaactgagattctacgatgaaccacatggtaagactatgtttatagcaaaactcagcagagaacaatactatctatagccatgagtagttcgcaagtgcaagaagccatgttgccagatcaacaggccgctgattgacatcaccatacctgcatcaagggagaaaacccgcccactgatgtaactggctgcttgattaagagcc

SEQ ID NO: 95759 - DNA, 529 bp, Glycine max
  Clone ID: PAT_MRT3847_57482C.1
ccggcaacaaaaacttttaattatccttggtacctaggaaaaaaaaaatcccccccatttttcagattggaaaacaggggctacccaaacggttcctttagtcctcctcctcctcaccctcctcaccaacaacgttgaaaaacttgggggggtcctcccccttgttgggggccactacccggaccccgccacggggctgctggtttttgaggaactttttgggcaggtacttgatgtaccaaccggagaactcctggggggcaacgacctgaatgcggccgttgccgaggttggtgacgttgatcttctccccgaggttgccggagaggccgccacccttgaaccgcttctggaggaagggggccaaggcagaggcgtacaaaatgcggtccttcaccggctggggggcggagatgaagaactttttggacaccttaccccccttgttgggaccgcccttgtttcctccgccgacgggaggggggttcttaggccctggcccattgtggcgggatagaataaatcgggg

SEQ ID NO: 95760 - DNA, 223 bp, Glycine max
  Clone ID: PAT_MRT3847_57483C.1
ccccaactcctacccagttatgtctacccgctttcaggcactaggatattttaagctttttaaagtaaagaaaaaccataaaacttgcacaaaatcaaattgcagaccacctttaagaacaaagtgctcgatattgcgtcttcacaagattaaatgagctaatctaccaaaatctttaccatcaattcccaatgccaaaatatctgataactttaaatttaat

SEQ ID NO: 95761 - DNA, 1088 bp, Glycine max
  unsure (1)..(1088): unsure at all n locations
  Clone ID: PAT_MRT3847_57484C.1
ttcacaagttaattgaatattatgatgtttgagctgcagaggcagctctccattctttaaggtagagatgatactatcaggaagagggctaaaggttgagctaagccgatctgaagactcaaaacagagancaatggcaatgtgggatatgcattcatcaacatgatcaatcctggcttgattatactattctatcaggtgttcaatgggaagaaatgggagaaattcaacagtgagaaagtggcatcactagcatatgctcgcatacaagggaaagcagctctcattgctcacttccaaaattcaagcttgatgaatgaggataagcgctgcaggcctatatcctcttcaacgccgatggccctaatgccggtgaccaggttcctttcccagttggcattaacattcgcaacaaagctggaagagtgagaaacaacactcaggaggataacctgcaagggagtcggagtctgcctaatttgggaatcagtaagctctcatctgatggagacagtcattcattggagtcagactaaggaagctatctttctctcttctgccatgtcattaattttagtgggtgctaacctttggaaaccaaatggtctagtcacgttaataaagctgctcatgtttggagcacataagtaccaacactaactttaagccgagaatttttctagttcttttggcttttgatgctaaatccaaacatggttgaagtataagcatcaagaggactatataaaaaattacatgtacaggagtttcacattggagagtggagaggcttgtaaagtggtttgaggagaaacttaattagtctgtatcaattttacctttggttcccctcttcctctccttgttttttcttcaggcattttttctttcttttgtaaattgttgattttggagtccatctcatccaaaactcttgaaaattttgatgaactatttatgtgctgtgccgaaaccttcttcggttgttcatcattgttaatgttaggtgtgcaagcatactcttgtattcaccttttccttgtaacatattaccattcgaataatataattgacgtttctcgtcgttt

SEQ ID NO: 95762 - DNA, 1386 bp, Glycine max
  Clone ID: PAT_MRT3847_57485C.1
acggctgcgagaagacgacagaaggggacttcttccaatttcaaattcttcactcacccagtcgcgcttttctctgaatttcacgatgcgcacgtccagaaaagcagaaccctccaacaacgacgtcgtctcttcggaacacagaaactggagcaacatcttcaaatcgctggttcagatggtgtgcagccagcagaaccagcttcactccttcgcgagccgccacaagtttctcgaagaccgccttcgaatgcagcacgaagggtgggtctccgatgttcgatgtcacaaggatcaaatttctcagatgaatgggatgttgacgtttgaggagaagaaacagtcgctcgaggcggcaaaggcggattttgcgctgagtttgaagcacagagaggctgctatgttaaaatggattttagagcatacagaggatgagttggcagattttaaagcatggtttgaaatcctttctcgtaaatcctctaatggagaagaatgcctcaaggaacatcatctaaggatactgacttgaagaagaaaggaagcacaaacagagggaacaagcccactaggaataatactgcagaaaaagagaagtattccagtgaaatcaaagatgaatttagtaggttaaaaggtgagtatgataagcttgctttagaaaaatattcggaggtgacggcactcttggcagaaaagaaatttgtgtggaatcaatataatgtaatggagaatgattaggctgataaattaaggactaaaaaggatagtaaaatatcagaatttcaaagtaaaatggctgagatggaagctgaggcaaaaagattaatcaaagaaatatctggactttcagtggagttggaatctttaagaaagttcaggaacaaccaagttacaccacctgttttaaatcattgctcacaaggaactaaagcacctgagtcaggagttgttaagagcaacagaagtagaagaaatatgacttccaaaaaagaaatatgtactcccaatgcaccggttccagccaaatcctctgaaacggggacaaaaacaaaaagcatgaagaggaaagaggctccagttattcccacttctgatactccaaagctgttctcttccggcttcaaggttccaaaactgaagtcctctgtaagggtcacatgacacccttccgataacttttagtgagttacttaggatatgtcagtcttgtatacatggcttttgtattatatgctccttgtgtaaactatgtattatgtatgagctttctgttaggtattgattcattcttggcccttctaattagaaatatttggtgtaatgcaagtttggaatagattccaatttttaggttaattaagtaacaacacctttaatttggac

SEQ ID NO: 95763 - DNA, 109 bp, Glycine max
  unsure (1)..(109): unsure at all n locations
  Clone ID: PAT_MRT3847_57486C.1
gttattggaatgctgtttngggtangcagtaggattttatgtgtntgtttctgaacactgatttcttagtagggtacaccttgtgctctaatcctcnttttnatangat

SEQ ID NO: 95764 - DNA, 330 bp, Glycine max
  Clone ID: PAT_MRT3847_57487C.1
cctttttcccactctcactctaacaaatcttcttctcacttcggtccgtcccaccccaaaaaagggtaaggtaccatgaagctgagtaatgtaagtttggctaggcagggaacagataggatggtcatgcaaaaggaaatttgtgtgccaattgaaacgatttggataaatacagatcaagtaatcacaatgtccttcagaggtacgccaacgaagatgtgtcactaggatcgtggattatgggacttgatgtggatcatataaatgatataagactttgttgtagcagtccgcctgattgtcattggaaggctcaagcatggaacattt

SEQ ID NO: 95765 - DNA, 228 bp, Glycine max
  Clone ID: PAT_MRT3847_57488C.1
cttaattattatcattccttagttcaatatcggggaagtccttcactctctctctttcttccctttgcttggtactcttgtcgcgtgcatgcgttgctattagctccagcaagctcgacgtgtgccaactcaacaacgtcatcgcgttggaactcgaccaccgcgttgagtccgaaggtggcttcattcatacatgggactctcatcacgctgagctgtgatgcgccg

SEQ ID NO: 95766 - DNA, 454 bp, Glycine max
  unsure (1)..(454): unsure at all n locations
  Clone ID: PAT_MRT3847_57489C.1
ctgaggcatgcgtctagtctattctcgcatcgcaacatgatcccaatggtccctggtcacaccatgacatagcgcagggccatgcgaaccaactatacaatacccaccacatgcaggctagctggatggcataggttaccatgcagagtggggatgatggtcgagacgtgagcacctggataccaccagtggcatgcaaaggtccccgtaattgttggctaggctattcagggcatcatgtgttctatactagcacttgcccgataccaaatatggtggaagggcagatggtcaaatgattggtatgataattgagagcagtccatgcacaacggcacccgttaccatgttgtcagggcaactataggtaaattantacggggcgtcggagtgtggtgattggcccaaaaggtccataaggtactgccacgagatacagttaaaacacgtgtgt

SEQ ID NO: 95767 - DNA, 256 bp, Glycine max
  Clone ID: PAT_MRT3847_5748C.1
ccctgagaagaagtgggtgtttttcttctttgctttcaatcaagtctcaaactttttttaagctcttgtggatttataaaactgtgaaaatgggtttctttctttttgtatggttttattgggttaagttgaatttttctattgcttctcaaaccataagaagaactgtgtgattgcaggtgttccttgttaagatctgtggtttggttttcgggaggaaacaaaaaaaggatagaaagaattagattattaagta

SEQ ID NO: 95768 - DNA, 1331 bp, Glycine max
  Clone ID: PAT_MRT3847_57490C.1
tacggctgcgagaagacgacagaagggggtgagcataaagaaacatctcaatgtcaaaagaagcatctcgtgtatcgtctcttaaaaacaatggaattgatgtgccattgttcgagctttcttcttccgccggagaatcctaacacgacgtgttcgctttctctaaagtacgctctcgttgttctcaaccaaagcctaccgagatttgctcctctgctctgggaccacgctcaagtacgagtttgcgctgatggaggtgccaatagggtgtatgatgaaatgcctcttttcttccctcatcaacaaccttcccatgttcgcaccaggtacaagcctgatgtaattaaaggagacatggattcaatcaggacagaagtacttgacttctatgcaaagctgggaactaagataattgatgagtctcatgatcaggacaccacagatttacacaaatgtgtggcatacatacgtgacctcaccccaaatgttgatggatcagaactatgcattcttgttgctggagcacttggtgggagattcgaccatgagattggaaatattaatgtgctgtgccgattttccaacacacgaattatccttctatctgatgattgcctcattcatcttcttccaaagaatcattgtcatcaaatctttattgaatcttctgttgagggtccgcattgtggactcattcccattgggatgccttctggaagctctacatccacaggactcaaatgggatctcaatgacacagcgatgagttttggaggtttagtaagtacatccaatattgtaaaaggggaaatagttacagtacagtctgattcagatcttctttggactatttctattaagaagctcgaggttttacatggtgcatagtgcggtgatttttcagatcttcaataccaatttatatgggccctatattccagttaaaagccagagcttctgctgacctttataactttacgtttcattctttcaatttactctgaattatgggagggtggaagggaattaggaaattattctttaaattaggaagttctattcctagtaactgtgccttgaaagtcagttttcaaaaggctacttacattccttggctcagttgtattgtatgttattgttatccgtaaatgaaatagcaggaataagatgagcaagaaaaagaaggagaaaaccatgtcatgtactattgcttatgcatacagaacagttactgtcaattgaaatggttaatggattgttagttgccactctacactgcaggaccatgacgggtcaataattctggttaatatctagtatgtgattagtga

SEQ ID NO: 95769 - DNA, 634 bp, Glycine max
  Clone ID: PAT_MRT3847_57491C.1
cggacgcgtgggtttatatatttgtttcattgacgcattactattactctctctgagtcattcactcactcctcctctcttctctgtttcatttgcttcttgttgtcaactatgaacgctcttgcagctaccaaccgcaactttcaacgtgcagctcgcattctcggtttggattccaagcttgagaagagtctcctcatacccttcagagaaatcaaagttgaatgcacgatccccaaggatgatggaactctggtttcctatgtgggattcaggatccaacatgataatgcccgtggtcctatgaagggagggattcgttatcatcctgaggttgaccctgatgaagtgaatgctctagctcagctgatgacatggaagactgctgtagcagacattccttatggaggagcaaagggtgggatcggctgcaacccaagggatctgagtatcagtgagttagaacgtctaactcgggttttcacccaaaagattcatgatctcattggcattcagagggatgttcctgcccctgatatgggaactaatgctcagaccatggcatggattctcgatgagtattcaaagtttcatgggcatgcacctgcagttgtgacagggaagcctattgatc

SEQ ID NO: 95770 - DNA, 352 bp, Glycine max
  Clone ID: PAT_MRT3847_57492C.1
aaacccaggatcaaagcttctcaagaaggaaacttgtgagcctgtttcaattattgagacccctccaatggttatcgttggtgttgcgggtgatgtgacaactccgcggggcgtccgcacactgaacactcgctgggctcgtctttggctcgacgaacggaatcgtgagttgtactagagctgaagccactccagcaagcaggcctgcaccagatacactcagcatcgtcaaacttacgatgggaagacgatcgtttccgccccgcctgagaaactgaccagaattccatccgccgcacatgtactggctaccactcaggacatgatattcactgggctgcatccgaaacgg

SEQ ID NO: 95771 - DNA, 231 bp, Glycine max
  Clone ID: PAT_MRT3847_57493C.1
atttaaagaatttcattggttaaacagaaacgcctgaattacaaccaatgagaaaattctgctactaataatgccttataaagtgtgtttactggtgcaaaattcacattcatggccacctatgtatttgagaaggttaaaaatcatgtataaaccaccaagtcaagaacattttttcaagataaaatacccacccttctgtgctagcacttatttctacccatttctaca

SEQ ID NO: 95772 - DNA, 184 bp, Glycine max
  Clone ID: PAT_MRT3847_57494C.1
ttagaatgttatgccatgtggccaaggaagagatggatgcaaaaattcacataaactctgcatttgatcttttcaacaaaataaagaatatgctttgcaaatcccttaacctaatcaataaatttcaatctgcgggagtactgggagcaaaggcttcagatggagagggtagagagggttaagc

SEQ ID NO: 95773 - DNA, 351 bp, Glycine max
  unsure (1)..(351): unsure at all n locations
  Clone ID: PAT_MRT3847_57495C.1
ggtaattagnnnttagtgtttatagcttagggggataagggagattagccgaactttatacagaagcgaccaattaccaaacattaaaaaaaaaaaaatgaagccaccatgagcttaacacacccatcacatgtgcaaaacgctggaacttgctaactggcaacaaatgaccactttattgtactgcacaaaaattgggctgttaatgcacttactaaacaagagctcgcagattttgtgaaaagagggtgcgctgcactttctttgtttactcacacacactatgatgggcgatgtctgcttgaaacctgattttgcaagaccttactggcaagtgcaggggttgcggga

SEQ ID NO: 95774 - DNA, 404 bp, Glycine max
  Clone ID: PAT_MRT3847_57496C.1
gcgaaccaggtcacactgtttaagaaaaactctggagaaaaaaatgtcgcttctatgaaatcggagggcttcttaactaatcactatgatccagtcagagatgaagcatccaatgccacaaatgagaatgtaaaagaaattatccataggaagtcaggccaaatttcctctccaagagatcaagaatttgaacgagctaagcgaagtggcatcaaaactttgatggatgaaaaacacatcaataaactggccagcaagaaaataaagaatactagaaaacaaaaagttgacatgtctggaaagattgatcaaatgttgactggaagaaatggagccaagctcatcactgaacaaggaaaacaacagattcccactcctgacaaattccaagttttgaatgaagc

SEQ ID NO: 95775 - DNA, 328 bp, Glycine max
  Clone ID: PAT_MRT3847_57497C.1
tattcccggtcgacgcacctccgctaaaaaataaagaatcatctcatataatatacaactatcttaatcctaggaacgtattcataaacacgagggacaaatcttagaattccatttcatgccattttcacttctactgaaacccaattataatccttccatcttattacttcttgctacaacatgttacacactctcactgtctttaacttcttccctttcttcatttcttatcataatttatttctgcaatgctttctctgttgttgcatgaaccataaatttcaagtctttcaacttaaagcctttattttttgaattaatttaa

SEQ ID NO: 95776 - DNA, 396 bp, Glycine max
  Clone ID: PAT_MRT3847_57498C.1
gaacttataaagctatccatccgtttatgtcctggatagaaaaaacatccttaagcaacacaaaacatcgtaacaatgcccggatactcacaataagagccaacctcctaccaaagccaatgattgatctgtcccttaaagaaaagaaacaattaaaagtcccgacccgcgacggatgaatgagactataaaggaaacggcatgatagagggcaccataaggaataacactggtaggccccctttccaccaaccgattataaactaaaaaagatcactgccttactaccacgccaaaagctcaggtcatttgctcgttaccaaatggcaataaaaaggtataccctgaacgaacaacttaagtcatggaaaattgaaagggtgagaccgacaacag

SEQ ID NO: 95777 - DNA, 266 bp, Glycine max
  unsure (1)..(266): unsure at all n locations
  Clone ID: PAT_MRT3847_57499C.1
attttatccanttgaaattttanaaatgactgggataaacttaagantncanttattnaanttgaataagtaaacactttaattggattggtcgaatggtatcaanaaaatggagtantaacctcccatttcttattnattattgaattanccgatcaacttgctttgttatcgaacatttntttttgatttcaaaaattttccggaaaanatttncaatctannnntatntgcgaatcaatcctatacttctggtctngaggttt

SEQ ID NO: 95778 - DNA, 851 bp, Glycine max
  unsure (1)..(851): unsure at all n locations
  Clone ID: PAT_MRT3847_5749C.1
gtgtttttttttttttttttagagagcaaacattcatactaattcccactgcatgccttaatcatacataggttacagaagtaatgaaatacattatccactctaacaaacagaacgtaggtaattgcttgttcaaaactaattacaacagagagagagagagagagagagagagagaggaatactattggtagctatatggcctaatcttaggaattaagttgcctagactcattctttgtaaacattgatatttgacttgaggcaatgcatttctggtagtgcacacgtgagacttcactttctccgaacattgtgggtggacaaggaatcgttgattagtcaattaaaccttcacaacattcaactctttttcttcccccactttgttggtctcctctaatttctgatcagttgatggttgtttttccaaattcccagaaataatatcaattttggaagttgcagtaattggcagtgattctgtgtcttctgcatctgttgatggtaatttgggttctgaataatctttggctttgccccacacaaccgagtaaagccccactgcgattacaatgcctccaatgatacttccgagatggagcagttctcctaatataagggagcccaaagcagcaacaatgatcatgcaaagaggattaaaggctgttgcaaatacggggcctcttagtttcatcaccagcccttgaacatagtatgcaattcctgaactaactactcccgtgtaaaaaggagcatagagcctataatcccaaccaacagcccaagcacgggagtgacgttcagccacaaatgccactgcagatgctctcgagccgaatncgagcgac

SEQ ID NO: 95779 - DNA, 160 bp, Glycine max
  Clone ID: PAT_MRT3847_574C.1
cgtatcacttcagtgcttgctgtcgttgcttcatgacacacaacggtgcgatttgttggactcgatcagatccagggctaggagcgtactcacgagataacggcgccatttttcagcgtaattcgtagaaattccaacttcgtctcttctctcctaaatc

SEQ ID NO: 95780 - DNA, 1109 bp, Glycine max
  Clone ID: PAT_MRT3847_57500C.1
gcggaattgagaactggatcatagggctgcttcagcctgtcattgataatctcaagaagcctgattacgtgcagagggttgaaattaagcagttctcattaggggatgaacccttgtctgttaggaacgttgagcgcaggacttctcgcagagtcaacgatttgcagtaccagataggccttaggtatacaggtggtgctcgcatgctgttaatgctttctctgaaatttggcatcattccaattgatgtaccctgtggtgttcgagattttgacattgatggtgaactttgggtaaaattaagattaataccaacagagccttgggtgggagctgtttcatgggcttttggttcactcccaaagatcaagtttgaattgcctctattgccacgcgtccgggcatgttcaatttaatggcaattccagttctctcgatgtaagttccatctatcttcttaatgttattagttcttggcatttgatgcttgtgaagctgtatgtgtgtgcactagcttgaatgcattttgaaagtgatactgtttatagagtattagacacgttctgatgatgttactaattgtgaaaggtatagcactttggaagctttaactactccagattaaatatttattttatttaatagtaaataattacatcttttgatgttgtgttttcttttttttttcctcttcagtaatagttgttctcttaaatatttatgtcaatgataataattctttaaaacattctatgtcttctgaatttaatccattccaagctctcttcatcttcatggatttgttgtccttagattgtgaaaattgtgttttttggtgttttcctgtcactaattgtaaggtaatttcttgcttttctcttgtaggtttttgactaaacttctaactgaagatttacctaaactatttgtacgcccaaagaaaatagttttagatttccaaaagggaaaagctgttggtccagttgctggtggtgttaaatctggagaaatgcaagaaggaaacaaggattctgttggtgaactatctgttactctggtggatgctcgaaagctttcttatattttttatggcaagacggatccttatg

SEQ ID NO: 95781 - DNA, 422 bp, Glycine max
  Clone ID: PAT_MRT3847_57501C.1
ttttttttttttttttttttgctttaattcatttgcttagctatgaatggacattgtaacaaggcttgtctattgtctatggtgaaaatgtagtgagagagagagaaatagggacccacatctcaaccattgaaaccacttcctctgggttagccacagcagcttgttcatttaatttgtcagcctcttttgccctgaaaaaaaagttacaacacaatcacaatcataacgaataaataaataacaaactatactatttcaatacatatattatttcactagataggcttttagtcataggtgccataagacaacattaaactttatataataaatcaatttatattataataaccaaaaattcactaatgctaaagatagcaacaataaataaactacccctttttcctgaatattggaag

SEQ ID NO: 95782 - DNA, 1564 bp, Glycine max
  Clone ID: PAT_MRT3847_57502C.1
ccacgcgtccggggcattacaaaatccaaacaacagaacaggtgatatgcacttgctagaaaattaaataaagctaaggagaaatattgagaagcaggaagaagcaaggttcgatttgaaatctgaaaccgtgtatcacatgaatccgaattggtagatagctacatgacattacgtggtaacatttgcattgtgttgtagttatggcgacgaagcagcttccgcagatcgccattctgggagctggtatctttgtgaagactcagtaccttccgagactctccgagatctctcatcttttcattctgaaatccatttggagccgcactcaggaatcagctacagctgccgtagacatagctcgtaagcattttccccaagtagagactaagtggggagataacggttttgatgacatcattcacgatggatcaatcgatgctgttgccgtggtcttggctggacaaaatcaggttgacatctcactcaggttgctaaaggctggtaaacatgtccttcaagaaaaacctgcagcatcctgtacaagtgaattggaagctgcattgtctagctacaaatctatttcttctgatgctcccggtcaattaatttggtctgtggctgaaaattatcgatttgagcctggcttagtagagtgcaagaaactaattgctggcattgggaaaatgatgagtgtccaagtcattattgaaggatcaatgaacagttcaaacccctatttttcaagctcttggaggcgcaatttcactggaggtttcattcttgatatgggtgtgcatttcattgcagggttaagaatgcttgttgggtgtgagattgtttcagtttcagctatgacatctcatgtggatttgaccttacctcccccagataatatatcatctgtctttcatttggagaatggatgttcaggagtgtttgtaatggttgtctcctccagatcccccaagaccttgtggcgagttgttggcttgaatggaaccctgcaagttgagcgtggattccaaggacaacatggttacctggtttcattttatggtaccgatggacaaaacaaaagctcttttttcccattcagtggagtaactgaagaattaaaagcttttattaatgatgtatctgaaatcaccctcaagaagcggaatcagtttgtgactgagcctcgcctctcttatgtcgaaggtgcaagagatgttgctgtgttagaggcaatgcttgaatctggagctaggcaaggtgagttagttcgtctgaaaaagttttgaggcaataatggaattggtcacctagttcaatgtctgcggatatttactctgtattgttcttgaacattgaggtaagcaaggcagttaagtattagatgaataaggtggtgtttaaataattgctctgatcaatgtcattggatgaagttgtaggatttgcataatatatcatgcatatattaatactgtgagaaacttggtgctctcatatttcgttttgtacatatgctctcgggcacttacgaatttctttaaatttggtgcacttcgtggcctgg

SEQ ID NO: 95783 - DNA, 690 bp, Glycine max
  Clone ID: PAT_MRT3847_57503C.1
gacctacaaacagtatatgtaggtaaaaccttttattctaatttaaatcctccatattgcacacactctctcaatctctctcactcatgcttgtctttctttttcagaaccttccacaacctaagccactactcctcctccctccgccaaacaccaccgcttccactgcaacttacgccatctccctccaccgcaacttgccaggcaggactccatcaccactctcatcgacatcactaccacaccaaaaccctatcctccaacctcacctccgttctcaaacaactccaaaggcgactctgcgctagttttctcccccaatgttctccatgtttggatcctctgtttcgttgctccacctttcttcgttccactctcgcgcgtttgatcttcttctactctaaggagagggaactgatttcggagatagattaataatttcattaggtttcagagattacattttgcattttacttgttaacctttcagccactcgatttggtctttctcttttgctaatcgaagtggaatgaattgatttcacaaattaactgtttcatttgattttggagattacttgttgcaatttacttggtgatcttcattccttttacttttttatgcagaaaagcttgtgtgaatttgacgcttgttgtcaagacttattagctattactttgaatttcata

SEQ ID NO: 95784 - DNA, 341 bp, Glycine max
  Clone ID: PAT_MRT3847_57504C.1
aaattttatcaacacattatttctattacattgaaggtggattcattcgatatttggcgtaactgtcatgaatgcaatttgtacactgcaacctaatgtaatatttattacagaattgtgcgaatcacataacctgaatgtataaagctttttccaacatttgtgccacaatccattatttatctgctgctaaaaaaggtttcactaaatctgccttgtattagcagcattacaagtatatagtatatatctaccattgaattcatataacggtttccaatgaatgagctacaattacgatgctctataatggagacgaggcacaattatgggccaaaccc

SEQ ID NO: 95785 - DNA, 569 bp, Glycine max
  Clone ID: PAT_MRT3847_57505C.1
aaaagccgggacagtatgaaacacacactgcattcaccatgcctggactttgtcgcgcagtctccggcatcaatgtgtttgatccaaagttcaacattgctgcacctggagctgatcaatctgtctatttcccttccacagcgaaagagcagcgattgacctcatttcatcctgccattgaagaactactttatagtaaagatgacaatgaagaacacataggacttttggaagacatgaagaaaccaatcatcttctccatggctaggcttgacaaagtgaagaaccttagtggcctagttgagtggtatgcaagaaacaagaggctgaggagcttggtgaaccttgtggttgttggaggattcttcaatccagccaaatccaaagacagagaagaaactgaggagatcaagaagatgcatttcttgatgaaggagtacaatctcaagggacaattcagatggattgcagctcaaactgaccgctatcgcaacagtgagctgtaccggtgcatttcagatacaaagggagctgttgtgcaaccagcattgtatgaggcctttggtcta

SEQ ID NO: 95786 - DNA, 283 bp, Glycine max
  Clone ID: PAT_MRT3847_57506C.1
tacggctgcgagaagacgacagaagggatcttgctaacgctttttttcaagtcgcatgttaataaattaaaaaaatgtatttgtttttacatttaataatttattgttttcttaacttgatccctaaatatactgttattaaaattcccgttttaaataaaagttcataacctatttttttaatattgaattgataacctatttcagtagcatgcgtgtagtaaattaataagtaacaaatacccgcactaattaatttatgtactatgtcagttttaataat

SEQ ID NO: 95787 - DNA, 376 bp, Glycine max
  Clone ID: PAT_MRT3847_57507C.1
gtcacagagcaagattgacccgaacgcaaactgtaacagtttcatattataaaaatcaacaaactcctgggtccgtccaatctcatgggagagcccctttctcggggagataagcttaaacggtgtatggcaactacttgctggattttcaatatgacccaatataccggtctcaaccaccgggtcctcctgcttctgctactacaagaaggcatcggtagaagaagccgttcagcgaagattttgttttgcaggcgaattacaagttcaccgtactaggttctggacattattctcctgagtcaatggatccagggtataatgttgagtgggaagatattatattcgtgacatatttgacccctttctcaattca

SEQ ID NO: 95788 - DNA, 366 bp, Glycine max
  unsure (1)..(366): unsure at all n locations
  Clone ID: PAT_MRT3847_57508C.1
tacggctgcgagaacgacagaaggggagagaatgtaggaaaggaaagggttttgtagagggagagaattccaaaccaaaaatccgaaataaataattttttttttaaaaaaaaaaagaaccgggtgtgggtgttgttggtgtntacgattgcaaatcggtgatctgcaatcaacttagccatgggttgttctggctttgtttttaagaactatttctatttggaactatcagacaatgactgttgagaatgtttttaaaattagcttattttccttgagatcaacatagttcattgcttggtaaaactgtattgtttctgctactgatgacaaaaacatttacgtttacattttttacataataga

SEQ ID NO: 95789 - DNA, 678 bp, Glycine max
  Clone ID: PAT_MRT3847_57509C.1
gttcataaaaggtaacatatgaattgtttattatataacgtgtattacaagtataacaatagatgatctccaagtacatgaagtaaggagggggatgaaaaaacaataatcctatgcatacaagttcgaacaacaaaggaaaatgaaagattaaaataaacattcctcagcagtaaacgaacaatgtataatatcatcatcacacgtctaatgtatggatcaaactccaaagatgagtgtctatcaaacacaagcagagtagcttcattcagggagcggtggctgaaggtggtggggagaagaaggggaaggaggggatggtgggaaagtttggaagtgaagtggcagcaagtggtggaagggtcacctgtggaacggttggaatggtaggaagagatggttgtggcagtgttgggattgtaggcaaagttggaacattggcctgaggcaatgttggaagtgaaggcaaaggtggcaatgttgttttaggcaaatttggtgcagttgtttgcataagatggcgagttgcttggctcatgctcatgcttgacaaggtcagagcaagaaggaaagctgtgatcaatgatttgcttgaggccatagctcaatgaattgcaaaaatgaagaagaggaattggcaaatatgaaaagggtatgtatttgctttgagtattggat

SEQ ID NO: 95790 - DNA, 2088 bp, Glycine max
  Clone ID: PAT_MRT3847_5750C.1
atggatactccacctgcctcgcctcctcctcctcttcctcctcctcctgcagacgctgatgcgtctccatctacgttgaagcggacacgcaaggcgacacggctacgatcattggccactagaccacctggggcagaaagacctgtggtcaacgtcgatcctgctaccggcaaggccgacggtccctacaagaagaaattaagaacatatttggggattgtcgctcgtgataaggtcgacgtgacatatgacacctggaaggaagtccctactgctcagaaggatttgatatgggaggatattcaggcggaatttcaaatccctgaagcttctgacaataggacaaagaagaaaattcttcagattgtcggcgagcgctggaggcaatttaaatctgacttgactaggaaatggccacttgcagtcgacaaggacggtgcggacgacattgtctgtgaaaaatatggcattagcaaggagaaatggactcagttttgtcagacccgtagagacccctcatgggaggatgtacgaaaaaaggcacaggcctcccagaagcaaaacactgccccccacgtattgtctcgtgggggttatgaatatttagaagaaaagctcatggctgagaaggcaaagaaaagactggaagaagctgcccagtctggaagcactgaggacatcattgaccctccatctcccatcagacgccacgtgaaatggaagatagcccgcacgaagaaaactggacagatgacgtctgaggcagcaaaggaaatagctgacaggattgattctttggacgagcaggcgtcacagggatcgtttgtcccccatggacgtcaggatatcctgactgctgccattgggcgaccagagcaccctggccgtgttcgtgctgttggagccggtgtcaccataaagcaatactttggatcagcttcacgaacatcccgcagttcttcctccatgcctcttgaagacctagaacagctgacccaacaaatcagagatcaactggaggagtcaatcacagaaaaatctcagatgcaatcacagggaattgcactacctccagagccagaggttggtccctcaggtcctcgtgtcagtacaaaggagagttgtgttgctccctcagggaacaatccagggatgggtgactcagacaaatgcggcctatatattgaagaaaatccttcccgcttggttgccctaggaagactttacgagggatccacaacagttcacaacatcccgttgttgcatggccaagtcaaggttggtgttgaggaggttaaagatacagaggctctcgttcctatacccactgacgaggttaccttagtggggcagacacttaacactttccttgcttggccaacacatcttgtgaagtgtttatcagaacaggcagttgtgtctccagcaaaacctccagaaagcccggatgaagaggtcgatgatcccctgtacctgatgacattgaccatcccacaactgtttttgaagccgctccaggttatgtgggatgctaccatattcggggtgtttaatcaaaacttcccgttgtatataaagcacgaagatctctctgaaattgcacatggtggtcaatgtctcagcatatcagttatacagttgtggattctccatctgactgagacaagtgtgcgagcggggaattctgatgtgtatggattcctcgagccacagtccattcagagatctggacaatcacaatttgaatccgaaagttacatcaagagttggatacagagttcaaaacgagatgtttaccttgaagcctatctgaatagtggacactggcaaatggtcgtcattctacctaaggaaaacctagttgtctggttttgttctttgcataacaggccagacaactaccttaagggaataattaacagtgctttgaaaggacttgatgatactccacaaccgaaatccaaggctgctgctaggtggattgttgttaagtattttaatgaagttagaccattggaagcagagagatttaaggcacttcgcatacagtgggcacaatattatctaaaagttagaaatcaaacatag

SEQ ID NO: 95791 - DNA, 278 bp, Glycine max
  Clone ID: PAT_MRT3847_57510C.1
agcgcgaaaaaacatagggttttgcatttgaatccgatcatctttatttttaatgcaacaatggaaacgactcacgatgtgttccactaacaacgagcgggaggaattctactttctcaacgtcattcattcacttcatcgttaacaccaaccttctcaacgttataatgtgctctcctgatatctataaattatctgatagccacagcatcacttggctccattcagtaactgtttagcaagtacagttcgatgtatccaccgcatttgcccttttc

SEQ ID NO: 95792 - DNA, 355 bp, Glycine max
  Clone ID: PAT_MRT3847_57511C.1
atggcaattgggcttctgttgaaacagctagattaaatgctgaaggcctctcatgcaaggttcttgacaaggaggcgtttaaaaagcaaatgttgaagacacttatatggatttgttccgttaagcttgttgtcacactgtatgaaggggttactgtaagtgtcgttgtaaatgaattccgcactgaattgtctatccttataacagaactggcatcagtatcaacaaatgaaaaggggttaaaatttgaagaatccatggaatagcgcttgtgtgcatattctcgagctgtatcccactttcccactgaagttaaagaattcaaatgtgcaaatggttagatttgttctctctc

SEQ ID NO: 95793 - DNA, 773 bp, Glycine max
  Clone ID: PAT_MRT3847_57512C.1
ccacgcgtccgggaagcaagcactcccccatgtcaagcttccgtagcagtatttcttatgcatgcttagcaccttcaagctgtcaaaccctcaaaagtccaacttcttcttcttctaaaaccccattattgtttgtcttcaaattttccttcttcaaaaaaccctctctctctctctctctctatccatgcaatcattcatatctctctctactttatctcacccatcatcatggccatgatcatcagattccaacatccactaagcttcattctttggctcttcctcttcttggtactctttcaatatgtctggtttggttccaaatccaacaatgataacaacgccgtcttcaccaacaaccaacttcagttctctctgtctagaaatagaagaatcttaacaactggccgaggatttgacttcaccccgtttctccaccaccaccatcgtggtcatcatcggcgccaccaccaccggagtcgcgtgccggagtcaaaggaaaccgagattgatccacgttatggtgttgagaaacgccttgttccaacgggtccaaacccattgcaccattaatgaggttcacatactttgttttttcaatttttcaccgtgacataatgtaattttgtgtattcataaaaggagaatttgtctagctctagttaaaaaaaaaattgttatatatacatataattcctctctttataaactaataagttattattactattattcatattaaaaaaaaaaaaaaaaaaaaaaagggcggc

SEQ ID NO: 95794 - DNA, 450 bp, Glycine max
  Clone ID: PAT_MRT3847_57513C.1
tggaagaatgactatggctatttgtgataaagaaaaggtaccactcaagcgtaagggaacattttatcccatagctataagacttgctgtattgtgtggtatgctaggcagtaaaaaaccaagagaacaaactaggtatagagatgataatgctgtgttggataagtggacatactagacatgataggattagaaatgaattcgttaaagaaaagttggggtaacacctattgtagagaagattttaggcctacttgtattttcctttttgttcttttcctgattgtgcatcctatcagaatttaaggtgttagattgtcgttccctgtgttattatggaggaaactccttgttaaggggaaaccctgtgtttgtactcaaatttggcctaaaagccttattagttctatctttattcataattcggtaagttcattttgtgattcttaa

SEQ ID NO: 95795 - DNA, 116 bp, Glycine max
  Clone ID: PAT_MRT3847_57514C.1
aaagagcaattttcatcctcattcaatttattgagaaagcactacttgggacatccaggaaaatatcacatggggctcaaaatccatacaaacttgttataataataagagagggg

SEQ ID NO: 95796 - DNA, 337 bp, Glycine max
  Clone ID: PAT_MRT3847_57515C.1
cacccgagaatgtcccaatttataaaaatgaaaatagaagcttgaataataggaaacacattttatttcttcataagattcaagtcaaacaatcatgacctaatttatctcgaagatagaacaaagacgcccctataccaagagggtagtggaccattcctacatcgaagagggtccttcaagaccagcattattagtagtcctaaaggctaaaagtgacatcagcaggcactgacgatttctaacgagatactaaaatctagtaggtcctcgtcgcattgggggagcgttggttgacagggtggagcgatcgcgagcctgttcgctgggaggctgg

SEQ ID NO: 95797 - DNA, 548 bp, Glycine max
  Clone ID: PAT_MRT3847_57516C.1
tgccggccgatttgccgctctacactgttgcagtgccgcctgcttgggggggggggggggggggggcagcaatgaacaaggctaggtaggaacattagataagataagtaaaaagtagcgaaaaggtacggaaaacaacaagcagtacacgaataaaagaatttacgaataatgcacgcgcgatccgatacgatactgttgtgacgcaaacgcataggggcacgcacaataacagtaaaggggggtgagtttctataagatagggagtacaaggctaaaataaagatatacaaatgaaatagatatatacgaggttacgaggcatatagtgtgaatacgacagctacgactgactaaccgcaggcaacaattgcagagggacggagagacttacaggctggtaaactgtaaaggtggtagtttgaactctaagtgtcctacttgtggtggttgtggtcgtcactataaacgatgtaggtggtggtataccttgaaatagagacaatagcataatagaaaatctcacatgactacttgttgtcctcaca

SEQ ID NO: 95798 - DNA, 139 bp, Glycine max
  Clone ID: PAT_MRT3847_57517C.1
atccaaacttgatacaaccccagtaacagcccttcgcattatacctaatggtattatcggtcctcatcccaatccaataaggaataggcctattcttcctgatgttcttcgccaacttcttcttgattctaaatttctt

SEQ ID NO: 95799 - DNA, 543 bp, Glycine max
  Clone ID: PAT_MRT3847_57518C.1
gttttcagctcttttcagctttatgagaaatgggtagttttcaatttttgtttttttaaggtttggagttgaaaaattgattttttatttatttattgtaggtgtctatttttgaaatttggtgttgcaacttgatttttgagtgagaatttgttttatggagataatgctgcaatttaaagtgtgattgatgagatttgatttgaaccttgttttacagtttcttttgtaatcaatgaaggtaattgcttgcagctctatgtacaattgacttgaaaattctcttgattgatgccaccttgttgtgtcagtgacattttttgtgtgaatgtcgaactgaaattcttttgcagctctttcttgcaaaattgaatgtaattttaaattttaatattatcatcggatgatttggttttcaatttgaagatgctgttagaattacatgttgagggcttaattctgatagtgagcatgtgattgtagtgtgtctaatggtgtgaattgttccaaattaggttcctttattgttctaagattcatagc

SEQ ID NO: 95800 - DNA, 466 bp, Glycine max
  unsure (1)..(466): unsure at all n locations
  Clone ID: PAT_MRT3847_57519C.1
accctggtgttcattccatactgatagntctctgctactgtatattatgctttatttatccggccactagggaaccgtacaggcaagcagcgaacagcactcaggggccactcggtcggcaatccttgcactccagacgggctggccgaccaggacacattcacagggagcgtactctgttgctttgctcaccaagccttttatcttattaacttacacagacccttcgatcttataatggaacttattgggaatgcacagactctgtacaggagaacatagtctctacgacgcgtactgatcacaggattggatatgcaaagttcgcttgcatgatgtgaaaccgagattgcatatgctagtatgaggaccacatagaaccaggactaagacttagctggcactaccgcacaagtctatgcagcatcatggacagctatatgcgcatgccttgactgcgcactat

SEQ ID NO: 95801 - DNA, 604 bp, Glycine max
  unsure (1)..(604): unsure at all n locations
  Clone ID: PAT_MRT3847_5751C.1
ccagcgtccgggctacgattattggccactagaccacctggggcagaaagacctgcggtcaacgtcgattctgctaccggcaaggccgacagtccccacatgaagaaattaagaacatatttggggattttcgctcatgataaggtcgacgtcacatatgacaactggaaggaagtccctactgcttacaaggatttgatatgggaggatattcaggcagaatttgaaatccctgaagcttctgacagtaggacaaagaaaaaaattcttcagactgtcggcgagcgctggaggtagtttaaatctgacttgcctaacaaatgggcacttgtaggcgacaaggacgatgtggatgacattgtctgtgaaaaatatggcattagcaaggagaaatgaactcagttttgtcagacccgcagagacccctcatgaaagaaaaaggtacaggccatccagaagcaaaatactgcccctcacgtattgtctcgtgggggttatgaatatttaaaacanaagttcatggctgacaagacaaagaanagactgcaagaagctgcccagtctggaaacactgannggcgtcattgaccctccatctcccatc

SEQ ID NO: 95802 - DNA, 700 bp, Glycine max
  unsure (1)..(700): unsure at all n locations
  Clone ID: PAT_MRT3847_57520C.1
tannnaatgtataaattaaataaaaccttttgctttttatattcaattcgataaagttatagacaaatcttctatgacaactaaacactaaaaattctatctaaaatatatcaatatgttttatgaacaattatggaataaacaaagttatttaacgaggttttgagttaacttgagcttttgttggagaataccagaatagattaattcagtggtataagctttgaatcctaattcggtaaaatggtctgcttgtttgtcatctccttcattcaaaataatgagatgattttccttgaagcgacctggttttgttctgatcacggttccttgcatactctcgatgagagctttgatatctccataagagggtttgatattatttggaatccagaaagtgtagtctttcaacaaatctccatcactttttctcaccttctcgagagttttgctgagttggaaatcaaagtttgattttgttgtttcatcatcaattaaatagtcatctggagagagtgcttttccatcttcaacgcaatctgtaacccaatcataggagacaatactgattcctctactaactgccaaaaggaatttgactgatctgataaatcgaccgaggacaaggacattgaaattgtctttgtcttctgtgactttgactccaatggacttgagctttctctttgcatcgtctcgt

SEQ ID NO: 95803 - DNA, 457 bp, Glycine max
  Clone ID: PAT_MRT3847_57521C.1
aaaccgattttaaggttaacaccattggattaacatcggttttttgattgaaatccgatgttggacatatattttaaaatatcagaacctgagccctactactttcctcgtgctttgttcttcgcttcttcttcttcacttcttcttcgtgactgtgagtacaacttcttcagcttcattgtacagcttcttcgcgaccgtgacacgtagccacgttacctaggtacaatttcttcttcttcttcttcttctttgtaaccgcaaggaccttagtctttgttgtcttcttcttcttcttctttttctttgtttctttgtttggggaacttctgctcactgcaaggatgtttgtttatgtgtgctgcaaggagttggtttgtggaagtcgtgctcctgcaaggattaggtttttgctcacaaggtgtcattttgagtgaggtaaattatttcatgtcta

SEQ ID NO: 95804 - DNA, 327 bp, Glycine max
  Clone ID: PAT_MRT3847_57522C.1
ccccattacatttttctgtatttcagggttaaaaattcacacgtttattttataatttggaaatcgtgacaccaaccctacaccaccatggcctccttacacaaattttttgcttttgccctcgctcttctcctccttgcctcccctctccttcaatttgctagatctcactcagactcctaagatttaatggaggctgctgaaaaatcaaatcatatcgacattgttaatcatcatgtccaaaacttttctgatggtaccttcccttctgctccagtaattcaaacaataagtgttttttcaaaaaatattgctatatttataaca

SEQ ID NO: 95805 - DNA, 1044 bp, Glycine max
  Clone ID: PAT_MRT3847_57523C.1
tgagacgacagaaggggatagcaaatattcagagaattccaactgataaaaagaatattcagagaattccaaagacagagatgactgtcattaaggaagagcaacaaccaaaccaaatagctggccacaaagaacttggtcacaaaagtctccttcagagcgatgcactctatcagtatatacttgaaaccagtgtgtacccaagagagcatgagagcttgaaggagctacgagagttgacggaaaaacacccttggaacctgatggctacaccacctgacgaaggacaacttctaggcatgctccttaagcttatcaatgccaagaacaccatggaaataggcgtcttcactggttactccttgctttccactgcccttgccctcccttctgacggaaagatcttagctatggatgttaaccgggaatattatgaattggggttgcccgtgattgaaaaggctggagtggctcacaagattgacttcagagaaggacccgctcttcctcttcttgacgttctcattaaagacgaaaagaataagggagctttcgatttcatctatgtggatgctgataaggacaattacttgaactaccacaagagggtgattgagcttgtgaagcttgggggattgatcggctacgataacaccctatggaatgggtccgtggtggccccacccgatgctcctctcatggattatgttaagtattatcgcgattttgttatggagctcaacaaagctcttgcacttgattcaagggtcgagatttgccagcttcccgttggtgatgggattaccctgtgccgccgcatcatctgatcattctgctccttccctccccttttacctacttcacctaccacatatggaaaaaacacaaccttctactattttacctaatccttaaataaacataatgtgtgtctgcttggatagttactctgttgttgagtttttgtcttctacgcaattatattcataatgtttctcttccctaaaacaaacacatgttttgaatcaaaatagtataagatat

SEQ ID NO: 95806 - DNA, 1652 bp, Glycine max
  unsure (1)..(1652): unsure at all n locations
  Clone ID: PAT_MRT3847_57524C.1
tacggattctatgttaagcggagttacaccctgcgatgtcgatcaatgattatcatttatataatatgaccctcctcaagctacctatatcttgttttgtttctgtcttcaattcactgtaataatgtcctgctactcttactctcttttatttttcttttctaatcagcaattatatttagagccataggagtttgagttttttttaaggggtttgtttttccaattgaaagaatttccaagtcgccagtggtcaaaggttgtgttattaatattatttattttaaggaaccagcagaatgtatttgtgagtttgcatttgggtttgtataaattcagcacctaagactggtggtgaggtaagatcaaaataaaacccatcctcttggtcaccttcattttactttgtaatcctccgtntcctttttcttaattatttaattagaacaatttaattgtgagtttgtgacaactgaccctttctctgtgtacatagttttaatgtatcacgatccattaggtagcagcaccaggcgtccgagtgattgagcgtaggagcgtgcgagtgtgaggtaaagaaaaaaagagtgtattttcgttttgactctttctatcaggcattatatcaaacacctatccgatcgcttcatttgtcagtatattctgacaaaatcccagtccactgcgccgaatctctagtgcctggatcatttgctgacttgaatatgcaaagcataaggaaatctatcttgactcgtgtgaatttgaggagatcaaccgaaagatggtttttggctggggatgagggtgctcataagcaattgagatgttggtgctcttcaacagctgtcagctctgatcaaatactggaccgagtgattgcactggccaagaaatatgataaaattgatggctcaaaggtcactgaaacagctgattttcaaaaagacttgaacctggacagtttggaccgagtggaactcattatggcccttgaagaagaattttctattgaaatccctgatgagaaggctgataagcttgcttgctgtgctgatattgcaaaatacatagcagaggttgatcagaaaaacctggaaaagccctgacttctcagttttgtttatgggatgtacattccattttttgtggctgtgctacatggatctctcttaagtcagcttagttgcattatgcatattagttgatcgacagtttgcttcgttcgggtagttattggtagaatgcataagaaccccatgatttacatgttgagttttagatctgttgaaatgcactgattcactcaataaaataattgtgaattttttttttttaaaaacattatagagcttgagcgccaacgagcacctgttgttgtgatatctcaccaggcagttttgagggcactatatgcttattttgctgacagacctttgaacgaaattccgcatatagcggttcctcttcatacgattattgagatacagatgggagtcacgggtgtccaagagaaaagatataaactaatggactgaaatgaattgaagaaaagtttctccttctataccatactatggcctacaaaccaattatccattcttctgattttaatttattggcaaaatgttatattcccgtaaatggactac

SEQ ID NO: 95807 - DNA, 340 bp, Glycine max
  Clone ID: PAT_MRT3847_57525C.1
gggaaaaaaccccgggagattctcttttttaccttaaagggaaacttcaaaactttaaatttgcatacccaacaagtctatttggtaataacgccaagcctttcctattctttcccctttactcccttctattactttactccaacaacattctcccaacatgggccacatagattcatattaccacatacctattgatccagaggcaaaaatgtgctgccttttttaacactttcatgctttttttgctaacaaaaacatgatagagtgttgcccaccaccctggcctggctccgaagatcctgattgtccgtcatggggccatcatattcctttagga

SEQ ID NO: 95808 - DNA, 451 bp, Glycine max
  Clone ID: PAT_MRT3847_57526C.1
aaaaaaaacctttttttggaacttaaaaagaacagcctcagttttttttttaaacttgaaggacacaaattcttttccaaacggccttttaggattattacaatacccaaccttgggaaaaacaacttttcctgttcccaaataaaaaaactccttaaaatttttggagcttgctttataggaaaagttatcacccaacaatttaaacctccccccctttggttttacaggggggggcgcttttttttttttttttggccgagcttatttgtttttttttaccccacccttaaacttattccattcgagatttttgagagcttccagtgccttttttggggaacccttttctacaaaggcccacccccggtttgggttttttttatacataaaaagctcgacttcaaggactttcccatgtttttcaaaaagggtgcgaatgttttcaggg

SEQ ID NO: 95809 - DNA, 2826 bp, Glycine max
  Clone ID: PAT_MRT3847_57527C.1
ccacgcgtccgggataattggcgctctccgtattagcagcagcatatgttgttgtgtgtgtgttgtttgtggtgaacccttacttcagttgatcagaatatataatagcctttgctccaatcacttcctcttgttcatgccataaaatacaccctttccacagttacaaatgtatgcaactccacaaaggctctctttttgcatgagacatcctctctcttaaaacctccctccttcagtcaaagctcccccaatcatactattcccatttcaccactcacacttttttcctctcgctcttataataacttcctcatatatacacttactctccttcaatagggtaacttttgaatttggtgccccccccaatctttttttttctctattttgttttggagtttggaacatatatagtattgaagcctaaaagattttgaagaaaaaagcgatgagaaactctgaagcaccaacacatggtggcatggagatagaagcaacaaggccttcagctgggaatggttcaacaataaccctaccagggttgagtcctctgagtgagaccctttggagggaaaaggccaacactgcagagatcattggtgatgtctcagcaaggctcacatggaaggatctgactgtgatggtcactctcagcaacggtgagacacagaatgttttggagggtctaactgaggatgctgaaccaggaaccttcactgctctcatgggaccctctggctcaagaaaatctactctcctcgatgcactttctaatcggttagctgcaaatccctccctctctcgcagcattctcctcaatactcgcaaagcaaaacgccatcttggcactgctgcataagtgacacatgcatactccaggagtgataccctaacgatgatagaaaccttatcatatttagcctgattgcgttacatggttagcatgccatgggcaggtcaaatacctttggttgagagcaccattgtggcaatggggctccaagattgtgctgacacagtgattggaaattggcacttgcgtgggatcagtggtggggagaagagaagggtcagcattgccttagaaatcttgatgaggccaaggttgcttttccttgatgaaccaaccagtggacttgacagtgcttcagctttctttgtgacgcagacactacgtgccttggcaagggatggaagaaccgtgatagcctctattcatcagccaagcagtgaagtgtttgagctatttgaccaattatacttgctctctagtggcaaaactgtttattttgggcaagcttccgaggcatatgagttctttgcacaagctggctttccatgtcctgctttgaggaacccttctgatcacttcctcaggtgcatcaattctgactttgacaaagtcaaggccactcttaaagggtccatgaaactcaggtttgagggaagtgatgatcctttggacaggatcactactgctgaagctatcagaactcttattgacttctaccgcacttctcagcactcttatgctgcaagacagaaagtggatgagatatccaaagttaagggaacagtgcttgaagctggaggaagtgaggctagttttctgatgcagtcttacaccttaaccaaacgttccttcatcaacatgtcaagggactttggatactactggcttaggcttgttatctacattgtagtcactgtttgtattggaaccatttatttgaatgtgggaacaggctacaactctattctggctagaggttcttgtgcatcttttgtctttggttttgtcaccttcatgtcaattggtggattcccttcatttgttgaagacatgaaggttttccaaagggagaggcttaatggccactatggtgtcacttcatttgtcatcagcaacacattatctgcaatgcccttcctgattttgatcacctttctctctggaaccatttgttacttcatggttcgcctacaccctggcttctggcactacctcttctttgtgttgtgcctttatgccagtgtcacagtggttgaaagcttaatgatggcaattgctagcattgtccccaacttcctcatgggcatcattattggagcaggaattcagggcatattcatgttggtctcaggctactttaggctcccacatgatatcccaaagccagtctggcgctacccaatgtcatacatcagtttccacttctgggcactacagggtcagtaccagaacgatttgcgcggtttgatattcgacaaccagacaccagaccttccaaagataccgggtgaatacatcttggaaaaagtgttccaaattgatgtcaacagatcaaagtggataaacttgagtgtgatcttcagcatgattgtgatctatcgcatcattttcttcatcatgatcaaagtcaacgaggacgtgacgccgtggatcagagggtaccttgctaggaggagaatgcagcagaagagtggagcacagaacacaactatcgcacctgatgttctcactcagtcaccatctctcagaacctatgtttccactcaaacaaaatgaaggcatcagaagtttgactcaaataacgaagctttcattatcaagtagggattagatatatataacttaacattcttcttcttatttttatacattcttggtctttaacaatgttggcatatactctgagcttccctaagaatgggatgagtaatatgaaattctggagtgttttattagtaagtcttcaacgcctactgtttataattttttcttaccaaatcccgcaatatatatatgtttcattgtcctcc

SEQ ID NO: 95810 - DNA, 319 bp, Glycine max
  Clone ID: PAT_MRT3847_57528C.1
attcaattcgagtgcaggctacaggtgaccatacacctgcacatcaaaccacagccctcagagacttcttcggttttgcggttgctgccatgccacggagaccagtaagtcccttccacaatcagattgatgcaggacagcttcgccgtatatcagctttacatcctgcacaaagggaatagccgtagcagacgtctcagcccgcgctacacgggcatactaccttaaataaaatgctctctcttgatcggggaaactactagcatttttctgcccaacaacaatattcccctttttgcagcatgtttaactcatcatg

SEQ ID NO: 95811 - DNA, 139 bp, Glycine max
  Clone ID: PAT_MRT3847_57529C.1
gagggtacgatcccgcaccggcaggaggatgcgtgtgcctccacagagattcattatgctcaaggatgatgcaccaagacctggtcagcccagtcaaggacctcgtcctgctggcacagcggcagcgcgtgtgcgaacc

SEQ ID NO: 95812 - DNA, 144 bp, Glycine max
  unsure (1)..(144): unsure at all n locations
  Clone ID: PAT_MRT3847_5752C.1
atcttntcctgtntttcttccttcctatcattttagtgatcctgtctataatcttccgtgctatgcagaataatattcgggaccattggaataagcatgtcgcagcttgaccatgaatgttagataaagattctctgatgctga

SEQ ID NO: 95813 - DNA, 2227 bp, Glycine max
  Clone ID: PAT_MRT3847_57530C.1
aattcgacaccaggggattacctaataataagtcaatatatggggcatgccacgtggatgctgtggatagaagataggaagcaagcagggaccatgagaggcagacgacatggaagccgtaacaggctcccaccatttttccactctctccctttctttctctcacaacaaaaccttgcgctcttcttctgccaaatcaatcaagctttcctctccttcgaccaacgcttccttaacttccacaaactggttcgcgaaagaggtatggggttgggtgaactccaactccaaaggcgtcgccgtgagaaggtacacacgcggagtggtggtgagggctgaaatgttcggccagttaacaagtggccttgagactgcatggaacaagctcaaaggagaagaggttttgtctaaggagaacattgtggaacctatgcgagatatcaggagagctctcttagaagctgatgttagtcttcctgttgtcagaaggtttgtgcagtctgtcagtgatcaggctgtgggtgttggtgtcattcgtggagtgagaccggatcagcaattggttaagattgtacatgatgaacttgtacgattgatgggtggagaagtttctgaactggtttttgccaaatctgggcccactgtcattttattggctggacttcagggagttgggaagacaacggtttgcgcaaagttggcaaattatctcaagaaacagggaaaaagttgcatgctagttgctggggatgtttacagacctgctgctattgaccagcttgctattttgggaaaacaggtggatgtgcctgtctatacagcaggtaccgatgttaaaccttcagaaattgccaaacaaggtttagaagaggcaaaaaagaagaaaattgatgttgttattgttgatactgctggtaggctgcagattgacaagacaatgatggatgagttaaaagaagtgaaaaaggcattgaatccaacagaagtgttgctagttgtggatgcaatgacagggcaagaagctgcagcgttggtgactactttcaatcttgagattggaataacaggtgccatcttgacaaagcttgatggcgattcaagaggtggagcagctttgagtgtcaaagaggtatccggaaagccaattaaacttgtaggacggggggaacgcatggaggatcttgaacctttctaccctgatcggatggcaggacgcatactaggaatgggagatgttctttcttttgtagagaaggcacaacaagttatgcgtcaagaagatgctgaagaattgcaaaagaagattatgagtgcaaagtttgacttcaatgattttctaaagcaaacccgtactgttgcaaaaatgggttctgtctctcgtgtcattggaatgattcctggtatggggaaggttactcctgctcaaattcgagatgcagagaagaatttgctgaacatggaagcaatgatagaagcgatgacccctgaggagagggaaaagccagaactgttggcagaatcccctgtcaggaggaaaagggttgctcaggattcagggaaaacagagcagcaggtaagccaacttgtagctcaacttttccaaatgcgtgttcgtatgaagaacctgatgggtgtaatggaaagtggatcacttccaacacttagtaatcttgaggaagcgcttaaagcagaggaaaaggttaactaaaaggccccacctggcactgctaggaggaggaagagatcggaatcaaggagtgtatttggggactcaacaccagcaaggccaagtcctcgtggttttgggagcaaaaattgaaaatccctaaagggtttaacacaacaatataatgggaagtctggatcaacaggtcaccggtgatcaacttgtttgatttagcgttattcagctaaaataattctttaccatcattagagcaattcatatagctccaacttgtttgattcagctttcttcggctaaaatgattatttaccattattagttcaattcatattgcaatgaatgagggttgtccaggagaaagatgtaatttaggcagagatgagtcgtatcatacatatgcgggatatgttgtaaggaatatgcgtgtcattcttgttcttgtacaactcaactttgtatcttggcgtgggagtggaatgttactcataaagaccgtccaatatttttcataaaatcttctaacttaaaaaaaaaaaaaaa

SEQ ID NO: 95814 - DNA, 110 bp, Glycine max
  Clone ID: PAT_MRT3847_57531C.1
attcactgcctgtgggacttgactggaaaacctcttcccactatgctctcacatcctttccagtgcgtatacaaaggccgaccacgccttcacgtgcccctgatgcaatg

SEQ ID NO: 95815 - DNA, 288 bp, Glycine max
  Clone ID: PAT_MRT3847_57532C.1
gggggcaaggaggatcagaggagttagcgtgatccattgttgttctctctctctctagagttcttatttcctctctctagaattttctatccgttcatccccctcacaaattatggtttttgcgaatcttttagtgtctgaaatctaatccaacgtttcatccatggtttccgattcaatggccgtcgtgtcgagtccctgggcggcagagatcaacggtccggggaacaggtcaaggaccagtaggtccgcgaaattgtagcagtataaaaacgatgcggctttgcg

SEQ ID NO: 95816 - DNA, 162 bp, Glycine max
  Clone ID: PAT_MRT3847_57533C.1
acggggtcatgcaaattacaacattgctttgctaatgaacccaaccctaattctctggtggtaatcccaatggtgatggcctttggggtgggctgatgcaggaatcgtggcacccatgtagttgagttcttttgttgatggagagaatgcggaaggaaatgg

SEQ ID NO: 95817 - DNA, 385 bp, Glycine max
  Clone ID: PAT_MRT3847_57534C.1
agaacatcaaattaaacaacaaaaattttttaatagtctgaattggttcttttccaacacaaaaaaggacttataatccccaaaccaaaaactacccagaccaaccacgagaatgaaacttataaccttccttgaggttattgaccacattatagggaataggggtaactggcttcaacgttgcccccttgaccatgaaaccaggtttgggaccctgagggtggcttttggggctgaactttttaaccttgggcttggccctaaccctgaaccggacatttttggtccttcttaggggggacttcttaatgccccttggtgggcttaccttgttcaaaacccccgtaattccttttctttagaatctggtggccaacctgtttgt

SEQ ID NO: 95818 - DNA, 468 bp, Glycine max
  Clone ID: PAT_MRT3847_57535C.1
tatagacccaaaacgattgatgccagattgagacaaactatagatcctcaatacaatgaggttcaggctcagatggatacagatttgcttaaattgtctgttgatgatgtggaacctactataggttccatgttggatctggaaattgctcaatctgaaacagcacttcccaaatacacagttggtggtaccattctgcgtagtgatctattggcagatcttttgacagagggctattttagagcaagtgttgatttgcagcgcactcatcgcattaaaggaatgattcaaatggtggccacagttggtattcctgagaatacaggtatatcattggcctgtgctatgaatagttcttttagggggcgtgccaggtctgatacttacaccatttgctctcatgactgtgaattatggaattctgcttgcacataagctatgactatgcgattcaattcaaattcgtgc

SEQ ID NO: 95819 - DNA, 130 bp, Glycine max
  unsure (1)..(130): unsure at all n locations
  Clone ID: PAT_MRT3847_57536C.1
cggccgctcgagcncggcgggcggaaatacaaaagagggtgccctctctgtttctttcccaccttcgcgaangagccatggtctcatttgcacgtggagccggatctctaatccgcattggcctctcctg

SEQ ID NO: 95820 - DNA, 192 bp, Glycine max
  Clone ID: PAT_MRT3847_57537C.1
ctacgttatgcccgctgctgaggccgatcgtccatgaggtgtatccgatgctatgatgagaactgcggtcatggcacgtgtacagatcactatgtggcaccatctcacatacaggtatatgatagaagaagcggatgcgggacggtatcttgttgcaacttacatatgatggataaatgaagtatgtgaata

SEQ ID NO: 95821 - DNA, 490 bp, Glycine max
  Clone ID: PAT_MRT3847_57538C.1
ggctcgagcggctcgagccgcccaaatcaataccacaatgggttttcatttgcctggtatcagaaaggcattgtttgcagtgaatcaagcatcttcaaaagccattcatgtgccaaagggctatcttgcagtatatgtcggagagaacatgaagcggtttgtgatccctgtgtcatacttgaaccaaccttccttccaagacttgttgagtcaagctgaggaagaatttgggtatgatcatcccatgggtggccttgcaattccttgcagcgaagatgttttccaatgtataacttcttgcttgaattgacaataaatctcacactttaggagactgacatagattagggtagacattttgtactgtaggcgtcttctcaacttgtaaagatctctctttctcgagtaagagaaaagaaacagaataacaatatcaaataatattatatttttgtgagtgatgacaatgaattcatctactcaagcaaaa

SEQ ID NO: 95822 - DNA, 592 bp, Glycine max
  Clone ID: PAT_MRT3847_57539C.1
cggctcgaggagaagttgaagcagttagacaagagttacaagaagagcgagaacatgctcaacgacttaaggagaattttcatagagatgttatattttctgaatccagagctacctttgctgaggcaaaactcagtgatctttataggaaaatcagaatgtcagattataaggtctgttctatatgcctttccaatgacagggacttggcctttggatgtgggcacatgacttgtagagactgtggatcgaagttatcaaagtactgtatatgtatgtttgggatcacaaaccatatcaagctatttactgagatactatgtgtggatccacatatattatgtacataaaatcctgaatatattatttcctactgttacacacattccccttcgcacctctcttacacttctacatgtgcacactctggttactcatacctcactctagtattacatacttgttatgtactcttggagacaacaaatatgtacagttcagctacacagtttgttgagtcgaattgcaaagtaccacataccattggaaaatagtcaacaaaagtattccaattctctcatggctaatgcag

SEQ ID NO: 95823 - DNA, 416 bp, Glycine max
  Clone ID: PAT_MRT3847_5753C.1
ggctcgaggagaaaacacagcgtatcgttgtttttaatgagatggaacaactaatgcacgggagacttgatgggaatggcttaaaaaggcatggattatataatggaaagggttcagtcatgccacaaggtacacgctttcctgttctttgaccataatggcggcagcaaaatctttgtattacataaatatgatggcgtgcgatccctcccatagtccgttgctacggtgacataattgctccatctttcttcagaaaatgcaactgtctcacaaccaaggaagatggatttctaccgattcacgctctgcgaggtcgaccgtgcgtttcttgaagctcatgatatgggggcccttctacgatggactctattcatgtctgcccaagacacttttaatgactaagattgtctgag

SEQ ID NO: 95824 - DNA, 1898 bp, Glycine max
  Clone ID: PAT_MRT3847_57540C.1
gagatgagagagagatcaaaatcaaatcgaaacaaaacaaaacacagtgctcagtaccctctctcacatttactactattttgctcttctctctaggcctgccctctctccctagggtttgtttcacttatgccttcccaactcctcagcctcagtctttcagaagttgaatgtagatgatacggaaggagagaagttgccctgtcctgtcggtggctctgatctctgtaaatgctcaatgctctccatcttgcatttttgtattggtagtaaggtgataaagcatggagtttttgaaaatcaaaaagttcagaaaatctcagaaagcaaatggagaaaaggatttggcagacaaggcagtgcctgagcctgaggaaccaaagctgaacaccgatggtcctgatcagtgtaaatcagaaaacgcagactctgcaggtgaagcagaggatgacgatgattttattaccaatgaggttaagaggaggctaaaagaattgagaagaaacagttttatggtgttgattcctgaagaagattcctgccctgaggaaggggaggatgaagaggaagaggaagccggagagacatgctcaaatgaatggagggatgtggaggcagaaggtcagcaatggtggcgtggtttgatgctgtatttgaaaagtactgtgaaagaatgctgttctttgatcggatgagcactcaacagcttagtgaagttggcaaaggttcacagtatacttcaactccatctccaagatctgcttcaaagaagctggcttctccccttcgttgtctttccttgaaaaaatttgaagaacctgatgatgagactgaacatcttcaacagcctgagcatgacccctaccaggatattgaaacagcatatgtaggtcaaatttgcttgacttgggaggcgcttcattgtcagtactctcatatgagtcagaagatatcttggcaacatgataatcctacctgttacaaccatagtgcacaagagtttcaacagttccaggttctattacaaaggtttattgaaaatgaaccttttgagcagggccgtcgagctgaaatttatgctcgcactaggaacaatttgcctaaactgcttcaggttcctaatatacgaggttcagatcatgaattgactgatgattcagagatgagagttcttgctcctgatcttatcgggataattgaaagttctatccttacattccaccttttcatgaaaagggacaagaaaaagtcaagtggtgctaccaatcagaaccagcttgatactcctctacaacagattcagtcgactcttgaaaagaaagtggtgaagctgaaggaactgcgcagaaagaaaaaaaattggaagaagaattcttggccccaaaagcacgaggacattcaggttttgcttggccttattgacgtgaagatcctgtcaagggttctgaggatgacgaggatgactagagaacaactgttttggtgtgaagaaaagatgaaaaaactggatttatcaaatagtaggttagaaagggatccatgtcccatcctcttcccttgctaggatcagttgtatatctgataaatagcagctaattatatagtagcatcagctttagttctttctcctttggatcgataactgttgctggttttgaagacgtcatcaaatcggccctacagctgtttaggatttcttgggaagaattcgggatactgtatgacaatgagggcaagaatgttttctgttacctaatatgtattcttgttctgtcaaaattgtgagtttccaagttgctttgtgaaacctccaatataacattgttgtcacgaaaaaaaaaataatggttcccagagtcgtcgatttaatgtttacaacaatgcatcttttttgtctt

SEQ ID NO: 95825 - DNA, 274 bp, Glycine max
  Clone ID: PAT_MRT3847_57541C.1
agtgtatgggttatgtaacctgtcgaacaaaaagtaaggatgctggatgcaagcccaatagtacctaaagaatttcgacaataggaaagcttacaactttcctcagtccacaacaactgagataagaaaattacttgattttttcactcaacagaaatgattgggtaaagcaattattgctgttcctctataatcaaataataattatttattagtaatgataaacaatttatttattatcctatgacattgatcaaattcaacagttataacc

SEQ ID NO: 95826 - DNA, 749 bp, Glycine max
  unsure (1)..(749): unsure at all n locations
  Clone ID: PAT_MRT3847_57542C.1
tcgcccacgcgtccgttcacttctgccttccctcacagtcacattgttcttcccaactcctcagaagttgaatgtagtttggtgatacggagagaggttgccctgtcctgtcggtggctctgatctatgtatgacatttccacgatgctatatgcttgcttcgccatttcatcactagtgtcttcttgtcttggaagttgctatggaatctaggggttcaacaagctaaataaaagaatagtttgtttctgaaagtaaggtgataaagcatggagtttttgaaaatcaagaagttcagaaaatctcagaaagcagatggagaaaaggatttggcagacaaggcagtgcctgagcctgaggaaccaaagctgaacaccgactgtcctgatcagtgtaaatcagaaaacgcagattctgcaggtgaagctgaggatgatgatgattttattactaatgaggttaagaggaggctgaaagaattgagaagaaacagttttatggtgttgattcctgaagaagattcctgcccggaggaaggggaggaggaagaggaaggagagacgagctcaaatgaatggagggatgtggaggcagtcagcaatggtggcgtggtgatgctgtgtgaaaagtactgtgaaagaatcctgcgctttgatccgattgccacaacagctaactgcacttggcactgatattcagtatacttcaactncatctccaagatctgcttcaaagaagctggtttctcc

SEQ ID NO: 95827 - DNA, 616 bp, Glycine max
  Clone ID: PAT_MRT3847_57543C.1
gcgtccggttcttcccaactcctcagttgaatgtagtttggtgatacggagagaggttgccctgtcctgtcggtggctctgatctatgtaaatgctcaatgccctccttgttttctgcggttccatcttggatttttggtatgacatttccacgatgctatatgcttgcttcgccatttcatcactagtgtcttcttgtcttggaagttgctatggaatctaggggttcaacaagctaaataaaagtaaggtgataaagcatggagtttttgaaaatcaagaagttcagaaaatctcagaaagcagatggagaaaaggatttggcagacaaggcagtgcctgagcctgaggaaccaaagctgaacaccgactgtcctgatcagtgtaaatcagaaaacgcagattctgcaggtgaagctgaggatgatgatgattttattactaatgaggttaagaggaggctgaaagaattgagaagaaacagttttatggtggtgattcctgaagagattcctgcccggaggaaggggaggaggaagaggaagagggagagaccagctccaatgaatggagggatgtggaggcagaaggtcagcaatggggcggggggttttga

SEQ ID NO: 95828 - DNA, 209 bp, Glycine max
  Clone ID: PAT_MRT3847_57544C.1
ctttagattccatttctggtaattcttagcttgaccattcttccctcttgagaaattcatatcaggcacctttagttggaaaccttggaaatgcagggtactttgaatttactgaccctgttattatggcttgtgtctaatggagttcttctaggcgcactgaacatttcgacactggacattatatctaattgcatgctataattaaa

SEQ ID NO: 95829 - DNA, 685 bp, Glycine max
  unsure (1)..(685): unsure at all n locations
  Clone ID: PAT_MRT3847_57545C.1
ccacgcgtccggagaagttgccctgtcctgtcggtggctctgatctctgtaaatgctcaatgctctccatcttgcatttttgtttggtaggtaggacatttccacgatgctatatgcttacttcgccatttcatcaccctctcttggaagttgctacggaatctaggggttcaacaacctaaataaaagattattttcttccgtataaattttcctgcgctttgttgctgattgtcaacataacaaactactactagtacttgggtgataaagcatggagtttttgaaaatcaaaaagttcagaaaatctcagaaagcaaatggagaaaaggatttggcagacaaggcagtgcctgagcctgaggaaccaaagctgaacaccgatggtcctgatcagtgtaaatcagaaaacgcagactctgcaggtgaagcagaggatgacgatgattttattaccaatgaggttaagaggaggctaaaagaattgagaagaaacagttttatggtgttgattcctgaagaagattcctgccctgaggaaggggaggatgaagaggaagaggaaagccgagagacatgctcaaatgaatggaggggatgtgaggcagaaggtcagcaatggtggcgtggntttgatgctgtatttgaaaagtactgtgaaagaatgctgttctttgatcggatg

SEQ ID NO: 95830 - DNA, 282 bp, Glycine max
  Clone ID: PAT_MRT3847_57546C.1
gtgaaggacaaaggagatgatgcattgcatgacaaattggaatctgcctatcctagcgagggggagaacttataggtggaggatggtgagcatggtgatgaggcatatcttaagacctataatagcgaagatgatagtgtaattgacaggtgagtcgaaagtgataatatgtatcctgcaatctgcggaatttgcctcacgaagttgaaggctaaggatcatgcgagttgggggtattccttacacctgcatgaattattaatggcgctctatagaatggac

SEQ ID NO: 95831 - DNA, 992 bp, Glycine max
  Clone ID: PAT_MRT3847_57547C.1
gcaaaattgattgggaggtgaaggaattcccctgcaggtggaatctcaatggccacgcttagcttcggcatcgccacgacatgtctgagtgctgccgctgattatcgtagaagaagcaactggaaatggagcagacccagaattgtgtgtgttggatgggacccggaaggcgtgcttggtccaccccaaactgggcacctcgccaggttcgagtttaagaggcgcctcgagagagacgcagatgcccgcgaagccttccaacgtcaagtccgtgaagagaaagaacgccgtcaatcccttcgacaatctcgtcctcttcccgatactccgcaagacctcattgaatacttccttgacactgaagctcaggagattgagtttgagattgcaagaatgagaccaagattgaatgaggaattctttgcgcaactcaaattcgagttaggacagcttcgattcgctgttaacaaaacacagctcatggaggacagacagattgagctggaggctctagagaaagccatactagaaggattagaagcctatgataagatgcaaggtgaactcgtaaaagccagggcaagcctaaccaaaatcttgacatcaaaggatgccaaagcaactttgctggagatggttgaaaagaatgaaattaatagatctttattggcacttctagatgaaaacatagcaagtgcacaaaagggcaaccagaaacaggctgcagaatatatggagaagctccgcggggctgttcttcggtacattacagtttagtgcatatagtacgtttcttcccactttactattaagttttgtgaaaattgtgctgttgatcagaaagacaatactaaagaactgggatgttgtggtagcagatttctccactgtaatatcagaagtatcaaattgtacattttgatacgccttgggcatcttttgttgaaatttttatgaaaattgattttaaaaaaaaaaaaaaaaaacctcgt

SEQ ID NO: 95832 - DNA, 848 bp, Glycine max
  Clone ID: PAT_MRT3847_57548C.1
cagcattttagcaaggaaccaatctcttcaaactttgcaaccttttgtcaatccaagcataagaattaagaaccttggaagtttgctgtttttttatttttatttttttaccaatgtctcacaccttgcaattttcatttgtttcaagtgcattcaattattcaatgaagatggagaagatgaagagagttaggcctcgtgggtttcaatttctatgctcttctgagcattccagtttcaaagatgaagatggtgctgataatgggggaggtcaagtttcatcgcgggtgatattggtggagagatatagcaatggtactgctaagagatatgtattaggtgatgattcacagttgcaagcctttcttgttgaggaggataggtctacgccaaacaggttccaggatttgcattcctctgatgaaagcctatcctggcttccagagataataaaagattttgttctaccagcaggctttcctggatcagtttcagatgattacttggattacatgttattacagttccctaccaatgtgactggatggatctgtcacaccctagtcacttcaagtcttctaaaggctgttggtattggctctttcactggaaccacagcagctgcttcagctgctgcatcaggtgggtctcaaaggatggcattggagctgttggacgcttattcattggtgggagatttggaagcctttttgatgatgatcccaatgagaatgtatgcggacttcattggcagtgctggaagcatttttgatctgacaacccaactatatcctgcctatttccttcctttggcatctcttggaaatcttaccaaggctgtagcaaga

SEQ ID NO: 95833 - DNA, 213 bp, Glycine max
  Clone ID: PAT_MRT3847_57549C.1
aaaaaaaaaaacattatttcagtttctcaatctcattactatacaccctggaaaatgccctccctcgctttcaattaattaaacctcattaagctttttccttttaactccattcctttgaacagtaccactggaaagttggggcttgttcatccgagaagaaattgcaggccttgtcggcgctaaaaaaattgggctcctccatttttacgt

SEQ ID NO: 95834 - DNA, 277 bp, Glycine max
  Clone ID: PAT_MRT3847_5754C.1
ggctcgaggtgaaactttgacctcattacgtggacaacaggaccacgaatcagtacgaggacgggactgtttacgcagacggtgctgtcggaccccagggcgacaagagaacctacaagcgggaaggacttccgagactgacgaatgcctgcagccactagaaatggtagatgacaggcacagtccagacacccggtaacaagatgcgaatatggcgccccccagggaacgaagctattgccagggctaactgagagggcagcctcgaaccatctac

SEQ ID NO: 95835 - DNA, 499 bp, Glycine max
  Clone ID: PAT_MRT3847_57550C.1
ctcctttactctctctccctctctattgcccttcaaacacagacacatatctgcacttcacaaccctccaaaccacatttaactatatataaaaccatcattatgaacatggggtttactctcttctcattctgacccttcttcttcttcttcatctacattagtagttcttgttattcattattcttcatactcacacagcttcttctgggggcaaaaggggtcatttttcagatccgaggttgagctcctctacccatcatgatggagctcggatacctgaatcagggtcagccttctagaggaacaacaccacttgtcactcttccattgttgctttcaacacttgtgttcttctccactttcacacatgccttctcttcttctgtgtttccggaattgaatcctattaaacctaggcactcacgtcttctcaggagtgctgtgcaacgagaaactcctacatctcagttgtctgaactatggtcacctctggaaa

SEQ ID NO: 95836 - DNA, 247 bp, Glycine max
  Clone ID: PAT_MRT3847_57551C.1
ctacctggccgctgccgccgcgatgccggcgatgccgcagccgcccgagcgcgcgccggtcaacccgcagccgctgcgggtgcgtgcgccgctgctcgaccggctggtcaatctggccggcgaggtcagcatcacccgctcgcggctggagtccgagctggcgcagatccgcggctcgctgggcgacctcaccgacaacctcgagcgcctgggccgccagctccatgacgtgacgctgcaggccgac

SEQ ID NO: 95837 - DNA, 1872 bp, Glycine max
  Clone ID: PAT_MRT3847_57552C.1
aggattcaaatcagtttcctcaaaatcgcacccactttgcttcgcctcacacttcgaaagaaactggtttcgatggtgctagctccggatccgcagaatcgggaatcgatcacgcccttagtttttcaagtctacagagtgtaaattgatgtgctcgttcgaccgtgaatcaaatagatgcagacactcgatgacttcaacgtgtttctggtacgaaaaatgttgtagatagatgtatgaatttcttgtaatttctgtacttcattaagaattatgttcataatttagcaaatacatatgttttatttcataagtccagctcttttcaatattgaaggtccccctagatttgtcagtactaaagacagtttttccaaaaatgggtttggcttttcttcttgcgaaacttcatagtctcgagccgctgaaattgagcatattgcttcaaacagaacccatttaacctgtgttgaatcatcaagcgcctcaacttctgctcctccacatatgcatgatgaaatcactggtagttctggttctagtgcacttattgaatcaaatcgtactggacaaagtggcatttccattttacaaagcctaattgatcgtgctcgaaggactgtgcgtggatctgccgatgatataggatggcttcaacgtgatcctggaatgccgtcagttgaagatggaacagtgaggttcctggaaattctggacaacatcaagcatggtgttcacaggttaccaaattcggtggtttatttgttaattccaggtcttttcagtaatcatggtccactttactttgtcagtacaaaagtcagtttttcaaaaatgggtttggcctgtcatatcgcaaagattcatagtgaggcttcagttgagaaaaatgccaaagagctaaaagagtacattgaggaaatttattggggttcaaataaacgtgttatgcttcttggacacagcaaaggaggagtagatgcagcagctgctttatcattgtattggtctgatttgaaagataaagttgctgggttggcattagcacaaagtccctatggtggaactcctatagcttcagatcttctacgagaaggacaacttggtgattatgtaaatttacggaaacttacagagattctcatctgtaaagtaattaagggtgacatgcgagccttagaagacttgacatatgaaaggaggagagagtttttgaaagagcatcatctgccaaaagaagtcccaattgtttcctttcggaccgaagctggcatttcccctgctgttttagccacattatctcacgttgcacatgctgaactacccctggttgctccagccggtgagtctagaaaacttcctgtggtgatgccccttggtgctgctatggctgcttgtgcacagttgctgcaggtgaggtatggagagaaaagtgacgggcttgtcacatgccgagatgcagaagttcccggatccgttgtggtgcgacctaaacgaaaattggaccatgcatggatggtttattcatcactaaatgatgacctttctgaaggagatgcatttcaggtctgtgaggctctcttaactctacttgtggaaatcgggcagaaaaagatgcatgagcttgcaatgaaagatgaatgaagcattcctaatttctgttgtacctgtacatatttttctttttctctcaaaaactatatattcaatttattttttacagtctagataaaaaagtgtaaggtcatatgtgtaagaatatacattcatatatgtagctgtagagcgaacatagctgtagaacaacatattcaagcaaaactttcgtatgatttaggtaagaaattgatgatgcaatgcagttcttggtct

SEQ ID NO: 95838 - DNA, 2616 bp, Glycine max
  Clone ID: PAT_MRT3847_57553C.1
gagggactgcatatctctacaattggaaaagagccaccaggataagcaatcatgaagtgtttctccttatcctcaatctctctttttattctcctttttctctgttccgagagtgtgtcctctcaaaatgtatccgagagtgagcagcagcaagctagcattcctccaagaggttggaactcctatgtttccttttgctggacaatttctgaagaagaattcttacagagtgatgatatagtttctcaacctctccatgtccttaagaacattatttttggtgtggtgtaatagtttcacaacgtctcaatgctcatggatttcagtttttcgtggtggattacctctggtaaaggatgaaggtcgcgggtgcttgtacaaggaaggttacattcgtctgcaatttggaaaggataacattaatcaggggaacaagtacttggcttttttacataaactggaaagaatgcagggaggtagacaattacgtaagatttcgcgaacggaactcgaggaaacagcctatcatggggaagtgctcatcaagtgtcaagtcgagcagcggtatcaacgaccctagcgatgctagaaatggccagggaatggatggcgtgtggtgtcattagtataaattaaaactaggcagggctggaggctagttttcgatcgctttaaggggagtaaaaacaaagtcgcgttgttggggcgctttttcccctctccttttttgatcagtttgctgtagggggggttaggtgtgtgttgtatgtgttaatgcactgcagtgcggtacgttactgttggatcgccccgtggtccgagggcctcaccaggaatggccacccgtttcagtgtactcttccttccgtaaccgataacacgagaggaatggcatacgagggcagaggactaatcccattttgttatatcaagggatttgacgaatactaatatgataggagcaaaaggtttaatggggaactcctggcctgttctgcacctgctaccatttggatggctaactgatcctggttcaaatgaaggtccacataggtatagttacctcaatctagaagagaagaagacacagatgactctgtggtcaggggaaaagtctccccttttgtaggaaggggaggtccgaagaattgatcctcgcacatgtaatgttataacaaatcctacccttttggagattaattcttttagctcaaataacatggagtttccttatatcacaagcgtgaatagtgaagatcaggatcttggtaggccaatgagaagaagcagcatggaaataaaaacatcctacactcattcattgggcctcacaagctgcactgagtcaaaggcaagcggttgggctagtgaaagtcttaaccaataccttgaaagaatatgctggaaaaggagtttaggaaacaagcatctttcccccttctgtgtgcacaagagggaactttacttcccatttgatgaagcgagtatgtatcaagagtatcatcaaaggaaacatcatttagttgcaactaacagaataaaattttgcttggatgcttctccaaaacgcaagcttacttctaaagagttcaagagagggacattttctccctgcagttgggattcaaatcagatgtgggagttgaaccctaatgggaccctggtgaatagttattctggcttgtgtgcaacagtagaatctagtgaagatactattaattctggtggcttgcactcttggattgctacaggaagaaaaggagaagtctacgttgctttcttcaatctaagtgaacagaagagggtaatatctgcaaaaacatcagacctggctaaggttcttcctggcagagacttcagttcttgtcagggcagtgaagtgtggagtggagatgctatagaaataactcggggaacgttatcaacggcagtggaagtgcatggaagtgcactaattgttctcaattgcaacgagtcccccctcctttccccaaaaatagaaagaaagaaagaaaataagtaaagcaaaatggcatttcattggctgacttagtgtatgcttgaaaatcaggtggaaaatgactttggaggcgaaagtactttaaaaaaagatcagaattcttgttttgacttttatccattggatctgtattgaaacatatgtcgtaataatttcaacttaccaaacatacacttacatgttctggattcgctcttggatcgcaacaggaagaacaggggaaatctatcttgctttcttccccctacatataaatattactcttcccatggtgggggttaggtgaaatttgtatgtgttaatgccctccagtgcggtacgtaactgttggatcgccccgtgtttagcccaactccataggaaattaaacctgttgtatgttacgattcttttggtaaaagagaaagtgagagggaattaattagagaaaaaaataataatccgcctaattttgtttgtttgtttgagtcggtaagtgtcttttttaaaaaaaaatatatatattttccaaattaatttaaaattatttgtcgaaaaaattttcgggcggattaaaaagtaattgttttaaatttccctgaatatttaattttttt

SEQ ID NO: 95839 - DNA, 243 bp, Glycine max
  Clone ID: PAT_MRT3847_57554C.1
gagaaactgtctctgtagaggggctatttgacgttttgtaggcgtactccacacaggccaacagcagcctgcctggaaggatcatcgaggaaacgcacggattggtcagtggagccagcaccagaaatcagtgcctgcccttctgaagagaatatgcgatactttaatgggatgatccttgggccaacctaatcgtcttatgaaggatgagttgttcacatagaactttttgtgccggaagaa

SEQ ID NO: 95840 - DNA, 169 bp, Glycine max
  unsure (1)..(169): unsure at all n locations
  Clone ID: PAT_MRT3847_57555C.1
tatcaacagcgatacncacgagatnttaantgcnctaaaggcaatgcgcattntcttccgacaanattcactncgggaatggcatccntaccctnnccgnggttgaacaagttcgtngccanagagcnnctactganatacggtncattcattgagtcagtgaacnaga

SEQ ID NO: 95841 - DNA, 361 bp, Glycine max
  Clone ID: PAT_MRT3847_57556C.1
tcaccttggagctcccgtcgtattgtgagaagtggagacatgcctacaattggggttcttccttgttgtcatgcttttcatgctgagtgtttggagcaagcgacgccaaagacccggaaaagtgatcctccttgccctgtgtgtgtcaaattggaggaaaattcccctgatcaacggagccatttgagattgaggactggttttccaaagcttaaatcatctcgtgacaatggaccgtcaagaccttggggatgtgtacaggtaagtgattgtgttgaaagggctctgcatgcaccaccaagcaacacaatgttactgcttaatcaaaaccgcattaagaacccttctttgaaaagaattt

SEQ ID NO: 95842 - DNA, 181 bp, Glycine max
  Clone ID: PAT_MRT3847_57557C.1
tagctgatgcactagtctctgccactgatgccattaacagtagggtggtcccttaattattcagacttgctagaatatatcgttcctttgctaataataaatcgttttcttaatttgtggtgtcgtttattaaatttcttaacatcttaacttatattatatatatttacatacactttat

SEQ ID NO: 95843 - DNA, 925 bp, Glycine max
  Clone ID: PAT_MRT3847_57558C.1
gagctttcctagctagaagagagacctccctatagtagcaggaaatatcacttttcactctcgagctatattttgctttcttagttcccaacaatatggccaaatccactttctttgtctgccttaacatttcattactcttctctctagactcagccacttactactcaagtttttccccaacacttttgggttttcgcgaggagcagttcacccacctccacttcttcttccatgatgtcgtgacaggcccaaagcccagcatggtgtttatcgccgagcccaacgggaaagcgaaggatgcccttccgttcggaaccgttgtggcgatggacgaccctttaaccgtggggcccgaacaggactcgaaacttgtgggcaaggcccaaggaatttacacttcaatatcgcaagaagagatgggactaatgatggtgatgacgatggcattcaccgatggagatttcaacggcagcaccatcagcgtgttggggaggaacatgatcatgagtgaacctgttagggaaatggctattgttggcggcactggggcttttcgttttgcacgtggctacgctcaagccagattttactctgttgatttcaccaaaggagacgctatcgtggaatacgacgtattcgtgaaccattattgagatttactccttccgtttcgcaatagttacggagaattgtattagaaaaaaaaactcaaaataaatgttattttaacttacaatcattcaatgaaataactttagtactttttaaaaaaaaaaaaaaaaaaaataaaaaaaaaaaaaaaaagaaaaatcctaatgtcattttcatgacaatattgttagtcccgccacccgattaatgttaccttcttatctttttcgctctgaagagtaatgatattctgggtctccttaatacagaa

SEQ ID NO: 95844 - DNA, 989 bp, Glycine max
  Clone ID: PAT_MRT3847_57559C.1
agcattcctagctagaagaaggaaatcacttttcactttcgggctatttgctttcttagggcatctctaacaatatggccaaatccactttctttgtctgccttaacctttcattactcttctctctagtcacagccacttactactcaagtttaaccccaacacttttgggttttcgcgaggagaagttcacccacctccacttcttcttccatgatgtcgtgtcgggcccaaagcccagcatggtgtttatcgccgagcccaacgggaaagcgaaggatgcccttccgttcggaaccgttgtggcgatggacgaccctttaaccgtgggccccgaacaggactcaaaacttgtgggaaaagcccaagggatttacacttcgatatcacaggaagagatgggactaatgatggtgatgacgatggcattcaccaatggagatttcaacggcagcaccatcagcgtgttggggaggaacatgatcatgagtgaacctgttagggaaatggctattgttggtggcactggagcttttaggtttgcacgtggctacgctcaagccaggttttactctgttgatttcaccaaaggagatgctatcgtggaatacgatgtattcgtgaaccattattgagtcctacgtattagtttttattggtttataataaaagaacaaaagatagaattattgtagaacaaaaagaatgagtaattaaccagtagtagttttggtccaagggtgatagatgcttagaagtccaccacacacctttgcataagacttgaatttctttgagtctttgtagtaagctcctaatgtcattttcatgacattattgttagtcccgcctcctgatcgatgttaccttcttatctttttcgttgtgaagagtaatgatatactggatctccttaatacagagatttatattcttgaaaattaatgaaattaagttcatgttgctatagctccaaaaagaaagagtgg

SEQ ID NO: 95845 - DNA, 162 bp, Glycine max
  Clone ID: PAT_MRT3847_5755C.1
ctcgccactgcttttgaaaccttatatgttaagtcttgaaaaatatggcgtgccgcccaaataaaccagggagcggtgtaggatctggtattaacttgcctgggatgattgtgtaagcaagaatggctgctaacctggcttggaaggaattgagccaaacct

SEQ ID NO: 95846 - DNA, 184 bp, Glycine max
  unsure (1)..(184): unsure at all n locations
  Clone ID: PAT_MRT3847_57560C.1
gtcgcanggcacgcgtacgtnagctcgggaattcgggctcgagnttcaccttcacaatnagacanaaaaaaaanncaaaanangggggtcnccgttcncnaangncnnaggnngnttntgggnnatnncnncgagaggggnnaggnaancctnaagcccacnaggcnanccccttgntttgacn

SEQ ID NO: 95847 - DNA, 363 bp, Glycine max
  Clone ID: PAT_MRT3847_57561C.1
ctgaggctttctcgcgcgctttcatttgatctcacctaatcaagttcgtttctgtgactgcatacagaccaatggtcacctctgcgaccagagagggactgactttcatcaatcaatgcattacattacactgcatggtatataatcatacacacacacacacacacctgcaccaatttaagcttagaggaaacggcatcgtccacggctgagaaggatgcgtcgaatcttattctcacgccttgaagactcaggatttaccactacagcacaacctgctgcattgcctgacgtgaacgctcttatctcatcagcacttgcggcgagtgcagatccttctacaacaaacatactattcttatc

SEQ ID NO: 95848 - DNA, 407 bp, Glycine max
  Clone ID: PAT_MRT3847_57562C.1
cttttgggccatgtattggtcagaaatattttaagttgtttatgtaacttctttatttggtggccattgttaaattgtttttgtatttgttctttaaaatgtgactagcacggattttccatcaaaattgttacattacttttgatgttttggaagggatgactggaaaacaattaaaacataaatgctagttttcccctcaatttaaatacccttaactaacttttttagtttttacttaaatggtgacacttaagactcacttattaattttgacaatcacatctttggttatgacgccatttatgtgaatctgctgtcgaaacctgtcattatgatgtggaaaacctttgggggctatctgatttttgttgcaattgttggaaaatctctcgatacaattggtt

SEQ ID NO: 95849 - DNA, 322 bp, Glycine max
  Clone ID: PAT_MRT3847_57563C.1
acaaacataagttaactggaatatatgccatagattatctgtcccacgctttttttctattacgggtttatccacaattttaaaatcctcactcttctcttccactctctcctgatccccttcccaatccacaccttaccatatccacttccttgattgatacaggactcattgacttgatagcaacacccgtacaacataggcatgcattataagctagataaactataaaatgctgcaactactgccgctgctcaaaagcaagagctgtacctcattcccaccatcttaacgtccatatatgctcaacaaacagaaaact

SEQ ID NO: 95850 - DNA, 510 bp, Glycine max
  unsure (1)..(510): unsure at all n locations
  Clone ID: PAT_MRT3847_57564C.1
cttcttggccttcacatttggctgacatcggccaacagatctcagaaagtggaaacagaagctgcagaagaagaagataacgtacaagcatcaatcaagctctcactgctattccccaaaatatttcaaaaaacaaaacaagaagaagaaaaaactgcaatgtatggaaaagtggttctctcgttcatcttcgtgctcttgctcgtcttctcttactcaattttcattggcaccctcgacattcgatcttatttcttccctcgcctaaagttacccgcggctgcacctgctccctgtgcacccgagcctcctcttcgggttttcatgtacgatctccctcgccgattcaacgtcggcatgattgaccgccggagcgcgtcggagacgcccgtcaccgttgaggactgggcggcgtggcccgtgaactgggggctcgaagaagcagcacagcgtggagtactggatgatggggtcgctcctcacgcccgcgagggcagagaagcngtcagg

SEQ ID NO: 95851 - DNA, 1148 bp, Glycine max
  Clone ID: PAT_MRT3847_57565C.1
cttcttgcttttaacttaaaaatcccaggttcatcaaattgttggtgtgtaccagcaattttgctaggtatgcctaaacattaaaaagttataaaagaaaggattgaattccttgggactgcgtactataactgaacttcctaattagtttttcttttctttttttcacaaagggctccctaatatttagtctagataatcaggtaccaattccatttctttacagccaagaaaggataagctggggggattgaattaagcagcattacttcaaaccagtgaagaaagcaacctatgcaagaggcttgagtttcaatcggagcaaatgaaatccatagggagcacctcagtatcacaaacccaaaacttagtaacatcttttaatacaagtatacaacagcgatcccccaacataattccaaaatgttcttgaaaacaaaggaaacaagtctctcgctcattccctccgccttttctcttttctggaatgtgaactgtctttctcattgctataacgagaggatctatttggagattcatgctttctgtgcttgtgacgttttgagtgtttttcactcctgcttttttctcgggaagaacctttccttctcccttttgaccttgaactgtgtctatctcttctgtcatcatcactggatgaatgacttcctgcatcatgcctcttatgccgttgatgtctggaccgttttcggctcctttcctcttctaatgaagaactgctgctataatcccggccctgtgttacaggggttttatctttcctagactcatcatatttttccctattagatcgtttttggctcctttcttcttctgaactgctgtcattgtcttggctggtggttcccttggttttgttattaccgctctcaagcatatttccatcaatggtgtcatcaccttttgatggttcacaatcatgagcaatgtgctgctgatcatttggcaaatcatgatttaaggacatcacaccgttgttttcactcttcaggatatcggttcttgcatcttcattaaagatgtctttctgaggtgcaacattcctggacttttgcatagcgtaaggcatatcaggaggaacctcaattcctagttccttgcccaatgattccagaaaatcacctcgt

SEQ ID NO: 95852 - DNA, 521 bp, Glycine max
  Clone ID: PAT_MRT3847_57566C.1
ggagctgctcgcgtgccgtaccggtctctgcagtgccgacccaggccacccgtctgtggttgattcggttctccagccttcaggtggtactcgatggtcctcgcttggctgttggcaatcactattccttagttaatcaaataagatgttggggagagcacctgctaggagcaatggctgcgaagtgctacaaaatgctgggcgtgtgcaagaacgcttcacaaggtgatctgaagacctgcttcaacaaagcggtcattacgaaccaccccgaccagggcggtgatcccgataagtttaaagagctggcgcaagctcatgaggttctgagggaccctgcaaagcgtgagagatatgctcagtatggtgaagatacgcttaaggatggaatggcaggtggcagtggccatgatccatttgatatctttgcatctttctttggcggtgggagtccctatggatcatgtggaagtagtccaggtaggaggcataggcgcagagatgacatggctcaccctctc

SEQ ID NO: 95853 - DNA, 432 bp, Glycine max
  Clone ID: PAT_MRT3847_57567C.1
aaaaccaaagaaaaaaccccctaaggggtccaaaagcttcccccccaaacccccggggccccgaacaagacttaaaaaaaattaaagcaaaacccggcccccaggggaccaactttgggaggaaccccccctacagggggcccaaaaaatatcccccccctaaggcttttaaaaaaaaaaagggggggatttaacaggcggggggggatcaaaaaacccggggggacccaaagcctggaaagggggcccaaaaaaaacccctgggggggttgacccttggccaaaaaaaaaaaatccccccccccaattggtatcctggggggggaccagggggggaaaccaccggcaccttgaaaaaaaccccttgcgattcaggggggggggcctccaaattttccttggttctaaaaaaagccccccccccacttaaaa

SEQ ID NO: 95854 - DNA, 275 bp, Glycine max
  unsure (1)..(275): unsure at all n locations
  Clone ID: PAT_MRT3847_57568C.1
gangggggaaatctcttcttcaatggcgggcanantcatctcgcagtagcgctaaacgccnctttatggcagaagancgacaatggantttncaaaaaancaagcnagaaannagggttaggttnccaaagggaaaganagtnnagnccaggngatganctggtggtggncaaagcatgttgaggagggtgaagttgattggtgatgctaaaactgccaccactgctgcaaaagagcgggaaaaactcagaaggtttctangggaaagnngtnag

SEQ ID NO: 95855 - DNA, 229 bp, Glycine max
  Clone ID: PAT_MRT3847_57569C.1
gctcacttgtagaagctgctactaatcacggtcataagaccaacaactcacaggatgtgttagctgcacaacatgattctgcataaaccctgtacctgaggtcgcagacattgaattctatctcaaggatctccaagacccgttcgactgttgataaaacactgactgatgctacatatgcatccttactatacgcagacacaactcatgaccccgatgtggaccatat

SEQ ID NO: 95856 - DNA, 393 bp, Glycine max
  Clone ID: PAT_MRT3847_5756C.1
atggaaaaaaggtgatcaggttttttttactttattaaataaaaaaattaagaaatgtttgaagccgacattaaaactcgaaattgatccttatgaagacacctccaaggccaatccttgcgatgatcctcccaataaaaagtctatttaaatactatctacatgaactagcctggacctgaacttaaaaatctatttgtttcctctcaatttttttttctttgaattttacaagtgtatcaatgctacctaattctaaaacacacgaaacagggttcatattttgcttatacttatataagataaaaacaagtggctaacatgttcaaccgcttttgtgtagaccatgcaaaagagaagattgaaaggacacatgacctagtggcactggcc

SEQ ID NO: 95857 - DNA, 365 bp, Glycine max
  Clone ID: PAT_MRT3847_57570C.1
atcgaacttaagttcaaggaatatcaagttcgaaatacaaaattcaaatcaaacacaaaacaaagacaaacatgaaataacaaaaaaaattctttagatacatttggctttcaataatcaagtacatcgatcctttttaattttgatgaccttcttcaacatcttagcacttgcagcatgtaattcatcttcaatttcttcaattgaggccctctaagctagtgttaattcgtccaaattcttgatcaaatcaattctctcgccaaggtcagcaaaagcagaatcatcactcccacaaaatttcagcatcaaatcctgagagattttgtctgagatgagaacaggatctgctgagttgctcgcgc

SEQ ID NO: 95858 - DNA, 243 bp, Glycine max
  unsure (1)..(243): unsure at all n locations
  Clone ID: PAT_MRT3847_57571C.1
tcactagcgcggccgctttntttttttttttttttttttgcgaaccaaagaacgggggcgggggtattgatttaagactaaagataacgtggccataaaaactggacaatgaatggacaatgcggccagcatgcttttaaaggaaatacaactgattgggcccgatccattcagactcacacatatttttgggcctctacaatccagcaatatgaccgggctcttgatgcaaaagatgttttc

SEQ ID NO: 95859 - DNA, 1331 bp, Glycine max
  Clone ID: PAT_MRT3847_57572C.1
ggactgacaccatggtgaggctcttgataatggcggtttattacattggtgatgaggctggctctgaagggactgataagaagaagtcatctggtttgatgcagaagaaagggaagtggaaatcggtttcaagggctatgatggagaaggggttctatgtttctcctcagcagtgtgaggacaagttcaatgacttgaacaagaggtacaagagggtgaatgacattcttggcaaaggaacttcctgcagggttgtggagaatcagagtttgttggattcaatggacttgtctccaaagatgaaagaggaggttaagaagttgctcaattccaagcacttgttcttcagggaaatgtgtgcttaccataacagttgtggacatgggaataacaatgctccacagcaaggagagtctgggggtgaagtgtctcagcctcaggctcaacctcatcatcatcagcagcagcaacaacaaccgcaacaacgatgttttcattcatcagaggttgggaatttggggggctcaggtgttgagggtttgaggatgttgaaagtgggaaatggggaagagggtgatgatgactccgaggatgatgatgactcagaggatgattcggacgaggacgaagatgattcgggagaaggtggttcaaggggtcatgtggggcatggacatgaagatattgaggatgagaatgatggaaggtcaatgagaaagagggcaaggaaagtaggaggggtttctatgtcaccacagttgatgcaacaactgagtgctgaggtgagtggtgtgttccaagatgtaggtaagagtgcttgggacaagaagcaatggatgaggagcaggataatgcagttggaggagcagcaaataagctaccatactcaagcttttgagttggagaaacaaagattaaaatgggcaaggtttagcagcaagaaggagagggaaatggagacagccaaacttgaaaatgaacgcaggaggcttgagaatgagagaatggttttgctcattcgccagaaggaatttgaattgatgagtcttcaacaccaacaacagcagcagcatcaacaacaacattcttccacctagatctaggggagatgatttttctgcggttaattgtattgatagatgaaactaaggtatagaaaagatgtagatcgattaggcctaatagaggaaagtggttgttctctttttggggtacttattataagatggttgttattgaagaaaagaaaaatagtaaatttctgtgtctaccatctagatacccttttgtttatttaaacatgctttggttattactattaattttgtttt

SEQ ID NO: 95860 - DNA, 142 bp, Glycine max
  Clone ID: PAT_MRT3847_57573C.1
gcaaactaagggaatccctttattatttctttaatacgctcacgtgtaatgtactctattttttctaggaaaggaaacatttcacccagtacattacagtgggaatgatccaccccggcaataacatttgccgattttccct

SEQ ID NO: 95861 - DNA, 437 bp, Glycine max
  Clone ID: PAT_MRT3847_57574C.1
ggatacaaaaccttcatatacgatacgtaaaaaagtgagaagacatactcgtacggtcatccatatacacacatgaactagattgttctaaccatagggttcttacaagaccatcattgtcggcaccctactcaacacaacatatcctttatcgaatacacggattaacaatggaaggaaatgacgcataacatacactcctgtgtgctgaagcgagagaccgaacttgaatggaactatcttgtaaccgctgtccccaggctgcatatgattcttccatgacccctgcaagctgcactgtgaaggaccgagcataaacgatgagcgtcgcatcatgtgagcctggattacatggagcaaccaggcttctccatgaggcaggcacctggcaagtatgtgctgcgaccattatgtccttttgtctgcacaacatcaca

SEQ ID NO: 95862 - DNA, 243 bp, Glycine max
  Clone ID: PAT_MRT3847_57575C.1
cttacctttgcgagaagactacagacggtggactaatcccacactgtaaaccctttttcggtctaggtgtgatgcggctatttgctgttcacactcagaatgcagaacacactctttaacccgacccattcctttatccccacttcaccacactctatcagatccatgcctggtcttgcttctttgtacaatagagcctacatcgacgcgtaatctcccttggtaaccgtgaaacttgaacaa

SEQ ID NO: 95863 - DNA, 107 bp, Glycine max
  Clone ID: PAT_MRT3847_57576C.1
caaagttaactttgtaagtgctactactactgagccactaaactctgcatctggcataaagtcctttctgggtacaaatgtacgcagttcatatccgatgaaatgat

SEQ ID NO: 95864 - DNA, 220 bp, Glycine max
  Clone ID: PAT_MRT3847_57577C.1
gggggtgttattttataagggcttcctaaacccttcatttcttttaaaatgccccttgctttttttacctgtcagaaatttcccttttaatgcaacccaccctgggggcccccttcattatcccttttaggacaatggccccattaaaaaaaaaaaaaaatggatctccatttttgtttaacctgcccgcacggaccccaaaaatttatttattttcttt

SEQ ID NO: 95865 - DNA, 471 bp, Glycine max
  Clone ID: PAT_MRT3847_57578C.1
gtcgaagcatgccgttagggacaaaaatcagctgcttttcctggtacttaagtttgcagagggcattgctgtggttgacctaaaagattcttacccaaatgtgatggaagacttgcaggtaaattatttcttttagttaattgttttgcatgaaaatgaaaatttcttggcattcatttttcggtaacattggtggaattttgattatagatatatatgttcaactctcacattgccttgggctctttgagcaactattgatatcttacagatttgatttcttcatgtgcatagttaatttttggaagagtcatgtgtgctaaaatcacgaatcagtatgacagaagctcaactaatcaaatgttattggcaataccatggatgaatataaaaatcaaatatttcaggggacaaagaaaacagtataagtaaaaattagtttaaaaactagttatgcctacttgtggtctt

SEQ ID NO: 95866 - DNA, 433 bp, Glycine max
  unsure (1)..(433): unsure at all n locations
  Clone ID: PAT_MRT3847_57579C.1
ccaggngaccagcaaggncncannggcggcagnggcggnnncnnncacncanaccannaaagancnggaaccanncnncaaggcggcggcnncacagnncaaacngggncaancaanccccaacacnagggggcggncacaggcnccggnggnnangggggngnccanggcancnnngactgagctttcgnncaacggggncggcnncanaagggcnaggaanncaaacancncccncacaaaccgaagcaccaanncaaagaaagccaggacggananggacagnaccaanancgaggccaacannnccancanggcnccaanggncggnanaccaccggccgnaaannnggaagggccnacacggnngaagcacgggnncaaggangccanggcnaaaggagggnaggncaaggncgncacagaacccttc

SEQ ID NO: 95867 - DNA, 277 bp, Glycine max
  unsure (1)..(277): unsure at all n locations
  Clone ID: PAT_MRT3847_5757C.1
gaagccggaaaacattaaaaaattaaggattcggtacaatttgttaggctctttatagccaaggaaagttatgagacactcctacatataacacgtccaatgaaacagggagaaagaactttagtcaaagataaaaagaaaagggggtgtattaaaaaagcatagtattaccgntttcccacccgagaatattaacaatagtatgcgggcttccttatacaggctgtatttgcaaataaggatggtaattgttggtaggtgaagaaggtggaggagt

SEQ ID NO: 95868 - DNA, 340 bp, Glycine max
  unsure (1)..(340): unsure at all n locations
  Clone ID: PAT_MRT3847_57580C.1
cncggcccgagaccacacacatttctttagcaaacgcaaataataaaaaacaaggggggagccaaggcaacgaagcggatctcgaaggaactcaaggaccaccaaaaggatccacctacctcaagcaacgccggtccagagggtgaagacaaagaaaactggcaagcaacaataatgggtccaacagacagaacaaaagcaggaggggaaaaccgagacactaatcatagcccaccagagtaagacgcaaagccaaccaaggacggcaacaagacgaaagaatatgaccaaaagataaaaagcaaaggaagcatatgcccagacacaaagaaggagcaga

SEQ ID NO: 95869 - DNA, 119 bp, Glycine max
  Clone ID: PAT_MRT3847_57581C.1
gttatgtaggttttccaagcttcaacgcatgtaataatgttaagtccaagtctatatatgagtgaatttgaatacaattattctaatatcctatatccaccattcatattaatatttgc

SEQ ID NO: 95870 - DNA, 640 bp, Glycine max
  Clone ID: PAT_MRT3847_57582C.1
atgtgtttgtgggtggatgaatttctaatttgctacttttgtggaagctcacctgacattttgcaaagataatgtttactgatgataacttcatagagttgttggttatatttggtatttttgtcattgaactcctggttatttcaattccatatactgggtaacttttggatatagtccttgtgattattattttggctggtggttgtcattttagtttctatggtttttcttgtttggttgatggttcttccagagtagtaattgcacattattattcaaattccagatactgggtaacttttgaaatatagtccttgcgacgattgtgttgggctgatggttgtcattttagtttctatggtttttcttcttcggtagggatgattctgatggttctttatttacaacatggaagactgctttccagagtagtaattccacaagtgaaatttaagaacttctgatatcaacatggctgtatagcttctgctgaatcctgatatttttcacgttgatgcattgactgggtacaccaatatggcacagaaaagggatgtgtatcttcttaaaatgagagaatgcccttctccatgtccaatttctttctactgttgttttgaagttacttgggggcata

SEQ ID NO: 95871 - DNA, 177 bp, Glycine max
  Clone ID: PAT_MRT3847_57583C.1
ctcacacgtccgcccacgcgtttagttactgcctcaattggacatagtatggggtggggtcacatcctaaatagccaagcgtccatgcttagatcgtagtcgaactgtacgtttcctatcgtccgatgatgcattatcatcaaatcgtaacctttctagagagagtcgacgtttgac

SEQ ID NO: 95872 - DNA, 250 bp, Glycine max
  unsure (1)..(250): unsure at all n locations
  Clone ID: PAT_MRT3847_57584C.1
cgacacacgacacacgacacccacaagtataagacaacaaattccccactctctcctcttgagctgaaacaaaacctcatccatggcttctcttctccgcttcaacggcgtctccctctttcccttaccttccccacccacacgtgaccccaatctccccaaaccggtcacgcctggaacggntcgcgcggaggngaaagagacctctgcacccgccgccgccacatcctccgacgaaaagatccgtgaa

SEQ ID NO: 95873 - DNA, 340 bp, Glycine max
  Clone ID: PAT_MRT3847_57585C.1
atggcccaggagaaaaaccggaaaaaggatgaagaagatgaggatgaggatgaggaacagatgacgtattcattcccccccctatcagaagaagacgaaagcaagaaagagatgagacacgcagagagcgaaaagtgaagatttgagttcgaagactaaataagaccctttctttcgttacaggtcaactctcttaaaaccatatggcgattccgtctcaagtcaccacctccccaacttcaatctcgaactccgattggagttcactcaacccacaccctctttccacctgctgcctgtacctatcgtatctacggatgcttcttctgggacacgacga

SEQ ID NO: 95874 - DNA, 925 bp, Glycine max
  unsure (1)..(925): unsure at all n locations
  Clone ID: PAT_MRT3847_57586C.1
attcattggcgtggggtgttaattcggctcgagatagtcttatcctatcatttagtttccccgcctaaacatgaagctattctcgttttctctagcatgtgtttttgtttttgcccttctagcttcttccctggcttcagcagctatcgtggaacacattttcaaagttcaaaacacgactatcaaacgtttttgcaaggagcaagtgattgtgacagttaatggacttttcccagggccaacgataaatgtccacgaaggtggcactgtaattgtccatgtattgaacgagggaccgtatgatatcactcttcattggcatggggtgtttcagctctttagtgcttgggcagatggtcctgaatatgtaactcaatgcacaattagtccgggaactaagtatacttataaattcaatgtgacacaacaagaaggaaccttatggtggcatgctcatgcatcatttttacgtgccactgttcatggtgctttcatcattcaccctcgttcagggcaatttccctttcctaaacctttcaagcaagttcccattatattaggtgattggtatgatgctaatgttgtggatgttgaaacccaagcactggcctccggtggtcctccaaatgtatctaatgctttcacaatcaacggcttgcctggcgatctcttcaattgttctcgaactcagacattcaagatgaaggtgaagcaaggaaagacctacatgctacgaatgatcaatgctgcactcaataaccatcttttcttcaagatagcaaatcacactttcacatttgttgccttggatgctgcatataccgaccactacatcaccgaaatcattgtcattgcccctggccaaaccattgatgcactattcacagcaaaccaacccttangttcatactatatgagctgcatc

SEQ ID NO: 95875 - DNA, 299 bp, Glycine max
  Clone ID: PAT_MRT3847_57587C.1
gaaagaggagaagcgcgtacaaactatcaagttgtgcctaaagagaagcaacctgctgcagctaagactgggccgaagggggatgataaaaaagctccacgtgctaccattatcatgtgatctggaccaggatcctttatgcctacaaattgcgaacttaccacactgtatgggaagtttgaagctctgaatgaatgaaacacatctatgaatctctggagactgcacttgctcctgtgactgttgctgaaagcctccgatgctgaaaatgacgtgagccattcacagaacatgaaccc

SEQ ID NO: 95876 - DNA, 186 bp, Glycine max
  unsure (1)..(186): unsure at all n locations
  Clone ID: PAT_MRT3847_57588C.1
cccacgcgtccgatnttaactgtgtgtgtgtgacaaacgtgaaaaggacttttttttatgagggtgagttaactttgctatttattatctactatgccgctgaaaagctaaacctggcatacttaagtgcttatctgaattcccttggaacccaataccggcatggggcaaaatttggcactgggg

SEQ ID NO: 95877 - DNA, 244 bp, Glycine max
  unsure (1)..(244): unsure at all n locations
  Clone ID: PAT_MRT3847_57589C.1
attcaatctacatgaatgctntttnaaacacttactttntcctcctaatatttgaggcagacntgttgaacaaaagaaatcatgataggcagtctttatattgttcatgattttttttgtcattctnnttatataattagaaaccnaaaaggtagnagttaaaagggaaagtgtcaganaancaaggaaatgantaatataataatacaacaccatgatgctgaattngtggtgttttctatga

SEQ ID NO: 95878 - DNA, 372 bp, Glycine max
  Clone ID: PAT_MRT3847_5758C.1
tacggctggaaaaaaacaccaaaaggggagagaagctcatagaaagaactagaactaggggtccatctctgccatctgtaaactacaactacttacgactttaactttgctgttctaccatccttacttattctgaagggacgctacttttatatgaggacatcggacgctcagaagccaaaaaaacctaaacccagtgccaaccagttcaaacctatcattactgtttgataacagactagctgcattgacatgtaaaaagcatatatggacaaggaattgcatttgactctcaactaatacattcttggccgtattctgaattatacaccccacaatgctgacattaacaatactattattggagaagga

SEQ ID NO: 95879 - DNA, 508 bp, Glycine max
  unsure (1)..(508): unsure at all n locations
  Clone ID: PAT_MRT3847_57590C.1
ggctcgagctctcgccgtcaacaatcactgatgttaagcgctttttctccttgcactaagccaccacttcctcatttatcatctccaaattttgtaacccttagtcgcttggtttgtcagttatttttatcaaaacactatctacgccaatagccttaatctcctcattatccttatcacagatttgaaacctttccaacctctaccaacaccaccatacatatgaaactccctaccaatttctttaagaacaagcccatagcaaagaaaaatccaagcttcaagcactaggtgataaaaggcccgacaataatggtgattgtgacttcgttgtggtttgcacagtccggccacaccctctatgtcgcttccatccttcgctccgactacttggatctttgattttggctttcgatttttggtctcatatttttgttggttggattntgggtctcgaattatgtgttatcctctattttggggtttcaaatttgggtctcaaaattat

SEQ ID NO: 95880 - DNA, 3872 bp, Glycine max
  Clone ID: PAT_MRT3847_57591C.1
caacaacaacaacaactctcgctgttttcggttatcacaaagcacatttgacatcactcactcactttctctcttctcttttcttcatccgttctactctcacttccgatccttcaattaatcatgttcataaagaagctcgtggagaaagcatccataaagatgcctcttggaaattcattggatgggttaaaaggtagtgatgtagatccacgtttggtatttcatcaaggggtaccatctggtggtgccaagtttgcctatgacaatattcagaagatactggccctatctaccaaggatggacggattaaactatttggagaggataatgcccaagtcctacttgaatctaaagagcctgtgcctagcaagtttttactgttcattcagaaccaaggcatccttataaatgtcactttcaataaccatattgaggtttgggacatagacaagaaactgttgtctgatgtgtacattgttaaggaagaaatcacttgtttctcagtcattaaacattggccccttaagtatattcgaattcctattggctatattacatatttgcagaattatgaaatactatcgcagcatgtacagatgaaaaacgcaactgtcctatcaactgcttatacaaagtcaactcaagcatctgacaataaagaggtgactcacgtactgccgcaaccagcaaccaagagctagaaggaactcataatctttagtccaggtcaaataatatcaatgttttttagagaaatcagatcatgtaacggtactggtggtaaaacattaaagaaaaaatatcagcattcaaggaagatagattatattgacctagagggtccttttgaaaatcggaaagttcaaggcaaattgagtgctcataatatgaataaattggctggctcttttcaatcagggaaaggttgattgaaagagattaagagaaaaaacacagcaacatcaagatagaatggacgacatgaaggacaacatcctacaatagatcaagtaaagaagagctatgagatgagcaagccggttcagtcattcgaattgggaagttatgtggatgtccttctgcatgtgaaccaagcgtcgttgcagggtcagaacccacgctccaggagaatataaaaaaactgcaagttatcaacattctaaccacagaaagggatgataacgacaaatcattatcaacgatggcaatacaactgctttggtctgcagaacaggcaaggctaactatagaatcatcattctattggattacacctaatataaacaaagtcccacttcagtccctcttgtactaaggctttctttattttgttactacagtcacatccaaatatcacaacagcaaaattcatctccaacaattccaatttttttagttctgaagatgagtgttacaatcagctggtaaagaattatccaccacttgttcccattgaaacaaatctcaaagatgggattaacttcagttcttccaatttcactggattttcaaacattagaaacatgtacataactggacacagcaatggagccataaatttttgggatgcaacatgtccctttttcaccccaattttgcaattaaagcaacagagtgaaaatgatttttctttaagtggtatacccttgacggaattatattttgatagcaactctccactccttttttctggtgaccaaagtggaatggttcgtatctatagattcaaacctgaaccatatgcctcgaatagcttcatgtcccttacaggaggtacaaagaaagggaccgatcacgtaatccacagtatgaaacttataaagactagtggtactgtaatttgtatgaacatagatcacagctcaaggcatcttgctgttggttctgaccaaggaaatgtttcagttatcaacatagatggaccatctttgttatatcggaaacatattgcaagtgaaatttccaccggtatcatctccctgcagttcaaaacctgcagtttgcatggttttgagaaaaacattttagcagttggaacaaaggactcgtctgttctaacactagatggtgaaactggaaacacattgagcattggaactattcatcctaagaagccctctaaagctatatttatgcaggtgttggatggacaaggagaacaaaccgcaggatcagttacaaaagatggcttagagttgaaagaagggattcatattgaagatgcaacagcaaagcagttgtacattctgctgtgttctgagaaggctttgtatgtctattcttttgcacatgctgtacagggtgttaaaaaggtgctttacaaaaagaagtttcattcctcttcctgttgctgggcatcaacaatttacagcctctctgatattcgtcttatactccttttcgccagtggaaaagtagaattaaggtctttcccagagttaactctaatagtggagacttcagttagaggtttcaattattctcctccaaaattgaagtcattttctgacagccagatatgttgttcatccaaaggagatcttgttttggtgaatggtgaccaggaaatttttgtggtctcattgttggcccagagaaatattttcaggcttttggactctgttagctgcatctacaggaaagaaaggatgctatcacaagaagagcttgttcctggccctgtcatccataaggaaaagaaaaggggtatattcagctctgttatcaaagattttactagcagtaaagaaaagcatgcacccctcttggaaaagaaagatcccaaagaaagtatacgggaactctcagcaatattctcaaatgcaaactttgcatgtaatgataatgttgataagccaacaatggatgaaaatcagcttgaattaaacatagatgatattgacctagaggatcatgtagaaaaacgcaaagaacaaagcatattgggagctcttaataagaagaaattggctggcacatttcaatctctgaaaggaagattgaaagagatgaagggaaacaaccaaaaaacatcagataaggaagggcaacaggatcaaaaagatggtgcgcttgatcaaattaagaagaaatatgggttttcttcttcctccaatgtatgaatatatctatcacatgcattctcatcatgcttgacttttctaccacataacaattcacaagcatggcattttatgtgcttatttacaagcgaaaggtgttgcctaggccatagtgctaatttctattttggagttgtcaagtgtatttgttaatgcaaacatagtttgacaatcgagattgatcattaccaagtatctctaatctacgatttattacctacccattagaggttttaatcggttgtactttgtgccagtgttctttttattcttctgcgaagaaagtagcacttgatttaattcgttcctttcacttttatactctagcatgctaaacgttgtacaaatttcaaaatagtctttagttaattttgaatgaggcagtacaaaaagagataagcttttctaaattggcagaaagcaagctgcaggagaacatgaaaaaattgcagggtatcaaccttcgaaccacagaaatgcaagataaagcaaaatcattttcaacattggcaaaccaagtgctgcggactgcagaacaggaaagacgaaattaggaagcacctactcatcgattacaccaaaaattacaatgactttttacccctcctattgtacttaagcttctttattttattgtatttatttttttgtttccccgtggaagactggattatcatctcagttttgggttgatctttacatcgagtgaatataaattaagaactcatgtattctcttttttgcct

SEQ ID NO: 95881 - DNA, 906 bp, Glycine max
  Clone ID: PAT_MRT3847_57592C.1
tcccacgcgtccgaaaacttgcttctctcataatctcatcattggtccaacatagcccagcctaaaatttaagtagcagaagctagcactagctagttaggtttaatttctgtcttgtaattgagacaatttatgaaataaccgcacaattgattcatgatgaagaagagagtagcaagcaccagcaatgagtcctctaaacttgatcgcaaaaccattgaaaggaaccgcagaactcacatgaaatccctctgccatcagctttcttctcttattcctcccaatctcaaaccagtcaaacccaagttgatgctagggctgcaggaccagctggatcttgcagcaaggtatataagacaaatgacagagagagtagagaaactgaagaggcagaaggagcaagccatgtcaaaccaaagcaatgatggtagaaaaatgttcaacaataatgttgagtccaaattgccaatacttgagctaagggacttgggttccggcatcgaagtgatattggtgactgggttgaacaagacattcatgttgtacgaagttattagtgtgctcgaaagagaaggtgctgaagttgtcactgcaagcttctcaactgttggggacaagatattttacgttgttcatgctcaggctaaaatatcaagagtgggagtagagaccacgagggtgtataatagacttcaagagtttattgtcccaccagaaatctggccggaagatgtgtgaaggcttgagagttatccctgtcttttctatcactggctagctagctgtatatgtattgttgcctggccacatgcaaattgatagtttgagagctatatattagctgtgtaccaaaataataacaataatatatattagcttttctttaaaaaggcagaaaagagaaga

SEQ ID NO: 95882 - DNA, 175 bp, Glycine max
  Clone ID: PAT_MRT3847_57593C.1
ggctcgagtacttcttcatcatcattgtcaccaccactcacatagtggaacagtagtatctaactgacatgtatctgacaaggtaactgatccactgacattggaattcccggatgaaaataggaataggagcattaaagtgatggtgctggctacggtggtattgcaaaacatg

SEQ ID NO: 95883 - DNA, 327 bp, Glycine max
  Clone ID: PAT_MRT3847_57594C.1
gggaaaacggacggtcctatccaccacttaccggaaggttgacagaatgccacttactatactcaggtggagctaatgcacagaatgacattgtcatgaatatgccaaaagctgttcaaaaaatgtggacatatcatgcgcggaaatcatgcatctgaggataataagatcacttctccctacattaaaagaacagtgtcgtgcttcaagcatctcgaaaagatgcttcaaacaaaatcgatattcaggctaattccaacacgcttgcgcacaatgaatagatgctggaaaaagttcaattgacacttggacaccaagtattttgta

SEQ ID NO: 95884 - DNA, 731 bp, Glycine max
  Clone ID: PAT_MRT3847_57595C.1
cactgctcctcatctgctcgaaaactgtgttgcttttttgcagtacatatgtctggcgcaacccgatagtgatcttttgctttgttagtttggaaagtgattggaggtggttggagtagattagcctaaagcagagcagtatcttgaaagagctattttggctgatcctggcgatgctaatgttttgtccctctacgcggatttaatatggcaaacagagaagaatgctgatcgagctgagggctattttgatcaagctattaaaagtgccccggatgattgctatgtgatggcttcttatgcaagattcctctgggatgttgaagaagatgaagataaggactgtcaacataagactgatcacggccatgcatatccacctgatctttttcaagaaaccaaaggcagccctcatgttactgcagcctttcaatcctacgtatctgagtgaacttggatatatatcttacaagacaaatgaaccataatagtctcaattctcaaacaataatgcttgccagtttttcacctcttggaagtggctactatatagggttgagtaaagtagagatgactatctagctgtaaatagcttatgccataaataagagaaacctgtatgtattatgtttgttgtataccagtggggcttcgaatgctgtatgagaacatgaaattttggtagaaattataaggaatagagtgttttttcttgtttccatcattctcct

SEQ ID NO: 95885 - DNA, 200 bp, Glycine max
  Clone ID: PAT_MRT3847_57596C.1
agacccccggccaacaataccaaaaattagaaggaaagaaattacacgattctcatggtactctaaaaagaggttaaaggcaccgtggtgaggcacacagtaaaggcaccgaatacttttgatcattaagcaggaccttatacgacttctaaacccttttggaaatctgaacaccctcataattatttgctccaggaaac

SEQ ID NO: 95886 - DNA, 1661 bp, Glycine max
  unsure (1)..(1661): unsure at all n locations
  Clone ID: PAT_MRT3847_57597C.1
acaggaagttagagcaaactgccctcagtttgaagtggaaatgaagatttgaaacggaaaattttagaagccggaggcataagttaacactctcacagggaaaatggcttagcactgagagcgagcttccaggcgagctcaacggagggagaaattgagaaatcagagacagagttctcactccaaattggaagatactgataaaaaggtgagtgagttggagtctgtactagaagcagaaatgaaatacagtcaaaattctctgaaccaaataagcacactagaagagaagcgtggtgcttcagaagggcaagccaataaataccttgatgatgtatctaatctgacatcagaacttgaggcaattcaagcacgagcctcaaccctcgaaactactctgcaagcggctaatgaaagaggaaaggaattagaagattctttgaatgcagtgacagaagaaaagaaaaatttagaagatgcttctatcagtttgaatgagaagcttgctgagaaagaaaacctattggaaattttgagggatgatttaaatcttacacaagataaattgcaaagcactgaaagtgatctcagggaagctgaattgagagagagtgaaataattgagaaacttaaagcttctgaagaaaaccttgtcgtaagaggaagagatatagaggagacagctgcaagacactcagaacttcaattgttgcacgagtctctgacgagagattcagaacagaaattccaagaagctatagaaaaattcaacaacaaggattctgaggttcagtccctgcttgagaaaattaagattttggaggaacagatagcaaaggctggggaacagtctacatccttgaagaatgaatttgaagagagtttgagcaaactggcttctttggaaagtgaaaatgaagatttgaaacggaaaattttagaagccgagagcaaaagttcccagtcttttagtgaaaatgaattactggttggaacaaacattcaactgaaaaccaagattgatgaacttgaggaatcattgaaccatgctctatccgagaaggaagccgctgctcaagaacttgtgtctcataagaacagtataactgaactgaatgatttacaatcaaaatcctctgaaattcaatgtgcaaatgaagctctcattctaaaagtagaatcacaattacaagaagcattgcagaggcatactgagaaggaatccgaaaccaaagaattgaatgagaagctgaatacactagaaggccaaataaagcttttcgaagaacatgcacgtgaagcagttgcaacttctggaactcataaagctgaactggagcagagtctcataaaattaaagcatcttgaaattgtcattgaggaacttcaaaacaagtcactccaccatgaaaaagaaactgcagggctaaatgaagaaaattcaaagcttaatcaggaaatagctagctatgaatccaaattaagtgatttacaggagaagctctctgcagcacttgttgagaaggaggaaacagataaagagctactcaccttgaaggatgccatggaaaaattagggacaaagcatagntgcagaagtacagacattaaattcacagatatcttcactggggggatgagaaagaacttgctcaatgata

SEQ ID NO: 95887 - DNA, 1511 bp, Glycine max
  Clone ID: PAT_MRT3847_57598C.1
gcacccctacctaagctctcttattcgctcgagcctttttgttcgcatttctcggttattgtttaataattgtaccatcacactttcaattatgctttgtcagcttcatttattttagtttagctattcaaattccttaatgctatttttactcaagccatcctctcctactatgttctccttaaaaaaaaaacggaaagagtggggttgaaaaatttctcttttatttgcagaaacgagccaaggcttagggtttggtcttttggtgtttttgcgaattagggtttgtgatttgatctccatcttcaccaatcaccattaccataacttgatcttctctctcgccatgacggacggcttctggaatcggcagcagcagcagccgcttcaaccttcttccgccatgctcaaacgacctcgtactgaatatgatatgtcaccttctggtctgacagggggtaatgagatgcataattatattgctcgaaatgatgaccataccggtcatcgaatgctaaaggacactaaaacacttggatctgcttatgaccgctaccttcaaagtgcagggcttacttcgtttaattctggggaagccagtgcaattggtggtgttggattgggaaggggtgttggtggattaccacaccattcactaactgatcctgctgtcatggggcatcctggtggtggtcctgatctagcaccaaatggacggggtgttaattatggtggtcagctaccagtagatgcggtttccagacctggacctgagacaggatctctacctccagatgcttcaagtactttatatgttgaaggtctcccttctgatagcaccagaagggaagtagctcatattttccgcccttttgttggatatagagaagttagacttgtgagcaaagaatcgaaacatcgtggtggagatcctcattacctttgttttgtggactttgcaaatccagcttgtgcagcaaccgctatgagtgccttgcaaggttataaagttgatgaactcaatcccgagtccagtcacttgcggcttcagttttctcggtatcctggtccaagaagtggacctgcttttcgcagtaaaagatgatctggttcacataagccatctaggttttatgctcatcagaatgtctgtggttcttcgttttgggggcgatactccacatgcaattttattcacccctctggacacaatccttattagagcccttgaaatgcataaattattaacaggccgagatcaaagtacaatttcaattagcaaaaaaggatttttagttcatgtattcaattactctgccgtaccattatttgctaaactttagtatattcacctggtgtctgatttatgttagcatttactttgtgctgcccaaagaactatcatttttctattactattttttgattatccaatattatcatactaccacacttgggtatgtatatgggatatctgtatcggtctggggtgagaattcacatgccaattt

SEQ ID NO: 95888 - DNA, 496 bp, Glycine max
  Clone ID: PAT_MRT3847_57599C.1
ggccgacattaattctttaaaaaaaagggacatttaaaaaaaagcccacaaagctactttttttttaaaaaaaataaaaaggatccatccttccacaaaagggggcaattggcattacaaaacaaagggggggggaaggtaaccatattattaaacccaggcaggggggagggcaattttaatcccaaactcggagggaccaaaaaaattgcaaaaaaagaagttctgccccttggaaagtctgaactgaaccgcccctaactaaaacacttgggctcctttgggagtcttgcagctataaaaaccagccttggtcacggccaccaaattgggagccccagggctaaaattgaaagcaagggggccaccaccccaaaaaaactttcctttgggccaggcaacagggttaaagggccaacccccaaaatccccaactggggagggggcagcaccagccctctgagagggaagcagcaaaaagcaaagttttaaaacc

SEQ ID NO: 95889 - DNA, 216 bp, Glycine max
  Clone ID: PAT_MRT3847_5759C.1
gcgatcaacattatgaaagtcgcgttgctggcctttttcgaaacgctccgcactcctgattagcatcataatgtatcgacgctcaattcaaaagttgcgaaaaccattgggattagattcataccagcagtttcttcgtgaaatttccatcgtgcgtccccgtggtcggactctgctgcgtaacgagtgagcagtcggctcatactctacttcggg

SEQ ID NO: 95890 - DNA, 138 bp, Glycine max
  Clone ID: PAT_MRT3847_575C.1
gtctgagcggggcgtagcagactgaaattccggtggatgcccgcagggagagtgacgtgcaaatcgttcgtcggactttgggatacttccgcaagactaatcgtaccgttctagtacctggatccctccgaaggtgcc

SEQ ID NO: 95891 - DNA, 2041 bp, Glycine max
  Clone ID: PAT_MRT3847_57600C.1
ctgcatttctgcttgatatcatcatgcgtcgttctcagtggctaacgcgtccaacgaaggatttgtcaagctatgccccgaaagaatttcttgttttctgctttcgaataaacgaataacacttcttcacatggcttcgtcgtgcttttctttcttctcttttattcttcctattagtattcctttctttttctccgccgtttccgtagctcggcatcagcagcaccagaaccaggtgtctactatctgactacacatgtgctgttattgtcttccaattgggtgaagtctgattgaagagcaatgcagaaggatactagtaccaccgccccatcaaccacaagtggtcgggttaggcaccgaaaacgctcaaatgaggttattccggaagttagtaaagcaaatgggacccagttactggttaatgacaaaagcaaatacaagtctatgctaattcgagcatattcatctgtatggatgattggcggctttgttttgatcatttatatgggtcacctctacatcactgcaatggtggttgttatccaaatcttcatggcaagggagctgttcaatctactcaggagagctcatgaagataggcagctgccaggatttaggctattaaattggcattttttcttcactgcaatgttatttgtttatggacgaattctgagtcaatgcctggttaacacagtaacttcagacatggtgttatagttggctagtgagcaatcttataaagtatcacatgtttatctgctactccctgtacattgcattcaatttgtggtggttagtggtgttaaaaattttcaattaccataaacaaatctggcaatatgcttggacacacatgattcttattgttgtatttggcaattactttttctccgttgccagcatttctgaagggattttctggtttcttctcccagctacacttattgtcattaatgatattgctgcttatatctttggtttcttctttggaagaacccctttgatcaagttatctccaaagaaaacttgggagggttttataggggcatctgttaccaccatcatctctgcatttatgcttgctaacatcatgggtcgctctcagtggctaacgtgtccaaggaaggatttgtcaactggttggcttcactgtgatcctggtccactgtttaagccagaatcttatcccttacctggatgtatttctcactggttttcttggaaagagatatcaatcctaccaattcaatggcattctttatgtctaggcttgtttgcttcaattattgcaccttttggaggcttctttgcaagtggctttaaaagggcttttaaaataaaggactttggtgatagtattccgggacatggtggaattaccgacagaatggattgccagatggttatggccgtgtttgcatacatatatcatcagtcatttgttgtgccgcaaactctctcggttgaaatgattttggaccagatatcgatgaacctaacattcgatgagcaacaagctctatattggaggcttggggaaattttacaacaggggtttgctaggatgtcttagattcatggcgaggtgtatttgttctgtcaccttctattgtattccttcacatacaggggaaaaggaaaagatactatgtacatgtgtttgttttctatcttttgagtgaaacaaattaaaggttcagaagctgtcaagatgtgcatagtgtatgttgaccgttagtttcattctgtttttctcgctctattagttgattgatggctttgcttgaacagctacctaccgttcactcgtgatcttagaataattcacatggccaatggcagtaattgaatgcctctgatgtattcaattcctggaagtgaaggggtgttaatatttttcaagtaccttaaatgtagtttgaatcgcgtttgataatatattctattctaatgcgatcaacaattaattttgttctatcaaatgttgcaaatattgtgaatgtgtgaacaaattataaattgttttccaaaacaa

SEQ ID NO: 95892 - DNA, 1757 bp, Glycine max
  Clone ID: PAT_MRT3847_57601C.1
acggctgcgagaagacgacagaaggggggttttttctccctcatttttaattgctgtaacagtagtatttattttgagctttccatttttctctctttttcaactttcaattcaagcagctttggaaaaaccaaccagccaacgggtttttttttttttcccctccgaagtttgtaagttgctttgaattgaattttccagaacatatacactgtttttttttttctttttcttctttttttttggggggtttttatttttctttgggttcttgggttttcactttctggtgaattcagttgagtttatgagtttcttgttgagctgaaaacgaaatccgaatacaaattttcagctttggaagaagcttgcacaaggtggggtcacagagacaggtcccacgtccggggaactgaaaagaaatcttaatacaagattacaccttcagaagagtcttgctgaagtgtgtgcatggacaggtcatgatctttgtattctgaacagtattcagagtttgatgttgattttggtttgattgtgtagacttaggagtgaatagtttgatatatgcatggaaggaagagaagggataagttctggggttacagtgataggagcagaagctccatcagcctatcacatggcaccaaggagtgaagctccaagccaggttcctccacctgttcctgaagcaacagctggagctattggtgtctcaccagcgagtgtgggattggatggaacagcagctaagaagaaaaggggtagaccaaggaaatatgggccagatgggttgaactctatggcattgtcacccattccaatctcatcttcagctccatttgctaatgaattctcgtccgggaagcagcgggggaaatcgcgggggatggagtacaagctgctgaagaaagtcggagtggatctttttggtgactctgttggtacaaactttatgccccatatcattacagtcaatactggtgaggacattacaatgaaggttatatctttttcccaacaaggaccccgtgcaatatgcatcctatctgctagtggtgtaatttcaaatgttacacttcgccagcctgattcttctgggggaaccttaacctatgagggccgttttgagatactttcattgtctggatcattcatgcctactgacaaccaaggatcaagaagcaggtcgggtgggatgtccgtctcgttgtcaagtcctgatggtcgtgttgtaggtggcggagttgctggtcttcttgtagctgccagccctgtgcaggtaagtgatctccttctcttctcatttagtatatgctcaaaataatggataagtgcatgtgtacttatatgcttgataactgaaccatataatattcccaaagtatattgtcaaacaaaatgggattgagaattgaagacagccagcttgcatgtcatgacaagtggtcggtagactttattgtagattctgctataaattaggctaaggtaagggataataattcttcctcaaataaaggagcacttattgcatgttccccgagcatgttataaatgtgattttacaacatacgtcatcttcgggtattaaaaatcaaaaacaagtttgcttactatacttttgagatagaagattctcaatataaatcacttcactccaaggctgattttaatcaaaatcaattttgttaaatcaatatccaaaataaaggtaggaaatgctcacctaaaggcacttatgcatggggctcttt

SEQ ID NO: 95893 - DNA, 591 bp, Glycine max
  Clone ID: PAT_MRT3847_57602C.1
agctcggaattcggctcgagtgacagtaatgatcctcttctcctgtgtgagttgtgcttggccaggaaagaatttctcgttttctactttcgaataaacgaataagaagccttcacaccgcttcgttttgtggtgcttgcttctttttctcttccttttcgcttcttactagtattcctttcttcttcatttcgttttctccgccgttttcgtcactcagcatcagcagcaacagcaccaggtgtctactatctgactacacatgtgctgtttacattgtctttcaattgggtgaagtctgactgaagagcaatgcagaaggataccagtaccactgccccatcaaccacaagcggtcgggttaggcaccgaaaacgctcaaatgaggttattccggaggttagcaaagcaaatgggacccaattactggttaatgacaaaagcaaatacaaatccatgctaattcgagcatattcatccgtatggatgattggcggctttgtattgatcatctatatgggtcatctctacatcactgcaatgggtggtgttatcccaatcttcatggcaagggagcttttaatctactca

SEQ ID NO: 95894 - DNA, 264 bp, Glycine max
  Clone ID: PAT_MRT3847_57603C.1
tttttccacctcctggcattccgggtgttccccattataaataataaaacgctgggaaaccccttccaaaaaaaaacgggggggggcctttttaggaggcaccttttttcccccccgtttccggcggattaatattttttttgtggccccaaaattaaaaacatggggggcggtgttttaaacgcggaagggtgggaaaaaccggggggtcccccaaattaaacctttggaaacacatccttttttttgcgggggggggaaaaa

SEQ ID NO: 95895 - DNA, 375 bp, Glycine max
  Clone ID: PAT_MRT3847_57604C.1
ctcaagcctaatcggctactttcttacccaacatcactcaaagagcgggtgcaattccaagtttccagtttaacaccctatttcgagcacatcccaatcctccttcccagctaccaaccctgattaactcattcccatagcctcagaagagcccactgccacattggaacccgatttcacacctcccaacagtctagctacacactgctgagatctatatgccataacctgtagccaacgctcagaaaaccaaagtacccattccttataagggttactgaccactcaaccctcccacttatactgactacaaagagttgattaacgacccaattacctttttccacggagaaaaccagttcgagccaacacgcg

SEQ ID NO: 95896 - DNA, 157 bp, Glycine max
  Clone ID: PAT_MRT3847_57605C.1
aggcgttcgaacagttgagagaggacgactgatgggtacggtcatcaatgacattgtatgtaggacatgggaataaagtcgctctatgcacccttaggggtccttttagctgatctacacattttaatgtggatgatgaaaccatcgacggtcgcat

SEQ ID NO: 95897 - DNA, 336 bp, Glycine max
  Clone ID: PAT_MRT3847_57606C.1
atagctagaagtaacatccgaactcctccaaagacatagtgcgttggatacctccttgcaaaatgccatcaagagcaaagacaagagattgggcagcatgggcgcgaacccatgtttcgagtccaactcttagcagaaagtgactaagaacaaggccttcacactacattaggccgcactaccaaagatcgtacaataccacgcttttaacaactcctaaacgtttccaaactgatcatcatcatgcacatgatcagaaaactaccgatcatgaccatgatcatgatcatgaaaacatatcgctatttgacctgaaacatactttctcgctggatc

SEQ ID NO: 95898 - DNA, 1033 bp, Glycine max
  Clone ID: PAT_MRT3847_57607C.1
gtgttacaaaggtctcaaatccaaaacaagagcaaaatgagtcaaaagtgaaacttgttttctccacgatgaatttgaaaaagtcagatatcgctttggattgtgcagactgggaggggtctgaaagaattgaagtgccaggagatgcatcctgctcaccaaattgtcacaatgatgcagtccttagggacagggcttctacaattgatgaggagatgggccagccttctgtttcttctgagctcctaccctgtgaggctgctgttgagccacctgactcagaatttgaagaattatatggcccagacaaagaaccacttataaaaaaatttccagtcagtgaatcaagatcattacttggagatggcaagacagaaaatctaagtgtggccaatgattgccataatgacgaaacagaggtcttggacgatgcagtaaatgcttcagaacttgagaatgagaatctcacagaaaaagtttctgttactaccatcactgacaaatcttctaatgtgtctgagggtggtgaaaattcccaaaagaaggaagagaaatctaatgtcattgctaagcagactgactctgtaaatcatgtaactaaaagggtagaagcttacatcaaggagcacatcagaccactgtgcaagagtggtgtaatcacggctgaccaatacaagtgggctgttgcaaaaacgactgagaaggttatgaagtatcattccaaagcaaagaatgctaattttctcataaaggaaggcgagaaagtaaagaaacttgcagagcagtatgctgaagcagcccaacagaacagaaaaaattgattcatatggtatcatttcatactcaatgttttctttagttattgcccgttacccgccttttttattatggtgctatacttgctttttagggaacttgccgttttgggaagctgtggatatattagatttagtctcacctcgtcatttatatgtgaatggtgctctctctggggatgttagtaataaaattttgtataattttttttaaaaaa

SEQ ID NO: 95899 - DNA, 319 bp, Glycine max
  Clone ID: PAT_MRT3847_57608C.1
gtaaagtgcttttttagatggcgggggggttgttatatacacactatggggtctcaaaacttagaattttcgaattctaatagcacaacagcgctatctctaccattgaggacgaacatgtgtgcaggggtacagagcttatgaattctgaatggtaccataatgtatgttgagatgatctgtgtcactgtatgtactgccacatgaataaagaaaaaggagggtacaatagagttgggtatttcctctcaggaatgggtgcccagaacctattgatttgtgaatgcacaaaattatatagtgggaaataggtgaatgg

SEQ ID NO: 95900 - DNA, 293 bp, Glycine max
  unsure (1)..(293): unsure at all n locations
  Clone ID: PAT_MRT3847_57609C.1
ttgatgcacccatttactttgccaatgcnagctatttaagggncaggntccacaaggtggattgtgnaagaggcagatnngattcaanctaacagnggcaaacccantttgcnatatggtaatattggacntgancggnggttgntaacnnttgntacaagnggattangcttgctnnacgagtgcaagangnctgttgccagangagggttacanctnnctttggtnaattccaggaancnnggtgntgaagaagctgaccaantcccagttccttnatgacctggggcaaa

SEQ ID NO: 95901 - DNA, 362 bp, Glycine max
  Clone ID: PAT_MRT3847_5760C.1
aaaaaagaacaacaaaagggggttttatgggggaggccccccaaaggcccaaaaaaaaaagatgaattgggctcctgggggaaaaaaaccttaaggaaactaaaacggaggaaacaattaatggtgaattaagggggactttcccccccttaccagggccttggggaggaaaacaggaaaacctgggggtcccctgggaccccaaaggaaccccgaaaggctcaccaaccggtttgaaaaggttttgttatttcaggggaattccccccggaaccaacccggtaggaatctaaccccccgaaaacaaaaaaacgggggggaaacctgggctggtttggaacccgaggggacccgggggttcc

SEQ ID NO: 95902 - DNA, 152 bp, Glycine max
  Clone ID: PAT_MRT3847_57610C.1
gtgttacgcgttaacatccactctattaagcaaatgtgctcctagtagtacattaaaaatttaaattaaattaaaattaccaaatattaatataaaatggggtcctggcaggttccaggttccaggttccagagtaatgcacaacgaatctt

SEQ ID NO: 95903 - DNA, 491 bp, Glycine max
  Clone ID: PAT_MRT3847_57611C.1
gccgtaaaggcgcctgttaaactgggtttttgttaatccatctgcttgctgactaatctgtagtgatcaacgttggttcttatattgcctgtgataaacacactatctcattacgattgacctattgttcgtaagagtgttgacacaatcgctcccgcgatactcattcctgctaatcaatagccgtgtgacgtgggaaggatcactcccttcttttccacctggaacctcttcatagcctcctcctttgcgacacggtgctgactcccaacccgggacttccacctgcgggggcggcctgcgcgatagcccggacgctccgtagcaactaagaattccattccgtaaataccattctggaggatcttacttggttcccaaaacgatttgccccggaattccatagccgtagcaacccctttcactgatgttccttctgggaagttatatttcttaaccttcaaaccactctacaaaagtgtgattgcctt

SEQ ID NO: 95904 - DNA, 616 bp, Glycine max
  Clone ID: PAT_MRT3847_57612C.1
ggattatctaaatggataatatgtgcctgccattgtcactctatgacagctaactttgttgaatttacactaatttatcttaatggacagataaacttgttctgatttcatttaatggacagataaactcatatataggcttcctgattcaagtggagctggaatacgcaatgaaactggctcgcatatggtaagaatcaaagagcctagttctgtcttgtttttcttgatcttcaattggtttatggtagatggttagagggtgtctttgttacagttcttatagatgcaactaaattaacaccagagttttaaatttgggtcgcagtggcaatttcattcctatcatatggggctaaattaattgtgaattgaatatgtatcaagtaatgatttgctgctgaattgagctacaaggtggaataaatcaagtgggtaaattggctatcctgccatgaatttggcaaagttttattagattacttgattaactatatattatgtatactactatgctgtaatggaatggaggcacaattgttgttattcagtgttatgaaatgcaattcaaaatcatgacatgataatgattttggtttctaaattctatctctga

SEQ ID NO: 95905 - DNA, 319 bp, Glycine max
  unsure (1)..(319): unsure at all n locations
  Clone ID: PAT_MRT3847_57613C.1
aantcannnangcgtacgtaagcncggtaattcggctcgagcgtgagnnnangttcctnntnnataccaancnnnngaaagggnntcaaancgnngtcgggtacaaagatntccttcgaatcagtacaaagtttnaagtgnagacgaaaggnggcacgccttcnnntagtagcgccaacagagcttntgcctctgntancagtaacacgctagnaagangacgncacanaccatcntccaantnngttggaacnnnaccntaacatgnggcccagaaagagagaggatccagcgtgaaaaactgcncagatttggcaat

SEQ ID NO: 95906 - DNA, 518 bp, Glycine max
  Clone ID: PAT_MRT3847_57614C.1
ctcatttgtccggaagatttgaaattttgattaaccgtggtcacaggttgccgaaccttaaatccggtaacaaacgcaatggttgcttgattacaagaatctctgaatttcttgctacttgtttgcgtgcgatttcttaagggaaagaaaatcactctctgtgctggtcacagacttcgggaatcattttcttacacactcttagtttatttgctgaacactctcctatttgatataggacatcgtgtcagatttagacttttgatgttgctttatcagctctctgtttaatgtcaagtttaagctggtgaaatcttggattagtgctcccactctcctatctggtataggacttcgtgggtagactttactattactcttttttccttcactctcttcttcaactgatgccgattgccgctcaagtggtcttattagaaaaacacttgggcgtgggcgcagatgtttgctccgataattcactctggagacaacaggcttcactgagaaaacaattt

SEQ ID NO: 95907 - DNA, 127 bp, Glycine max
  Clone ID: PAT_MRT3847_57615C.1
aggtgtgcgaacacgtccgagaggacagaacacggacatccagtgacagaggcccacatagaaactggtttgccggtctgggatacacgcccagatggttattgttgacgcacgactccacatgctg

SEQ ID NO: 95908 - DNA, 457 bp, Glycine max
  Clone ID: PAT_MRT3847_57616C.1
aatttagaaagtagaaagacaaaaacttatcgcatatgcttctcttctttgctggtacgagaccttttgattttttgttgcccattgttgcattgacttctctcaactgttcttgttaatggtcttccaagcttgcgtttagattttggtagaaattggacaagttgggtaccgtgaatccgctgcacttcaatgtgagtaaaaagagttgagggtctccaactgctccttcaaagctccaccatgaccacaacaccaacaaggttaaggctacgaccttgagttgcaccattttcttgtgattcttaattaagggttcaaaagaccggtttgatataagcctcaaagaaaaaagtctaagtgtcgatgatgttcatgcgtgggttgattaaggttgtccaagtctaagatctgacatatggaggaagactagtgtttctgttagctatgtatgtat

SEQ ID NO: 95909 - DNA, 637 bp, Glycine max
  Clone ID: PAT_MRT3847_57617C.1
cccgggtcgacccagcgtccgcccacgcgtccggacgacagaagggtacgggtgcgagaagacgacagaagggttaatctaaatatgacacgtgagttaaaacaaatctaataagtgatatttaaatggagcaaggcatgtgtttaagaaatacagaacaaataaaaaaaaatctacatgtggacggaagaggatttgcatgtcagtcgcgtgtcgaattcatatatgttaacttgtcttcattcttacgtgtccttacaatcactttagcgttctctcatttatgaagttcattcaatccataacaatgtgtagatcttcatttatttttttgtcttaaaacgctttggttcatcacaagaaagggaccctcaataatctggaattcggccaggagataagtaaagtctggccaagaattgtttccaccaagaatcgaactcgagtagtacttaaacgattcaaccttaactttagcatattaaccacttgtgtccaatcacttggttagattttcatttcttttaatctaagtctgatcatggattaaaagaaatctaaaaattgattattaaatgtagaaaacctgttttttaaataatgcaaaatgaaatcccaataaaatattggcgaggtt

SEQ ID NO: 95910 - DNA, 319 bp, Glycine max
  Clone ID: PAT_MRT3847_57618C.1
aatttcgaagttttatattatgttttggttttattgtaaaccaaaaaaaacccctcctactttctaataaaaaacatatgttttaaataaattttgtgactactattaattttgacacacatcccttacttacatttaatggttcaaacaattctactcaactttaaaataaatgagcccttagattatacatatttatcatgcaggaacaaccagctatcattttacattgaactagaaattcatttagaagatcaaagacaaaattttccgattaaaacgtacttaaattgaagaggggttgttggcattgtgcacc

SEQ ID NO: 95911 - DNA, 383 bp, Glycine max
  Clone ID: PAT_MRT3847_57619C.1
aaaaagcaagccagagggcaaacttaaccctaattaaattttttcaacaaacaatctttatccttctttctcccgcgatcttcaacaaaaggtaaaacggatccctcccgggctccctccggttttcaaaatctacctcccctcctcaattacggggggttctctggaattcaaccccccaagctgttgtcaaggtgaatttcctccttaaacaccctggtgttcctccactcgacttacttgatggggagcacccccataaaaagggtgagccccattaacccccacatatctccctgggtcataaaacggtggccaaacctattattaccccccctacccagggccgttgtagttccccccactgcaaattttggcgaaaa

SEQ ID NO: 95912 - DNA, 461 bp, Glycine max
  Clone ID: PAT_MRT3847_5761C.1
cacgccggacaacatgagagcgaaatgggtacaagaatggttccaataccaagggatagggtgatcctgcacttcgattacgattgcttctacgcctctgtcttcgaatcggaagatccgagtcttcgatcactccctttcgccgtccagcaaaagcaaatatgcgtaactgctaattatgtggcccgaagcagaggaatctacaagctacagctggtcaaagatgcaaagcgcatgtgtccagatctgatcatcaaactaggtgaagacatcagcaaatttcgcgatgccgcccaggaactctactcgttcatcaagagcttcagctggcattacaaagtgggaaggctccgcttcgatgaagtctggccagatgtgggcgatatgggtggctacaatcaagaggtcctggacaagcacggcgtggagcattcattttccagactgcgaagatatgatcc

SEQ ID NO: 95913 - DNA, 212 bp, Glycine max
  Clone ID: PAT_MRT3847_57620C.1
acacccttccgccaccaccaggtccgacccaatcctaatattattataataataatcctaacgggtaaagaggtaaataaaagggggcgggcttagtaataggctaatagggtagtagttctttaatgttgggaagttggaactccttaagcagttttagagtttgtgaatttggatccggatgaagaattaatcctttttttccctttttt

SEQ ID NO: 95914 - DNA, 545 bp, Glycine max
  Clone ID: PAT_MRT3847_57621C.1
aacaaaaaccccaaatacaaatttttcacgagggttgattttccaaaggactaaaacttttaaataaccacaaacaaaagcttttttaggaattccccccctgccccccagttaaaaatttttggataccaataatttaaaaaacccttattaactttcattttcaagggggtggggccaacaatttcattggccaaaaaaaataatcttaaaaaaaaaaacccggtttgaaaaaagggttaaaaggaacccgcccaccccatgtaaggatttcagggggcccaccctgttttcgaccaacccctaaaagggcaaaataattcgggtaaggggaaacaattttgtttattgagtccacattaccttggccaaaaacaccatccccataaaaaatggtctttggggggccaaatccaggaaaacgaatccccatagaaacattctgggggggcttccaggggccgaaaaagggattatgcgcaaaggggggggactttttcattgggggcacccctctccaaataacaccccggaaaggagggggg

SEQ ID NO: 95915 - DNA, 239 bp, Glycine max
  Clone ID: PAT_MRT3847_57622C.1
gtccttatagatagtacaccctaccgttggtggggccggttctttacttggaaaggcgggttactgcctctatactcgagttcccatatctttagacacccatgtaaaatttatttctcactctcaacactgacgcactttccttcttgatattggtgtgattacaacaacgatgcatgatataacctttattttgcattcgaacacaccatatgaattgccctgaaagctcattcaaa

SEQ ID NO: 95916 - DNA, 528 bp, Glycine max
  Clone ID: PAT_MRT3847_57623C.1
aaaaatgcgacagcatagtatttgttgttgtaatggtttgaggttgtattcgaaattatgacattgacattctcagtagtgacaaatcttccattatttggcggctcacttactcttaattctgagcttcgtcttcgtgcttgccgaatcgccctttctactcatgacgcctttaatcgtagtcaacgcgtctccaatttctgtgtttctgagggtcgcaggaggaatttagcccatgatcctcgcacgtggatgcatccaatgagcgacgatgacgacgatgaggatcggactttggacctattggtgaggttctttcagaatgtgttcaagaaggtgtcaaagagagccaggaaagcagttagatccgttctccctcttcccatctcctcccatttggtcggattttctgtcaatgggatcctgcttctcgcattcttgtggattctcaaggcatttcttcaggtgttatgcacacttggaagtgtagtgtttgtaagcatcttattaatccgtgggatatggtct

SEQ ID NO: 95917 - DNA, 443 bp, Glycine max
  Clone ID: PAT_MRT3847_57624C.1
ccggggcacacaggctcgaggcatcttctcagagcttcttagttctcacccttcattcttttcttcagcaaatcagagaaaaacacagaaatttaaggaatggcaggtgcaagagccagtggcatgatgaatggtggaagaagcttcccaaggaggttctctgggcgtccaattccaaagcgtggacaagtcaaagttggaatagttgtcgggcttgcaaactctgttgtttccattttctctcgcagcagagccacccgaggatgtgctacacctactcacctcgctcactagcttccaactcattcgggctacaaaaatttttgatctttttgttcttgtaaaaattggggtcttttttattcccttctatgatcttgttcatatgtaaatctctttcttttttcctatcaaagaatccaatcgcctcttgtttaactaat

SEQ ID NO: 95918 - DNA, 191 bp, Glycine max
  Clone ID: PAT_MRT3847_57625C.1
cccggggcgcccatgcatcagtaaagccgtcagatgagaaaacaatgcatcttgggattgaaattctcttttcacaatgcgtacattaggccgtacgaatgtcttagttcgatcttcattgctctcgttgtcttttgtagcgtcatgattgcattggttccttaagtcatcgctgattttgtaatcaacat

SEQ ID NO: 95919 - DNA, 776 bp, Glycine max
  unsure (1)..(776): unsure at all n locations
  Clone ID: PAT_MRT3847_57626C.1
ccacgcgtccggtgagatctggacattcagtgttagagccttcgattcggctcttccccaacacaccatcaatgtcaattatgaaggctttgccgaaggttaactaacttcaccaaattttatctattgtttgtttgtttgttgttagactctaatgattgcaatgtgattgtgatgtggcagatgtgaaagtgggggatgagcttttggtggatggaggaatggttaggtttgaggtgattcagaagataggtccagatgttaagtgccgttgtactgatcctggcttgttgctgccgagggccaatctcacattctggaggaatggtagtttggtgcgagaaaggaatgccatgcttcctactatttcttccaaggttgtcaattcctcctttgccttttgcttccttgcattgcatctcttcattgctatttttttccggcaaagaataaaatctatttttgtcatcaactttgccttaagtgaagaaatgaagcttgtcgatgctatagtattactattgttgtattattcaatcctattcctaggtcacagttgggagctactggtgtgcataggtccctagaactctagcaaccatgagtttatcgagttatacaaaaggtttatagttattgtatacagttcttatcaggctactgacctggaatatcatgcagagattaggaatntagaatagatactatcatacagagccaatggtctgacaatgaagaaacatgtggttgtgatgattctaaactgtagtgttagg

SEQ ID NO: 95920 - DNA, 1607 bp, Glycine max
  unsure (1)..(1607): unsure at all n locations
  Clone ID: PAT_MRT3847_57627C.1
aagggccaatcgctagtgcanttcgantgncnnnctncntnnnttnnttnnnnggnnaccnncccnnnntnatatatcctccccctaaagcttcaacctttgggacgccctactttttttcttctatcttcattgatcatcacttctctttcttcattttccttttcggtgggaattaggataaccctcctcaatttttcaactctaaatttgatcatcaccttcacccactttactcttactaggaggaacccttctctctgtgtgtgtgttctgagttgattctgtgcttcagctttccacaaagtaaagtagaaagatggcaatgattccttaccacctttgccgtttaccttaccaggattccctcaaagcacttgaggctgatatacagcacgccaatgctttggctgctgcaattcccagagccaagggtgagactcttcttcaaatgaaattggtttacaatcacttggctcctctcttcctgttatttctacaatggatggattgttcttgtgcaggctttctccataggtatctcgacctcttccacatacttatttacaaggtacataatgatggtagatcaatcatgcctactcatggaaggaaggctaccattggggacttttatgctgttatattaccatctctccaacggcttcatggtagtttggagaagttggaggttgttaaagaagaaggccagtcaagcatagaaggtccaagttatggcaagaaggtcattgaagaaggtgtgaaactaaccgccaatgttgatttgcaaagagaagatgaatgtgggatttgcttagagccttgcaccaaaatggttttacctggttgctgccatgccatgtgtattaaatgctaccgcaagtggaacagaaagtcagagtcttgtcctttttgccgtggtagcttgaggagagttaattcggaggatctatgggtattaacttgtaatgatgatgttgttgatgctgaaacagtttctaaagaggacttgttgcgtttttatctctatgtcagcaagctgcctaaagatcacccagatgcacttttcctaatgtattatgaatacctcatttaattttctactaaataagaagaagaaaaaaaaaatgtacagataggaaattccggactgcaaatgtgaatagagtctggtacaaaaagaaaatactctggtaatttaatcacagttgttatggtaagagaaatttctggttttttagtccagaaaaaccattcttcttactcccgtgatatatctccattgtagacattgttcttgcaattaacttggaattccttgcataaaggatccattaagtttattaaatgctaccgcaagtggctacctttatatcaacagcttacctaaagatccccctgatgccctttttttaatgtattatgaatacctgatttgatgttatttttactaaataaggagagagagaaattgtccagatagggaaatccggcctgcaattgtgaatagagtctggtaaaaaatatttttaatttgtaaggcccagctctgctaaaataaatttttgttattctagcccagaataacccccctcttgccttgttat

SEQ ID NO: 95921 - DNA, 473 bp, Glycine max
  Clone ID: PAT_MRT3847_57628C.1
ggttatcaattccattaggatatagacccttgaaatggggagcaagagtattatgtgtctccccctacatatatcttccttcaaacattaaatatggacacctaccagactctattcacaattgcagttcgaattttcctatctgtacaatttttttctctccttatttaggaaaaaaaatatcaaatcaggtattcataatacattaagaaaagtgcatcagggtgatctttaggtaggctgttgatataaaggtagaaacgcaacaagtcttccttggaaactgtttcagcatcaacaacatcttcattacaagtgagtacccatagatcctcagaattaactctccttaagctaccacggcaaaaaggacaagattctgaccttgtgttcctgcaagttggaaagattcagcatgagggtgttacaattgatgctaaactagaatcactaggtcaatatagtgggggagg

SEQ ID NO: 95922 - DNA, 709 bp, Glycine max
  unsure (1)..(709): unsure at all n locations
  Clone ID: PAT_MRT3847_57629C.1
tcgnagggaagaacaaccctttctctctctctctctctgttctgtgttgattctgtgcttcagctttccacaaagtaaagggaaagatggcaatgattccgtaccacctttgccgtttaccttaccaggattccctcaaagcacttgaagctgatatacagcacgccaatgctttgtgagttttcttgttagttttttttttttcctcccctttaaattttcttcaccaatttattaactttcccttttttttgggtactaggaaaaaagtgggaatgaagggtcttctgataatcgttgattatttcccttaatcgttttgtacttgattagttttgcaaatagaaggaacatgctcagcttacaaagaatttgttactaataataagaatttgcttatccacctgtgatcaatttgattgngattttttatttttgtccccactctgaatttggattgtgtgttgtgccctcttctagggctgctgcaattcccagagccaagggtggaactcttcttcaattgaaattggtttacaatcacttggctcctctcttcctgttatttctacaatggatggattgttcttgtgcaggctttctccataggtatctcaacctcttccacatacttgtatacagggtacttatggatggtagatcaatcatgtctactcatggaaggaaggctaccattggtgacttttat

SEQ ID NO: 95923 - DNA, 495 bp, Glycine max
  Clone ID: PAT_MRT3847_5762C.1
cgcgcttagatagacaaatacagaaacaaaagatggtgcatcagaggcaaaacaacatccatgttcttgttcttccataccccggggcacttctggctttgccgtggcacaccaactctcacatatcacaatacatgacgaccttcttctcaattagcaacagcaatgagtgccaccaactctaagaagctttcttctccttcacctaccattcaccaacgtaggctcacccgacagaggaagcttcgttacctcactgacaaagacgctggtctgcattcaacttcctctctacccgcttctcctcttccttcctttaagtccgcttccagttccgaccattggtcttcctctgcggtttcttaacccctttcgcgtcccgattccccgttgacccgccgacacgaccattatcaccttggatctccccctttcgaacattctgcttttgcttttcacagaaggtcggttgatcatgatcctgtgaggagttta

SEQ ID NO: 95924 - DNA, 2641 bp, Glycine max
  unsure (1)..(2641): unsure at all n locations
  Clone ID: PAT_MRT3847_57630C.1
cattactgcttttcttatctttctctctctctctctctttgtgtgcaaaaaagaactatgcttgatattaatgaataatgttgattcttatctgccagtctgctactacttaggacaattttgaagtgtaaaactggctccccatagcttcttcttcttttgcacaccccagattccgcgaaacccacctttccttggttctcagtggaaggttttgttcttttgtcttttcttctgtttgggtgaattgggtaatctgaattttcaacaacaaacaattattaagttccatggttcagtcttggattccttgcctgctggctccttgaggtgttttgtccgattgggtggtgttcgaggttttggagaaattaaggaaacactgcacacaacacaactgtaacttcatccaaggcaataacttctctttcacgtcgatcttttgctctcactgtcagaatttgaacttgccttttttattcagaatctcaattcaattcatggtggctcaattttgctgaattgggctaacacctttgattcatcgctgtgggatcttttggtcaatattttggaactgtgaagatttgtgttttaggctaaatatgatgcttgagcaggactgtgctggttttatttagtagttttatgcactagggtgcttctgtgttcctacaaggaaatgctttcctattggattgcactgtttagttaggcatggctttcactgcattatccttggtgctgttgctgcaactgtcaacaatttttggctccgagcttgtcttacggtcaaaggattgtggctctgattgggtggcgcattcatattctagtcatggtcaggatctgttctacataaacggcaatgtagtaaacaaagttgctttctgtgaggctctcaaattgtatattgcaaaggggtgtgatgtgaaggactactttggaagtgtcaaatgtgtgatggatgactcttttgtgactttacctttaaaggcagggaggaaacttttgaaggatttgagcagtgaatccacaccacagagagattctaagcctatgtcatccaacgtagttgttattggtgcagggggagctttgttggtgtgttgtgctgttctttgtccttgtttctatgccaagagacgtaaagcaacttctcatgctgttctgtccaaggacccaaattcaatggattcggtttcctccgaagcctccgttaatgataagattcctgccagtccacttcgggtgccgcctagtccgtcaagattctcaatgtctccaaaactcactagacttcaatcattgcatctcaatctgaaccaagttacaagagctacccaaaacttctcagaaacattacaaataggagaaggaggttttggaactgtctacaaggccaagttggaagatggcctggttgtggctgtaaaacgtgcaaagaaggaacattttgatagtttgagaacagaattcagcagtgaaattgaacttttggccaaaattgatcatcgaaacctggtgaagctactaggttatattgacaaaggaaatgaacgccttcttattacagagtttgtgccaaatggtacccttagagaacatttggatggtatgcgtggaaaaatcctagacttcaatcaacgcctcgaaattgcaattgatgttgctcatggcttgacctatctgcatctgtatgcagaaaagcaaattatccatcgagatgtgaaatcatccaacattcttctgacagaaagcatgcgagctaaagttgctgattttggatttgcaaggctaggaccagtgaacactgatcagacacacatttcaaccaaagtgaagggaacagttggttatttggaccccgagtatatgaaaacataccaactcactcccaagagtgacgtttattcatttggaattttgcttttagaaattgtgacagcccgccgtcctgttgagttgaagaaaactgttgcagagcgggttacactcagatgggccttcaggaagtataatgaaggaagtgtggtggaacttgtggatcctttaatggaagaagctgtaaacggagatgttctgatgaaaatgcttgatttggcgtttcaatgtgcagcccccattcgaacagatagacctgacatgaaatcagtgggcgagcaattgtgggcaataagggcagattacctcaagagtgcaaggagataataagtggtggtggtggtatttggtgatgatattgtgaggtggcaaccaattgaagctgtctcagaatacaagacctgaataaaagtaacaaacttagacaaaaaaaaaaatgtacaccgaggaacttccttatcttgccactggagtacttttttctgtgtagagttggcactggattttgtaatatatgaatttgttctttaggatgaagagcaatagctaatttgggtgaattcattatctatggttgtgccagttttcatgttataggaattcactagtgaaaaatggctactacaaaaatgcgtgaattccagaacttaattgctaaatggatcggttgcaatttgtcacaatggtaaatgatccttctccatttcttttcnaannaagggcggccgccgacttgaggctcgtcgtcccgaaaata

SEQ ID NO: 95925 - DNA, 843 bp, Glycine max
  Clone ID: PAT_MRT3847_57631C.1
gttaattcggaggatctatgggtattaacttgtaatgataatgttgttgatgctgaaacagtttttaaggaggatttgttgtggttttacctctaaatcagcaagcttcttaaagatcacccaaatgcacttttcctaatgtattatgaatacctcatttaatttttttttaaataagaagaagaagaaaaaaaatgtccagataggaaattccggactgcaaatgtgaataaagtttggtacaaaaagaaaatactctggtaatttaatcacagttgttatggtaagagaaatttttggttttttagcccagaaaaaccattcttcttacccctgtgatatatctccattgtagaccattgttcttgctattaacttggaagtccttgcataaaggatccattaagttaaatcttcttgtaagttagttattgacacagactgatattgagaagatgaatctgttctttgtgattgtattgtacgttggaaatgttaatatatgcaaaaccattgattatgttgttgatgctgaaacagtttccaaggaagacttgttgcgtttctacctttatatcaacagcctacctaaagatcaccctgatgcacttttcttaatgtattatgaatacctgatttgatattttttttactaaataaggagagaaaaaaattgtacagataggaaaattcgaactgcaattgtgaatagagtctggtaggtgtccatatttaatgtttgaaggaagatatatgtagggggagacacataatactcttgctccccatttcaagggtctatatcctaatggaattgataaccgattccataatttgaccaag

SEQ ID NO: 95926 - DNA, 1201 bp, Glycine max
  Clone ID: PAT_MRT3847_57632C.1
ggttctccagctagagcaagagcaaaaaagataaagaaaaagaaaaaaagacggctagaaacgcggcatggcggcgtacgcaggttggctcgacgaatccggcatcggcctcgaacctaatcctcgtcgtcgccttgtccgccatcttcgcctatatctcccctgtctcctcttctctccgatctgcacccaatggacgacattctcaagtccttcagccccaagtcggtcgacgacgtctggaatgacatcgttaccggcgccaccgtccacgacgccgtctccgccaccgctaccgactatgccgacgccgccatgaccctcgaggatttcctcaccaaggccgtaactgaggaagacgtcagaggggctcctcctcctcctcctcctcctcctccttcttcctttctccccttccctgccgatggctcttcctcctccgttgagcctttcgccaatggcgttagtgccgcgccgtcgaattcggttcagaaagggaagagaagagccgtggaggaaccggttgacaaggcaacgcttcagaagcagaggaggatgatcaagaatagagagtctgctgctaggtccagggaacgcaagcaggcttacacatctgagcttgagtatctggttcaccagctagagcaagagaatgtgcagttattaaatgaagaggctgagatgagaaggcagaggaaaaagcagcttttcgagtgcatcattccaattgaggtgatgcctaaaccgaagaaaaaacttcgaagagtaaattcagcacaatcattgtgatctgtttgtcatcactaatggacagactaggctttgtggcctggtgtagatataaggagggaaaggtttgagagattgcatgccattgcaggttctcggagttacattgttgtatagagaaaataggtgcagccaaataattccaagtaatttgattcagcctgaaagtattctattgatccactgcttgtggaagatccataagaagatccatggttctgggtgtgttttgcccggatttggccttgtaggaaaagttgaaataataatttgtgttaacttgtgcaatttgaatgccatgcttgatttggtagggggtgaggtacaggtgagaggaatggatgaaaaatgatcgctagattcgacataatctgtttttagattaaaagatcacctatatgtcacatgattc

SEQ ID NO: 95927 - DNA, 604 bp, Glycine max
  Clone ID: PAT_MRT3847_57633C.1
tagggaatttggccctcgaggccaagaattcaagccttattctgcgcctaattttgtctgaacttcaagttgcacctaattttttggatgctgaatagattgttctgcaggttcacatattaatcactaaatgtttcagtaaccattgattgtatatttggaaataaacaattaacagttacttttgtggcagaaaatggtggggaagtttatggggaagaatatttttctgaggtccaagtagagcaccaggagacatttttggggcacaccagtccaatcagtcgatgtcgcttctctgcatctggaaacaatattgccagtgcttctctggatggaactgtcaggatatggacatatgatacatcaactccagtgtctagaaatgcaaccatatattgtggcactgaaattttgtcacttgactgggaatgtaaatcagaccgcttgcttctcataggtacgtctgatgggtgcattaaggcatggaatgtggatgcaaagagagttgtctgggacctcaacacaaccgaagcatttccaagtgtattggacataaagtgcagtccagtggaacctatttttgtgtctgctgcagcatctg

SEQ ID NO: 95928 - DNA, 177 bp, Glycine max
  Clone ID: PAT_MRT3847_57634C.1
accacgcgtacggcataacaagattctcgctatatatacactaatattctctagaataatcaggcaagactgtcaaattcaaataacatttagattgaacaaagacttaaaaaggaggatatcaaaagcgtgaactatatacatatcattccttggcaccactaatcagtactctat

SEQ ID NO: 95929 - DNA, 327 bp, Glycine max
  Clone ID: PAT_MRT3847_57635C.1
gacaagatggctgaattccctttggcctcttgtgaggattctctcttccctgtccgtggaacttcatcaacttccgctcagtgctcttctggttcgccaaagagtgctgactgcttaatcacgaaggacaagtgtacaatccaagttgtggacaaggccagtgtcccttccagtggcagtgatgcttgtcctgctgctccagtttcacatggcaatgaatgctctgaacatgctgtttcaagccactcctctgctgagtctagcaggcacaggtttgacacctcgtcttaccagcaacgtgcataggccttggaaggtttgctcgag

SEQ ID NO: 95930 - DNA, 341 bp, Glycine max
  Clone ID: PAT_MRT3847_57636C.1
ggacccaccaagtaaaaatacatttttttaagggaatttacggcctgggcttttgcttccgagaacaaaataattttggaaattttaaaaaatttaacattttttttttgggacggccttcccctccgcctttgaggaaaaatcatgcccaaatttgggggaaagtgggtatatgcctgcccctgcctttgaaatgttaacactaaaaaggttccaattttttggggggattacagggttgaaacaaaaccaaatatttccagcagctttgccaactttgttgttttttaaaaaccccctgaaaaattttttttttcttaaaaaataggggtcacagttac

SEQ ID NO: 95931 - DNA, 270 bp, Glycine max
  Clone ID: PAT_MRT3847_57637C.1
gttggtgtgaggcaatgacgcggcctttcggtgtgaagggggggaggaagcgggggcgggcggtacccaaatacgactcccatgacgaagaagaagaagaagaaacgcaactaaagaaaactgtggtggaggttgagctcatttatttagtagaggataaagcttgatgatttttgcttgagttgatgggttgatctgtacattaaatgcttctggagatatcaatgttgatgattcatttagaattagtgatttttgtaaaagcttttt

SEQ ID NO: 95932 - DNA, 2358 bp, Glycine max
  unsure (1)..(2358): unsure at all n locations
  Clone ID: PAT_MRT3847_57638C.1
ncnctctaggtagtagaattaataaacccaaaacatgattttttttggatcagaaggtagttgaaataataaacccagaggatgattacatttggattcatgattatcatttgatggtgctaccaacttttataagaaggcgttttaacagggttaaaatgggatttttcctgcatagcccctttccatcgtcagagatatataggactcttccagtcagggaagagatactgaaagctttactaaactctgatatcatcggattccatacctttgactatgctcgtcatttcctttcctgttgcagtcgtatgttgggtctggagtatcagtcaaagaggggctatctaggattggagtactatggaaggacaatcagtattaagattatgcctgttgggattcacatgggtcggattgagtcagtcatgagaatggcagatgaggaatgcaaggtaaaggagctcaaacagaaatttgaaggaaaaaccatcttgcttggtattgatgatatggacatttttaaaggcataaatttgaagattttggctatggagcagatgctcagacagcatcccaaatggcaaggaagagctgttctggtccagatagttaatcctgctagaggtaaagggatacatctggaggagatacatgctgaaatacaagaaagctgcaacaggatcaacagagtgtttgggagacctggttatgaacctattgtttttattgatagagcagttcctattgctgaaaaagttgcttattactgcattgctgagtgtgttattgtcacagctgtaagggatggaatgaacctaactccttatgagtatattgcatgtagacagggaatatctggttctgaatcatgttccaatgtcaatgaccctaagaagagtatgctagtaatatcagaatttattgggtgttctccatcacttagtggggcaatccgtgtcaatccatggaatgttgaagcaacttcagaggcaatgaatgaggccatctcaactggtgatggagagaaacagttgcggcacgagaagcattaccggtatgtcagcactcatgatgtggcttactggtcacgtagtttcttgcaagacatggagcgggcttgcacagaccttctaaggaaaagatgttggggaataggtcttagctttggatttagagttgtggcacttgaccctaattttaaaaagctctcaatcgatgctatggtttcagcttacaagagggcaaagaatagggccattttgttggactatgatggtactgtgatgccacagaactccattaataagagtccaagcaaggaggtcttgtctattttggaatcacttagtgaagaccccaaaaatgttgttttcattgttagtggacgggggaggaatagcttaagtgactggtttaattcctgtgaaaaacttggaattgctgcagaacatgggtacttcttgagatggtcccacaatcgagaatgggaaaattgtggtaagagctccgactttggatggatgcagattgctgaacctgtaatgaaactctatacagaggcgactgatggttcctctattgaaagaaaagaaagtgctttggtctggcaataccgtgatgcagaccttggttttggatctgctcaggctaaggaaatgttagatcatctagaaagtgttttggccaatgagcctgttgctgtgaagagtggccagtttattgttgaagtaaaaccccaggatgtgagcaaaggcttagtcgccgagaagatattttcgtcaatggacgggaagggcaaacaggccgactttgtgttgtgtgttggtgatgacagatcagatgaggacatgtttgagatagttagtagtgccatctcaaggaatattcttgccaccaatgcttctgtgtttgcttgcacggttggacaaaaaccaagcaaagcaaagtattatttggatgatacaactgaggtaacaagcatgttggaatctttggctgaagaatcagatgcttcaccctacatagaagaaactggagattcctctcggaggcaagtgtgagttgaggttgaggtttctcttattttaggtgatgattttttttttctttttttaattgggatgtaatattcgtggtgatatttggggcgtttgcagagtatgttttcataatatatttttttttccttttttggtttttcttctattatatattacatatatttttgggagaatcccgtcattattttctgttgctgtcattgatagtttctattattttagttgtggttgtggtgtagcagataacaacgatgttagttttgatttttttatattctataacaaaggaagaaaa

SEQ ID NO: 95933 - DNA, 415 bp, Glycine max
  Clone ID: PAT_MRT3847_57639C.1
atatatcataatattgtttacttttataataataattttaaaatcacattaatgggaatttataattagataaatggggaaaacaattttacactatataaccattaaactctattaaataaaatattctttctgcttcaatgcataatgaaaattacttttcgattaatcgacacaattaattactaaaacatttaaatttttgtgaatataatattcactttaatatattttatcccaataattaatggtataaaaccttaattaaatcgttgctctctcttaaatatacctaataatcacatctaagtgtgggttgatataattttaaaaattatttaaagattaatcttttaaaaccatttttctaatcctaattttattcagttttattaatataaaatattttttttta

SEQ ID NO: 95934 - DNA, 312 bp, Glycine max
  Clone ID: PAT_MRT3847_5763C.1
gattcataccctttgcacattcttcttcttattcttgatctctttctctctttgaaacaagagcagagcaattaataactcatgttatgggtcactcaacgaccgtgatgatcgtaaagatattggctctagagtgatgggattgtgctctactgtccccagaggcgctaacgatgacatgatgctcaaactctagttcagttcataatctgacaagcttgcgattgcttcaacatccatcatgggacagcaacatcaacaaccccaaaatgggtggtcaacagctcggacaacgaccaccttcactgacca

SEQ ID NO: 95935 - DNA, 666 bp, Glycine max
  Clone ID: PAT_MRT3847_57640C.1
acggctgcgagaagacgacagaaggggatgcacacttaattcctcaggatatctacactactactgcatctaactgaaatcaaagtttcaattaactgaagcagacatggcctctcagagttgcatcattttggctttgttcatcgctattttttccttctcaagcatggacacagcatttgcagcacgccatctcttgcagaatattccagggctaccagatttctctacaccccccaccttgccacctttaacaatcccaaatgtactatgcaatggatccatattcacattcttacccatcttatgtccaccatcttcaagcaccagtactactatcccttaaggcttcacttggagtttgatacataatttatgcactaatctctacgtactcgatctgcatttcggttcaattctcattgcatgccttcctcgatctcgttacatgtttaataagtgatatagataacactatatacacatggattatgctacttacatgctgcatgtttattttctgttggtgatgttttctttctctttttcttttcaatgttgtatttcttcttcgcatttgagtacgtgtgtattcctgttgcacctctgcattacttcatgtacctggagacccgttgcaatagtatatgactaatctttctttag

SEQ ID NO: 95936 - DNA, 377 bp, Glycine max
  Clone ID: PAT_MRT3847_57641C.1
tggacgcctgcggtaccggtccgaattcccggtcgaccacgcgtccgcgactttgagtggtcaaaaacctctgcgcttctctctcaagtctcaaagacacgctccctgaaaaccctaacatctaccacttctctgagatctccgccgcaaccgccaatttctccgcgccacgcctttcctcttcctcctggcgctgcgtaattcgtcaccgcgaagtcgtcgtttcgcgccgcgacttccggcggcaaattgatatcccggagctcagccgccggctcgccctcatctgccggagtcaccacagcagcctcttgaaactcctcggcgcgtcggtctctggcgccgtcatctttctcggcaacgaggtcggccccggg

SEQ ID NO: 95937 - DNA, 172 bp, Glycine max
  unsure (1)..(172): unsure at all n locations
  Clone ID: PAT_MRT3847_57642C.1
caaggaggaannnaccaagttggggacggtcattgcnattnatctnggnacgacctatttcatgtgttnggtgtttacaagaaacgngccatggttnaaatccataggccaantgnaccaaagggnagccggaatcnacccccttcnttgnggttgccttncaacnngacna

SEQ ID NO: 95938 - DNA, 770 bp, Glycine max
  unsure (1)..(770): unsure at all n locations
  Clone ID: PAT_MRT3847_57643C.1
cgaattcgagctcgttacccggggatcctctagagtcgacctgcagcaacatcacactattagtcagatgggacaacacaaagatcataggtgggagtggcattttacttggaggagaaatctgtttgacagtgaaatagaattggctgtcaacttccttggagaggtagaaggaaagatcatccagcatcaaggtgaagatggttgggtatggattggacacccttcaggtatctattcttctcattctgcatatcacatgttaagggaagggggatcagttgcaagtaaggagcaagtctttgtggaattatggaaactgaagattcccagtaaaatagctatattcgcgtggagattatttcaagacagattgccaacaaaaagtaatctgcaaagaaggcaagtgcagatcatggatgcatcatgccctttctgtggaggaatggatgaggaggtttcccacttatttttccacttgcacaaagattcggctgatttggtgggagactatatcttggttgaatatcagcagtggtgttccccttccaatctaatacaacaattttcttcagcactcttttcggcaagtggaaggtataagaagcggcaggtggcaaagttggtggaatgctggtgttttggtctatatggaagatgaggaacaaaattattttttccaacgattcttttaatggtagcaagctttntgacgatgcaatatttttagctttggacatgcttacaaatttggacaaagatttcaaact

SEQ ID NO: 95939 - DNA, 483 bp, Glycine max
  Clone ID: PAT_MRT3847_57644C.1
attctcctcgagtacggctgcgagaagacgacagaaggggggtgattttctatgttcacatggtgatggcatctgtatacctgcatcttatgatctatcaaggaacagcaggaaacttgcagaacctgtagggtttactgggcaaagggcaattatagacactgttagaggtcctgaaattgggccaaggaatatgacatgtcaccaacgatgtgagtttagtcctaccaggactgagcgtgaggattatcttaattacaaattacaggtaagagcaacacaggatgagcgtttgtatcagtatgatgatttacctagaaggatagctcctcatggtcgattggactatgagcaatctgtaacagaatatgataatagggaattttccagaccttatattccacatccagatttacatagaacaggtaagagtgaagattcttatggcaatcaaaagaaggctattgtacacaatcattctgc

SEQ ID NO: 95940 - DNA, 200 bp, Glycine max
  unsure (1)..(200): unsure at all n locations
  Clone ID: PAT_MRT3847_57645C.1
gtccgtcttgctgcgagctgccgcccgggggggattcgctcgctcgcttcggtgtccttttttcttcttctcttccgctctctcttctctgtgtctcggnggcgccttttgggggcttctggctggttgttcgggtgcttctgctctttgggtcctttttcttcgctttggcttctctgttgctttcggccttttggttg

SEQ ID NO: 95941 - DNA, 282 bp, Glycine max
  Clone ID: PAT_MRT3847_57646C.1
ggcgaggcgcctgatggcccggaacgcgccagtcctgccctcgtccggatacattgacacacgtgacttgaagctggacgctttgcacaaagggcctgcactgaacaagcgctcggttgctagtcacaaaggctgcagcttcaagaactgcataaactgtttaggaccccacagtcacaatgagtgagaaccctcacccctaaagataatgcattcagccaatatgagcccacgcaccattgctgagctaaacgatgtgcacatcacacacgacatgccact

SEQ ID NO: 95942 - DNA, 778 bp, Glycine max
  Clone ID: PAT_MRT3847_57647C.1
cctggggtcctgttttgttctgttctgtcaccatcattcttgaaccttcacaaaagccagccaaaaaaatggctccaaatttcttgcaccaagtggcattccttcttgtgctctcaactgcggtttccagtggctatgcttgggttggtgtgaactggggaaccatggcgacgcaccagcttcaacccgagaaggtggtgaagatgctgaaggaaaacgggttcagaaaactgaagctgtttgatgcagacgagttcattatgacggctctgatggggaccgatatcgaagtcatggtggccatacctaacaacatgttggacaagataagcaatagtcctaaggctgcagattcttgggtgaatgataatgtcaccagttacttcactggtgtcaaaatcaagtatgttgcagtgggtaatgagcctttccttaaagcatataatggctcctttgcaaagaaaactctgccagccctcaagaacatacaaacatcacttaataaggccgggttgggttcaaagatcaaaatcactgttccattcaatgctgacatttactattcgcccgattcaaatccggtgccatcgaccggtgacttcaggcccggaagtgcgagacctcaccgtcgaaataatccaattcttatatgcaaacaatgcacctttcacagtgaatatctacccttttcttagtctctatggcacccaagatttccctttttgattttgcattttttgatgggaacaacaagcctctaggggatggtaaggcactt

SEQ ID NO: 95943 - DNA, 443 bp, Glycine max
  unsure (1)..(443): unsure at all n locations
  Clone ID: PAT_MRT3847_57648C.1
ccacgcgtccttttctacagccatgaaaggtatattgagtaagggtgattgaagcttattcatgggtgatgcatatgggagtctgctccttagagaaagaagtggcaaggagttagcatggaggaattgcactgctgtgaggaaaggaagaaatgttattggaggtcaaccttgggatggattaccaggccaagaaaggaaggttacaactgaagatactctcttctttgtgagcaaaactggaagactaatgaagttaatggtttctttgaagaagttgaaatggaaagattgcagaaatcctccagatgctaaggttgcatgtatagtagaccaggaattgttcaggaaaaatatagtatttgtcatcggaataaatggtcgcctatatcagtataacaaagtgactgatntgggcatgagcataccattctcagcatttg

SEQ ID NO: 95944 - DNA, 282 bp, Glycine max
  Clone ID: PAT_MRT3847_57649C.1
ctttgctgtcagaaagaagcaaacaactctctctctctcactccaccaccctttatttctctctcacacacaggtaggtatctgccaaagatataaaggagcccgaagaggacactgtaaaagctttttacaaacttggtctttacacatccaacacaaccaacgaagtaaattagccaccacagtcacgcacgctaagccaaacctaatagtaatagtagcaagtttctttcttttttgctctctctctctccatggacttccatctgaagcaatggagaa

SEQ ID NO: 95945 - DNA, 246 bp, Glycine max
  unsure (1)..(246): unsure at all n locations
  Clone ID: PAT_MRT3847_5764C.1
gtcttcataaacgccgcccaaaacttctcatacccttttattcattccattcgtttctagggttttcttttctttgccgagaaaatgagagagtgcatttcgatccacattggccaggccggtatccaggttggaaacgcctgctgggaactctattgccttgaacacggcacttagcccgactgacagaagccgagngacaagaccgattgcggaggagacgacgccattaacaccaatttctgc

SEQ ID NO: 95946 - DNA, 282 bp, Glycine max
  Clone ID: PAT_MRT3847_57650C.1
ggggggtggaaaaaaaaccaaaaactttgggggtttactaaaataaggtttcacaactccccattttgggcctggtaataagaactggacattaccccaacttttccttaaaaattcacaacgggttaaacttttttttaccatacgaaacccccataaaactacacattttagattcacatataccagacccacatttttattttttttttttataccccaccctttcgtttttaacagggttttaaaaataaagacattatttccttcctttttaacccc

SEQ ID NO: 95947 - DNA, 562 bp, Glycine max
  Clone ID: PAT_MRT3847_57651C.1
gggtcgaggtgattggtgtgactcgttcttcttcatcggtagcctcttctcttgcagatggtgcgctaggtggttctctcacccgaaaatgtcttgctgcggaggtaactgcggttgcggaagcgcctgctagtgcggcaacagctgcagaggctgggagatgtacccagacttgagctacaccgagtcaaccaccaccgagaccttggtcatgggagtggcaccagttaaggctcaattcgagagtgctgaaatgggtgttcccgctgagaacgatggctgccaatgtggagctaactgcaccttgctcccctgcactcgctagtgaggtggtggaaagctaaagcttcgagcagaaatggcccttatagatagtgataaatactatgcgtagctgcaaaacttgcaaattatgtagtatgtattatgctgcactctggtgtcctgtgtctaaacaaacacccttagatacagttgtcatttgttgcccttgagcaagttccagtgttctggactagtgatgggtgagctatggtcatggatgccctttttttatataata

SEQ ID NO: 95948 - DNA, 345 bp, Glycine max
  Clone ID: PAT_MRT3847_57652C.1
ccacgcgtccgcgatgtgaacgagttcaatccggggcgtttcagcgatggtgtggcccgcgcggggaagcatccattggcgttcataccgtttggtctcggtgtgcgcacatgcatcggacaaaacctcgcagtgctacaaacaaaactggccctggcaatcatactgcagcgttttagtttcaggttggcccctagttatcagcacgcaccaacggtcctgatgctactctaccctcagtacggtgcaccaatcattttccaacaattctcacaatcctcttcttaattcaaaggaccttctgcttagggacaaaattacccccccttatggcttttccccttc

SEQ ID NO: 95949 - DNA, 119 bp, Glycine max
  Clone ID: PAT_MRT3847_57653C.1
caacgtgatacaagcacagggaggggccactttctccattttagaaccacccacaaataccaatgcatatttcggcatgacactgagctcctcacaccatcttccaagtaatcgctaaa

SEQ ID NO: 95950 - DNA, 185 bp, Glycine max
  Clone ID: PAT_MRT3847_57654C.1
ccctccgtcagcacggatcaggcactcgacaggccgtcgacccacgtcgtccgattccatacttagggatgggctcataaatggcgacgacaccaaacttatctcatatacttaacgctacaactggataacctatttccactaaccataagcaccaatactgccaagattaataccacatcctc

SEQ ID NO: 95951 - DNA, 163 bp, Glycine max
  Clone ID: PAT_MRT3847_57655C.1
aattcggctcgagccctcatcttttccctatgggatgtgcactgccaccgtggaacgtttattgttgcagtggactctcttattgattgggcggttccgaagaacccggtttatctctggacgcttccgatgttccacgctaacggctggagcttcccgtatg

SEQ ID NO: 95952 - DNA, 817 bp, Glycine max
  unsure (1)..(817): unsure at all n locations
  Clone ID: PAT_MRT3847_57656C.1
ttgcatgcctgcagttgtttcctgttgcttatgagatggaccagattgtataaaaggagtctaaaagtaaataacgtacgattgcgcgcctaaagaattttgtgatataaatgtctaaggttaatatgaagcccaagtgggagattgttaggaattttataattcctaattaattaatatgggctacatattatattataacatttatattagttatttacatttaaatgggttcaatataaagtgatctatttaagtgagcccattagactgccaacagataattgatatgggcttaatgagcggaaatcagtttggtccattaggggataatgggaaacctaataggtttaaaacataaggcatggttatggtccccaatataccaaatcaacaaacagtttctcctctccccatctgaagagaaaacgaaggtcccataaggaagaaggtgatttggttgaggaaggtcattaaaccaattattcgtgaccactgtcagatttcgctgcgtgttaatcaagctctatggatccaagtattccttaaaacctcttgataatctgacgtaatatattttggtgctcatttggtattgtatattgtttattgaaaattcccaacagagaaaacagaaatttcatactaaaatgaaatcacaccaaggaagcggattaggacaattntgaaacanaaaatcactgaaacatcaagtgccaaacatatgcacaattntccaaacatatgcacaattctgttaaagaaacaaactaaaggttgggatacaaggggagatgttaaaagttaaagggggttt

SEQ ID NO: 95953 - DNA, 693 bp, Glycine max
  Clone ID: PAT_MRT3847_57657C.1
ccacgcgtccggtcaggaaagatacatgttggccaactgggtcgcttccaataccttcagattttggttgggtttcgtgcttttggaaaattcgttgagtttctgaagctatggaggcttataagagatgggtgaggcagaacaaagagtttgtgcactccatggagtctttggccaatggattgacatggcttcttcctgaacggttttctgaatcagagattggacctgaagcagtaacaaccattctgggaatcatcacagctctcaatgaacatataattgatacagctcctaagcaaaatattacaggctctgtcaagccttattcgtttccttatccattatgcttatctgcattaaaggatttggaaacattagttgaagttgtggcacagcaatactatggtgatgataagaaatggaatttccttgctgttactgaagcaaccaagtaagcagaataatggtacgtcggttatctttgtttcggaagagtggatataagatgctgctacaaggaggggaaactcctaatgatgaggagcattcagatagttttacttcgcaacatcatatgggcttaaagcccgatgtgcatcataggcctggttatatgaaaaacaatcttggtgcaaacccaatgaatcaggaaggaagagcattatctgcttttggttagatttggagaaa

SEQ ID NO: 95954 - DNA, 429 bp, Glycine max
  Clone ID: PAT_MRT3847_57658C.1
acgagtgaccctgccattgcattgtgtttgtattgatttaatacttaacagtcaacattgtgaatattctgtcggtgaaattctcaaaccatataccctgcttttaattgtaataaataatcagggaaaaaaggacagggcttgcactatccactgtacatgccgaccactaagtgatacattgtcacaacccgaatcctgtcattgatgcctaacaactacccaaacagggtggataaaacgggaaaaaactaattattatttgaacagatgataattacaagcccaaatgatttggggatataccactcataagggtcccccgcctagacgccgttaccagaggcaacgctctgatagaacaaattgttcccctgggctgcattgctgacatatccttgggatgacccaaagaatgtccgtacggga

SEQ ID NO: 95955 - DNA, 911 bp, Glycine max
  unsure (1)..(911): unsure at all n locations
  Clone ID: PAT_MRT3847_57659C.1
ctcggaattcggctcgagctcaatctgatttgcactttattgagcctcacaatttgcctttaaagcctgcaggtacctcggtccggttgcgcattgtgattcattagcacatttgcaaagtgttatttttctttttttctcatttgcactgcaaattgcaatggcttccaacaaggttattgccaccatcatggtgctttctctccttgcctactcaacatcattcaccaatgcatgtggcacatgccacccaaaacctaccccttctcctcctcctccatcaggaaagtgccctaaggacacattgaagctaggggtgtgtgcagatattctaggtcttgttactgttgttgttggctcccctgtctccagcaagtgttgtgcattgcttgaaggtttggctgatttggaggctgcactttgcctttgcactgctattaaggccaatgttcttggaatcaacttgaatgtgcctatcacactcagtgtgctactcagtgcttgccaaaaaactgttccttctggtttccaatgtgcataggcttccatcatgttaggttcattccatcacttgtgtcctcaaattattttgttttagttcttctttgttctatgtgtgacatgtttcattttaataataaggtaaacatatgtttgccttagttagtagtaacattttctcttttctagtaaatttggggaacttagattattattattgtgatttttacttttggggtatattggaggtggaaggagttgagtagagaaagagagtaagttccttaggggatgattaaacctctgatatcacagttaaaccaaaccttanagaccaaagttagtcgacaaaattgtatgcagaatttaatgtactttacaatcaagtgtgtgtattatcaatttatgtt

SEQ ID NO: 95956 - DNA, 393 bp, Glycine max
  Clone ID: PAT_MRT3847_5765C.1
ggcagaaatgattttttgtctttggggtggtgatgaaaaattgatgcgtgaaaggacacacctgctgttggcttgttgttcaagaatggcaatttgctagaaagatgtttggagagtatgaagtggaatctcttgtggatttgcggtcacaggtatttgcagtcgcatttttaatgagatgctcattagatatagctatgaaaaatttctgcgccaggctaaagcttcaagtatgtttttacaacgcttcaagaagtatgcttatttgagtgtgtatggcgatgataacttaattatggttcatcaatatgtgaagccttactttagtggctctaaattgaaaagctctctagctggtcataatattaccattactgatggtattgacaatac

SEQ ID NO: 95957 - DNA, 125 bp, Glycine max
  Clone ID: PAT_MRT3847_57660C.1
tttcttttcttggtcgaaacataactttacggaaggttctctatggggttcaatcatgtgctatgatttccttgcaatgggagactcttaaggctgctgatctacattgggtgatatgttcagga

SEQ ID NO: 95958 - DNA, 453 bp, Glycine max
  Clone ID: PAT_MRT3847_57661C.1
ggctcgaggcaactttgtggcaagtggctatccaccctcatttcagtcactgcttcatgctatcttatattttcaaggatatgggggaaacacgttttctcaaaaattgtaccttcttgatggcgattcttactttgctttctagctttctcttgaaccatgtcatggctagtgtttacactgttggtgaccaagaagaatggagtagccaaacaaattatgcttcatgggcagagagatacaattttagccaaggcgatgttcttgttttcaagtacgtgaaagggcaacataatgtttatgaagtgacagaagacacgttccgatcgtgtgatgcaagtagtggtggagtgttggccaagtatgaaagtggagaaaatcaagtggcactcagtgaggtgaagagacattggttcatttgcaacatagcagggcactgccttggaggcatga

SEQ ID NO: 95959 - DNA, 201 bp, Glycine max
  unsure (1)..(201): unsure at all n locations
  Clone ID: PAT_MRT3847_57662C.1
accngaggagagtgatcgncanttaatgatctncgagatagtgtctcgacagcttattgagtatacgtgagtatggaantagactgaatggnattgagaatgcttaatcttggatgacccatcgatgttgggtcgaggaagaatcttatcactatagcgncaatgagatacaatcagcgctatgcncagccgagnttggat

SEQ ID NO: 95960 - DNA, 276 bp, Glycine max
  Clone ID: PAT_MRT3847_57663C.1
cgtacgcgtgggtggtgcagtttggagagattcaatacaactttttcctgaatctctacaaactgaaccaggatggagagatttatgaaaaatttgtaacgatatttacacaagaggaatttaattacagtttggaaaccataagtacgtgctacaacaactttgttgtttgatgggagcgcatattcgtatgctgtagggcatgatagcttactgtctacaataccagctgagtatgtaattggcgataagttaacaaccataaacaatatttgc

SEQ ID NO: 95961 - DNA, 451 bp, Glycine max
  Clone ID: PAT_MRT3847_57664C.1
acaaaaggaatttatttattataaattggggagctgcgaatcatataactttggtatcatgcattattgaggcaactgtgatgcatgggtaattggataaaaaagaatgaagaaactaggtttaaatcggctaatgatttccagagtctagaaatgatgaacctctaaaaggcaccaaagaaaaaataaccctgaaatagcaatgcccttgtcatggcactatgtttcaataatcaagatgaatggtgttcggtagagcctatagtttagtagagctgaagtttatcagacaaatgaataagaaaaatggtttctataactttataactttatgtattcatctgcaccatggaaatctagttcttccatgttatctagttaaaaaaaggatgtttataagccagtaacagcattagagtcctcaatcctggtggcattaccattaccactg

SEQ ID NO: 95962 - DNA, 254 bp, Glycine max
  Clone ID: PAT_MRT3847_57665C.1
tattcattctctattgtcactttgctaccggttctttcaagattcatatcttcttcaagaccctcaccgtaaagaccattacccttgacgtggaaagctctgacaccatctacaacctcaattccaatatccatcacaattaatgaattcccctctatcatcaacctctcatctttttctaaaatcatctctattactttcgtaccctctcctactacaacatccataatgattcaacccttcaccttttcctt

SEQ ID NO: 95963 - DNA, 794 bp, Glycine max
  Clone ID: PAT_MRT3847_57666C.1
gcagcgtccggtcttggtcacccctaacgccgccgtcgtccctcccttctcttagccatcaccaacgctggcatcactcccttctctcagtcgtcactgacgccgcacagcgtccctcagccccgtcacaccccacagcatcgaccccggagcaagcctcctcaggcatatggaaatggaaggataacaaaccaacccatagtaaaaaaaaaacattgacaaaacaaacaagtggtggaagggccttaaatgatcttaccactcattcactatgtatgaattcaatatggtggaaggaccttaaatgataattcttactattgttctgacatgtgttagtggttctgcgggtaagaagttggctgaaagcatcatcaaagagaagcttgcagtagctaatgcttgtagtagatctgaagctattcctccagagtgggctgaagctgaacaaatttcataggcaaatgaaaggtctgaaagacttgagctacaaatgaaggagtggcaggaacaaaatcagaagacccaagaggagatgcttaacacccttaaggattatgaagaattctctaataatgatgaccaatacatagttattctttagagccatgatacttatatggttttttgtattatgagttagtatcgttcttccgtgatttttttatacttagtagtatcatttctatggtttttttaatgactgagtagcccttatatgtattatagcttagtagttctactgtgaagtgttatggttatatggaaacgaaataaatattttgtgttggttt

SEQ ID NO: 95964 - DNA, 476 bp, Glycine max
  Clone ID: PAT_MRT3847_57667C.1
ctctccttctccatgcttctcttcaaatctagctaagcttcttagttctaaagagcacacagcaagttcttaaatgcagtgactattactacttcattggcagaattataagaaaatgagagaaaatatttcagaatcatggctagttatgatcactgtgatattggccactgcaatatttgcaaaactatttcaattcaagttaaggaaggaagataaaagcaaatgcagattaccaccaggaaggagaggctggcctttgattggtgacagcatcaattggtacaatgctgttgcaagttctcatcctcctcagtttgttgaagaaatggtgaaaaggtatggtaagatattttcatgcagcctatttggaaaatgggcagtggtgtcagcagatccaagcttcaaccggtttgtgatgcaaaacgaaggcaaattatttaagtcaagctacccaaaatctttcagagatttgg

SEQ ID NO: 95965 - DNA, 324 bp, Glycine max
  Clone ID: PAT_MRT3847_57668C.1
attattactttttttttttttttttttattgtttaatttaacacatttttttataaccatgtgttcttaaaatctagaaagaaagccaaaataagaaggttatcaggggctacaaaacacacttgtgaaaaaaggacacaccccaatttgtttctaagcaaaacaaacaccccaaaaaaagaacacagcaaaaacccccgtttaaggcccctttagcaacccagggggaaggaaaattccttgtacaaaaaaaaaaacgcccaaaacgaagaatttaaaaattgcccaaaatgcaccctgacccaaaacgaatccccaaaaggg

SEQ ID NO: 95966 - DNA, 219 bp, Glycine max
  Clone ID: PAT_MRT3847_57669C.1
cgacatccagatacaatatgtgttcatatgatgcgcaatcgtgggatgggatggcctcgttcttcgggaactattccaaacaacatttcactgcagactgatcgcaataaaatggctacactgaatacacttagaatttttattctagcaagcattggttatggaagattgcgattggcctttttggaggaggaatcttacctgacaaaactggagatt

SEQ ID NO: 95967 - DNA, 154 bp, Glycine max
  Clone ID: PAT_MRT3847_5766C.1
gcagaagataatgttcgctatgacctccatcaagggtgattgaaggagattcgccaacatcgcttgcaagaaggccgatgttgacatgaaccaaatggcttgggagttgagtgctgcagaattggatagtgtgatgactggtgtggcggaaccc

SEQ ID NO: 95968 - DNA, 327 bp, Glycine max
  Clone ID: PAT_MRT3847_57670C.1
ggcgagacggctgcgagaagacgacagaagggtttgttcgtctcatatggtgctaggtgccacgcatttctcctccacctcttattctccatcgtgtttatgttcgcatctcatagaggcacgtgtatcccttgatgcttttaaaatataacacatgtaccccttaaggttgtaaaaatggtacacatggggtctttaaaaaataatacaagtgtccctttgttttacaaaaatttcacctaatacccatcttccatctcactcattgaatgtaaaagaaatacaacagaacaattgagcagcggctttcgttttgtcttatttatt

SEQ ID NO: 95969 - DNA, 1812 bp, Glycine max
  Clone ID: PAT_MRT3847_57671C.1
gagacgtcgaagaccatctctgccgcactgaaactcttcgacgcaaagaaagagattctcaagaaagcctactacgatctccaaagtcactcctctcttctcgctccttccttctctctctcatggtcccacctcgacgcccacttcacctccctccacacctccctctcacaccgcttccacctccttcagtccctcgaatcccaacaacaatacccaccatcctctccctccaaatacctcagctttccaccctcccccaccgacccatcatcgcaaaacggcaccgcattgcccaaaaatccctccgaacaaattctcacgctctgcaacaacatggacggaaaagggttgagggactacgtcggggaccatttaaaagacaaggctgcaatcgaggatacgcttcggagtgcactcaagagtgcctctgatgctgccgcatcgatgcttctcgattcgttggacggtgttgtgggcgcgaatgtggtgaaagatgacacggaattcggctcgaggaagaggacttgcagttttttgttcaagcagttgagggctgctgcgtctgtgtctttgagttttaaggagaagttaagagccaatcggttgtgtgtggactggaagcgaagcttgatgagggatggttgtgtggatggtgttggggccatggctttcttgcattttgtggcggcttatggcttgctctctgaattgaccgtgcatgagattctcaccttctctgttatagctgcttccaatgatgagcttgctgagctttactggagtgctggtttgacggacaaagctccaggtcttgtgcagaaacttattgacaggagcaaacatattctggctgtcaagtttgtttttgagttcaatcttgctcataagattccaccagttcccattttggaagctcatgtgaatgagtctcagaaacttgttaaaagactttctgaagaagggaagtcacttagtgagatcacggcgagagaaatccatgcactgaaatcggcgattaaggttattgagagtcataatcttcaatctgaatatccacctgaaagccttcaacagcgtatagagcaattgatgaagcataaggcaaatgtaaaatatgctgcatcggctttttctgcaaagcctcctccacatcagcagcaacaaagtggaatcaagcgtcctcgaatgtccgagccagttggttctgcttctgtcctgaacagtgccagtggtgccagctcaaccgttcactaccaacaacctcatttccagtcatcaggtttgttgctggaacatctaaatccgtacatgaacttgccaaccatgccatatggcatgaaggctcaaaccccatccatcccgccttatacaggcgcttcaactgggccttatggtcctgatggtgtcccaatgggtcctagtggcaaccgtggtcaaggtggttctcttccaatttcatcagaaccacttatgccgtctggttattatgatagtggctctgcttatggtggttatggtctgcaacattattaccaaacatcttatcctcagtagattgagatatcgttttcttttgaatactgaactcctgggttggtggcttggtattagtttctctatgactttgcacttctgacttatagttattaaaagcattgcttgctttgttgatctccatgattaaaggaaaggaactagattcagcaatgaaggattgtgagggaatgattagtttcacaattttaattacttgaatgattttacatctagaaaaaacattttaggttaaaaaaaaaaaaaaagggcggc

SEQ ID NO: 95970 - DNA, 740 bp, Glycine max
  unsure (1)..(740): unsure at all n locations
  Clone ID: PAT_MRT3847_57672C.1
gtggttttctctccccaaaaacaaacagaacaaccaagacaggttttgttgctcttcgagagggttgaagaggatgttctgaaaggaccgctttatctgaaaaaagatttgggtttgcagaaagtcatctactgaggagagaggagagagaaagaggtgtgatagagaaagagtgttgtcttttgtttgtttgtaactttgcattgaattccattcattttttttctctttctctctctctctctcttgtgttactcgctacaagctattcgactataacaccgactccctcttttaccgtggaagaaggaaaatgaatatctcaagtggaagaaggcacagaaggcggtttcgccattgatgagagctagctactttaagagagaacaagagcaagagaagaaaacaacaaaaacaaaagcttttaagttgttctttctctcttgtcatgatggcttcttcaaagaccaccaacccaataacaactactacacaattggaaccactccctccacctcaacaccgtcatcatcctcatcatcttcatcagttacaacaacagcaacaccaacatcattatcatcaacaaattcatgaccatcaaatttcttttggactgatgcaatcctcttcttcatcttcctctatcccccgaactaccctcgaaagcaggattccggggcttatgacttnggtgaattggatcaagcctttttcctctaccttgatggacaagctga

SEQ ID NO: 95971 - DNA, 426 bp, Glycine max
  Clone ID: PAT_MRT3847_57673C.1
ggcaatctggctcgaggcaaacttcaacttgttttcaaggtttagagaaaattacaagcccaaagtatggcggcgaagaaagcggtgatcctaggaggtggagttgtcggtgccaaccttgcaaaaactatacaacattgagccgacgtcacccttatggatccggatgaatattaccagattccatgaccaagtgtgtggggatagggtgagcctacttttgctgaagggatgacactcaaccgtacagagtactccctagggcgcaccttgctgaatccaatgctgacgacataacttatactgcaggggtgactgtagatacgcctgcacattggctattactatcttgatattgccactgggcacacattaccgatctgcaaaaccaggagtgtgagacttgtccacattcaaagagaaaat

SEQ ID NO: 95972 - DNA, 349 bp, Glycine max
  Clone ID: PAT_MRT3847_57674C.1
cacttttccagtagctcatgcttcgctaagcttgctggcttaagcagaaatgatgcgtcaatcgcttgcgacggggacgcttcatcttatgcgtgtgagcacttggggaagaaacgtcaaccttggtgaaacggtttatatgttcattaccataaactataggctttactggagtttgattgctattcgccacaccggtggagtcatggcatgctacagagatgaagaacctaagggatctcccaaagaagcttgcatgttgcacatggattcccgaaaaggaattcatgtacatctgcagaatgttttcgagagatatctatgttgagaatggcaagagaggcacaac

SEQ ID NO: 95973 - DNA, 374 bp, Glycine max
  Clone ID: PAT_MRT3847_57675C.1
gatctatacctttcttttataaaacgaaaggaaattttttcatcaaagataaatactaaaatgaggcagtattcggtactggtgcaacgaatgaactctaatatatctaatggggaatagctcgtaaactattgtggaaaagtgccaacccacactatgactgaactttgaaacgttatgtgcttacataactgaaatcacatgcgtctgcttgtataaacgtacaaggatccaaaggcagacagacgaactcagtcagggtcaagctatgaggctacggaaaatcgtgaacactgtataaatcaaacgatccaaagactaatggcaatggtggcgaatcaagagtgcctaaaggctgataatatgtggtggca

SEQ ID NO: 95974 - DNA, 237 bp, Glycine max
  Clone ID: PAT_MRT3847_57676C.1
ctttattgtatctgagcaagttaaggttgttttctgggtgatgagcacacaggcgggactattttattgattccaaggtcgtatagtggatgcgcttgtgtttgtgtcagtctcctccttctccctcagaattcgcaatgctgactgagaagcacactctgttggcgacactggctgtggtgctcgcagtatcacaagcagtagatctggctttcgagcgagccgcattgctcgctc

SEQ ID NO: 95975 - DNA, 127 bp, Glycine max
  Clone ID: PAT_MRT3847_57677C.1
tcgaccagctgactagtacatgcggcctctccttttaaacatgtctgaagaattagcctgcagcttatggcagcaagtaacgggacaaccctgcacaaacctgatgatgattcagtcgacgcattag

SEQ ID NO: 95976 - DNA, 261 bp, Glycine max
  Clone ID: PAT_MRT3847_57678C.1
ctcgtccccgcgtgcttcatatgggaagacttctgcggggctttccaaggattggaaggtttctgagaaataatctaggagggcggttttcccttggtgcggtgatagaaaagatgttttgcaatgtcaagatagatctaaaaaggattctcctgtgttacatattgtttacacattgataggtcgagctattcttttccttttgatggcccaagttaacacttatcagaaaggtctcattgatcgagcttttattaatac

SEQ ID NO: 95977 - DNA, 234 bp, Glycine max
  Clone ID: PAT_MRT3847_57679C.1
acacccacgcattcttttttgaatcatgatgttaataaaagaggcctcagatctgaatgcaaagctcaaattttgcagggagggggctggagcatatgtcatatatacacaggaccacctatgggagacaggatgcacatttatttagttgattttttcattgatacaaggattcatcaagtccagacattctcgcaaggataaacacttatttagttgattatttcattgata

SEQ ID NO: 95978 - DNA, 313 bp, Glycine max
  unsure (1)..(313): unsure at all n locations
  Clone ID: PAT_MRT3847_5767C.1
ttaagtgcaggaaactatcaactcatgagaaactggcacttaagaaaaatttaagcagactgaatggtggcaatctcctcaaggcaatgagcataattcatgagattgacccaaccttccaacatgatgctccacaggtcgaccttgaccttgatcgtcagagtgacttcatactgtggaaactaaacctttttaccaaagaagcactggaagatcaagacaaagctgctgctgaggagatggctgttaaccacaacgttaacactgaggaccaganaaacaccaacaaaaggaggaaactgtgactcttttg

SEQ ID NO: 95979 - DNA, 398 bp, Glycine max
  Clone ID: PAT_MRT3847_57680C.1
aaaaaaccggccggggaaaccggccttttattaaaaaaaaaaaattcaaaagagctttgacccccttcaaaaaaaaatttgtttcaaacaaaacaatataatttaccccaaaaaaataaaacaaatttttaaaacaggcccaattggaatttttagggggccccccccccaggaaaaccccaaagttcgactgggccctaaagaaaaaaactggaattttcgacgggaacccggggcacttgcctttaaaaaaaaaaaccccccccacgggggggaaccccacagggaatggccggttcacgattcaccccgataaacgggttaattgggagctttttttccccccccaaccccccttaaaaacggggggggcggatcggaaaaaaagcattaacccc

SEQ ID NO: 95980 - DNA, 272 bp, Glycine max
  Clone ID: PAT_MRT3847_57681C.1
gtacaggtcccatactacgaatctggatatcttagatgataccgttgaggggtgcgcccgggacttgatttggtctgtgatttaaaaggcttaatgagttgcgcggcccagcaaagacatgactacctagcttgatctattattggaagctctagtcagcgtgtatatcctatgggggggggcactgctacttatcctactaaaacagaccgccaatgtgactgaccagacacactctctatcgtacacagtgactaaaagtgttgatactt

SEQ ID NO: 95981 - DNA, 473 bp, Glycine max
  Clone ID: PAT_MRT3847_57682C.1
tacggctgcgagaagacgacagaagggatggttacgatacaagttatgtccaaccgagagttctactattttgcctctcaatattgcgcagaaaatgcactagaaagcaagcgtttggatgcttctccgttgtaactgacagcaatatgattgaagggctgctaaagaggaagtacttccccaaactgaaactggtataggcatgacaggatcaatgatgcaaaaggaaatatcaagaagagaagtaccaaaactgctctagaacaaaaaacctatctggctattgattataaatcaatctctcttaatttactttgtcaggtctcttgcaacttatgggtttcatgtgttaagaatgtcgaaagtggattctgaaagagtttagttttgcgttgtaatatatcctcatcagtcaattccaaaagttagctcatactcctcataacagtacttgtacttacaactatggattt

SEQ ID NO: 95982 - DNA, 269 bp, Glycine max
  unsure (1)..(269): unsure at all n locations
  Clone ID: PAT_MRT3847_57683C.1
gttttccttcatttatagtcatagccaatgcttatnatcttgcttggacctgtncttaaatctctactacattctgttcattaatttttngcagtttgcacaaccacctctgtttaaaacaattcanatggtcaaaagacatttaagctcatacgaggtttccattggattctttatatgaacaagttactccctactccttggaaacactgcaaaatagaagtgttgaacttctnctctcatggggttcatgacttggtttgccatcc

SEQ ID NO: 95983 - DNA, 249 bp, Glycine max
  Clone ID: PAT_MRT3847_57684C.1
ggctcgcggtatgaataaaatagactactcgaagtgatgaaaagtaaggaatagaggaaaacacctgggtatagttggattgaagaaggacacaaagtacacatgcttcttgatggtgaccaatcacatgcacaaaagaacgatattttggagaaggtggcaaaattgatatatccagatgaagaagccgggttacctccatcagactaactttgaggtgctagatgtggacgaacaccttacggagca

SEQ ID NO: 95984 - DNA, 923 bp, Glycine max
  unsure (1)..(923): unsure at all n locations
  Clone ID: PAT_MRT3847_57685C.1
cacgagtggtatattttatncttctaattcttatgaaagttgtcccatgaaaagtatctctgtcactgcatggatgaacgagtcctaccaactgcgtgagacatgtgggaatactatatcgttcaattaatannaccagtcacttaaccctctatcatgagaagntagtattactgtgtgtcatagtgatactcataggagaagagccttaagtgcncnntttttctcttctgtcnttaatatgtaagtttagataattctaagctgtcccatctgtgattagcttcatgaaagatcagagcgtaggctcgaggaaacaatacatgtttgtttctttagtgctgcagatattgttttgtagaattcagaatataatctgattaaaaagaaaagaaaatgtcatccaaccaaatatctgcagcactaaagaaacaatacatgtttgttttctgatttaaatgccatttaattatgtattttttattatttctattatcttcaacatttagtggaactttcgcagtgatttatgatgtcaacttgcatttttctctaattttacctaagaaatcaaggttctgatatatataacacaatattattatagggctctactagtttttagagtctaagatagaccattaataactaatcactcctcaccaaactgtataaatttgatctaggtatccttataaccaaaaatcatgaaagtaactttcactaaagtaggttttgcatgataatttcgtttagtgttccaaaaaccatgcatctatgttttcagcagccttgtattgcaccttacttgtccctctatcatgcattaggagttaggaaactagttacactaanttgaaaccgtttaatttggttttatacagcttgaaacgtcgagggtaagtctgatatagatgcataat

SEQ ID NO: 95985 - DNA, 549 bp, Glycine max
  Clone ID: PAT_MRT3847_57686C.1
ttttattaattttttttttttttttttttttttttttttttttttttttttttgtttttttttttttttttttaaatttttttttttttttttttttttttttttttttttttttttttttttaaaaaaaaggggggttaagaaaacaaaaagcccccctttttttttttggggaaaaaaaagaaggggggaattaaacttttggttaaattaataaaaaaaaagggggggaaaactcggggaaataaaaacatggggtgggggttttcttaaaggggaacctttaaatttttttcccccgacccggggggggaccgcggggttccccccaaaattacggaggggaccgggggggaacaatttttttaatgggtgggattaaagagctgggggagacctgggcgaaaaatttttcccggggaaaaattttctgccaaaaaattgcaacaaaataaatggccaagagctgtggtttaaagcgggggggcccaaaaagggaatgtgcgcaccaatttggggggtggactaagggggagctttcattgggga

SEQ ID NO: 95986 - DNA, 456 bp, Glycine max
  unsure (1)..(456): unsure at all n locations
  Clone ID: PAT_MRT3847_57687C.1
gcagcaggaactttctttctttgcatcttaactgcgccaataagtagttcgaattaatggtttaaacagttgtacaacctttgtcctgttttcaagattgttagcttgtgttttaacttttaacctcagatgctcttcacaacaaggcacaagctagttctcttctaataataaaatcatctcttgtcttgtgtgtgatattggcttgtgtcagctccaaatttggttagagtcctcactcacatttttcttactagagaagagaagagagaggagctggctttcccccaacatcaatggctttagtctctctccaccttgaaacttcggagctgattgtgaccactgattatcctcgccaatgaacccactgctcaacctcgatggggcttcatgcgacgtggtacggattctccacttctgtctattatttcagatagctntttactcaaatag

SEQ ID NO: 95987 - DNA, 222 bp, Glycine max
  Clone ID: PAT_MRT3847_57688C.1
tagtggagagaagtggtatcatcccaaccccgtcccgttctcacctgtctaattcaaaggtgttttttcttcccttcttccttcctacttttattcaatttccaacctttttctctctttcttttcccaattgaatgacaacaacttcaactacatagtaatattattatgggcgaggctgacgatttgatgctcctccagtgaatcttttccatcttttaa

SEQ ID NO: 95988 - DNA, 660 bp, Glycine max
  Clone ID: PAT_MRT3847_57689C.1
tcaattccagcaagcactttgagcaagccttggaaaacagcaaagagatgtgccgagacaccaccgatgacccaaaactgttcattcctccaccactcgtcgattccgacaccactccacctcatctccaggattccagtagcaaagatggacagaaagagggagatgaaccatatgctagcaaggttgctgatctgcaagcgtagtaaaagtaagttggaatattatgtcgccacaagacaaccgcgagcttgattatcatgacaaaatgagaaacaaggtttttcgggatgtgttttgagtgtatttcaccactcagctgaatgatctattatatttatattcacaaagtattacaaagataatcaatctccaactacaatttacaagagagcaattaagttatcaatacttcctaagatgcagtgaacctagctatacaaaatatcaaggaaagagaagcaatgataaaaaaaatgctctttattttctaaaaagctcctattttccaacagttatgaaagtaatttctaggaggaacacaagcgaattacaattttggatgaaataaccaaaagaatgattaattgagtcaagtgttaaaccatgcattaatgtgcttaatcacttgcttagttaatcatccaaaaccgaaaatat

SEQ ID NO: 95989 - DNA, 751 bp, Glycine max
  unsure (1)..(751): unsure at all n locations
  Clone ID: PAT_MRT3847_5768C.1
cccacgcgtccgcggacgcgtgggtttttgtccttcataaaactagctgaggggctttgaacatatcaagggggtgatattagagccgcatgaatttgacatggaaagagatttggtgactgcaacactgaagaagaaaagaaacaaactgctcaagtattatcaggtggaaatagatgaaatctaccaaagtttgacagggaaaaaagcataacttctgaggttgctaaattctagacacggatatgcctatttagtagtacccagtaaccccgttccacaactctcatctatatatataatcctagaagctcaatgctagtattttgtgtgaggtattatgcagcaactagcaactgctgaaccatgatatttacctaattgtcaaagtctatatatacgagaacaattcatttcgcgtggagaaagtatgtttgttgtcaatcctcatatgcccgcggcacgctacagcctacaggcatgttgaatataaaatcaatttttgcacacggaatgaaaaaaaaaaaaaaaaaaaaaaaaaaaaaaaaaaaaaaaaaaaaaaaaaaaaaaaaaacccccccnaaaaaaaaaaaaaaaaaaaaaaaaaaaaaaaaaaaaaaaaaaaaaaaaaaaaaaaaaaaaaaaaaaaaaaaaananaaaaaaaaaaaanngggggggcggcgcttttaaaggaaccaagttttagtcccgggggtgggaaaataataattttttttaagggggcccaaa

SEQ ID NO: 95990 - DNA, 3191 bp, Glycine max
  unsure (1)..(3191): unsure at all n locations
  Clone ID: PAT_MRT3847_57690C.1
gaccttccggaattataccaggctcatcagctgactcctcggtggccgccctttttttttttttttacgaaacttttaatttaaattgctaaaccaaccttattattaatgggctgggtgatttcagaattgatagtataccaatatgtgaaataaatgcaaaagtccttctcaaaatatccacataaaaacaacagaaaaaaaagaaaaaaaaaaaaaaacttaaacattttttttttattatcatgaatagttaaaacaacctaattatttatttgagaaggggaggtcggtatttatagtttaaaaaaaataaaataaatacaaaaggtccactcttttcttatcacaggaaacactcactgagatgtatacatacaaaatgtgaacctccgaatagcttataatacatagctactccagaaaactggaaggcacgttagtattacaaataaaacaataccacaaagttcggttctagtttgttttcttatgcatcttctataaacaactgcacataacttaaacataacggctacaaaacaacaattataattacaacccaaaacacaatacactacacttgtcttttggtcttctagcagttaatgccacactcctcaacatcaggaccagtgacccttgtggtgaatggatcaattctaacccacaagagtgagaaaatggatgcaagcagaacggaccacaccaccacaatggttggtgttctgttttggcgccccatgagacctttgaggaaagggtgatagatggatgatcaacccaaaatgcaaagaaaagcttaccaaagagggggtccccaagattggtagccactgttgatggcataggagatgccagcaaccacccccaccaacgtttattatgaggaaagggttgttggaggaataggaagggtggtccatttgaacatgtatagattcggcaaagtctccgtcctcatccgaggccttggaggtgacagtgaagtgtggtgtcaattccaacaagcactttgagcaagcccttggaaaacagcaaagagatgcgccgaaacaccaccgcatgacccaaaaatgttcatttctccaccactcgtcgattccgacaccacatccacctcatctcaaggataccagtggcaaagatggacagaaagagggagatgaaccatatgctagtcaaggttgctaatctgtggcaataatgaacttattagtacaggagacagacagcaggcaagatacaataaatgagaaggggaatggcagtgactggatagatggtggtgttcacataagcaaacctttcgaagccactttagccttccactataaccataccagatgggacagtgtcggctgaaaagaatttccacggaacctaaagcccatcgaagcacttggtttagacgatccgaaagattgatgggagcagaacctttaaacgctgggcgcttaggcatgcagtatatagaccgccaaccccgggcatgcatcttaaatccggtaagaatatcttctgtgacagaaccataaatccatcctatctcacttccccaatcagttttatcctcgtaaccacagctgataacatgaatagcctccttaagaagagtttctggagtagcagattgaggaacaccaccattctccataagcgtagaggcaacaaagacagcagactgaccaaaccttttctcaagactcatttgtgacataagtagtgatttctcatcatcaaatccagtaccttctactccttcttctatatcctcaaaattaaaaatgggcacagttgggtcaacatgcttgctagattttttcttgtctgatcctttcttgctagattttgaactcttcttccgatttccaccacagagtgaagataacaacccaggctttttatgcttgggtttaagaggaggttcataaccatataaagctgtcctattgaagacacatccagtacccacataaacaggaccttgaatgccatccaaacctctcaagtttatatcaaagaaaactgtattacgattggcatatcgatcattcctatcaataccatcaaacctctgtggaaactggacatagcaaacatttttcccaaggttgggatccatcataaagcacatagcttccctcaaggctttactgttgtttatgtagtgatcacaatcaagattcaataagaaaggtccattagtaaggactgcagatactcgaacaagtgcattcatggcaccagccttcttgtgatgttggaaccctggacgcttttcacgagaaacatagactaaacgtggaagttcattaccctcagtgtcaagtcctccactttggcccaagaaaacctgaatcattcctggatggtctctagtgttgtttccaggccatggcgtaccatcttgcatcacccatccttcttcaggaactttttgtgcctttgcaacaagtccattgacgcgaattttaaattcttcatattctctcttcattgctctacgatctttgacaaatgatggttgaaccttatctttcaagtagtcaatcttctgtgcaaaataccactcaggtgcccgaggttcaatgttatatttcttgctgaaaggaacccatttcctagcaaattctgatgtctcagccagagcttcaaatgtcaacatagcagcaccatcatcagagacataacaggagaccttatccactgggtagtcaacagaaagaatagataggacagtgttcgcagtcacaagtgggggttcttttaatggatcaacagtactgacaaaaatgtcaacagctgctagctgtgatggttccccttcccgatcatatcttagtgcaagtctgtcaagataggtttcacggttcacagggagccacttggggaattgatcaaatatccacgatatggcaaaccaaatctcacatatgactgatatcaaccacaatgcatatgcattgggcacaggatttgttatccgataatgcagaaaaatgcataggataaccagccgcagagcaatgaccatacggtatggattgatcctagatgatggccaagcgaagtaaaagtaagttggaatattatgtcgccacaagacaaccgcgagcttgattatcatgacaaaatgagaaacaaggataattcggcctgtgttttgagtgtatttcaccacaangcat

SEQ ID NO: 95991 - DNA, 490 bp, Glycine max
  Clone ID: PAT_MRT3847_57691C.1
ccttcgcgtccgcaaattgttgagctagggtttgctcccaaactcgtgctcctatgttgtagtctgaaaattgagggtattttcatagaattgtgctcgtgcgacgctgctatgccctgcgatagagtatcctagggatcgtggggcgtgttctacagtgcgtatgggttgtgtgggtggcatcgccctctggtgttagtttcggcaatgccgtccgagggtccttttgtgggagatcagcgaccaacgcgccgccgcacacggaggttgcatcccagtcaaatcagcgagattgcattgtcgtcgcagacttggagggccaccaggtcgcgttgagaaccgcaccaggctgcgttgaaactacgtcgaaccaatgagaatgacgcttggcacgaacaccacacctccgcgttagcgtcacacatagttttgcttttgcgaaattattttttctattctcatttctcaactctgaactgagttttggttc

SEQ ID NO: 95992 - DNA, 554 bp, Glycine max
  Clone ID: PAT_MRT3847_57692C.1
atccaatcagcaattcaatgtcaatattcaaagcgttcaatgttctctacaggtactcggaatccctgagaaaacatcctgtgtataccaagatgatgactataggtgggatttatttcacagcagatgttctttgtcagctcctaaaagaaagaaaatctttacaaacctattctacaggaagaacccttcgccacctcgttaacggaacattctttgtggctcctactcttcatgtttggcacagtaaagtgattccagcattaacctacgccttcaaaaacaaatacaagaagattctttgtgcatatctatttggtgaaattgtttttgctccactatttctgggatctctcttgttcttatatgagtgggacagatcaggatctgtggattctggggctcagaatgtaaatgagaagttgaagccaactttaatagcttattataaaagatgggctttggtggatttattgacttattcagtggttccaattccttatagacctatcttttcaagtttatatggaataaattggcaaatgtatatttct

SEQ ID NO: 95993 - DNA, 595 bp, Glycine max
  Clone ID: PAT_MRT3847_57693C.1
aatatatggtgttttcttttcattatattttcttaacaattttggtcacgagatacttgatgcttattagtctctggaatttgtgaatataacttcttttttggagagcacgactgatcagtctattcgtggcagctattgaattttattcatacttacaatcatgattgagttgtactcttcaatacgttatttatataggttggagtgtcaaagcaattgtcggcaggatatatagtgagtgatgttagaatgaaaaccttgcaattctcactgagaataaatttcgaaagctatgatctactcatagttgcttgcgattgaccgccgtgacatggaaagatcattaatgctgttgatgcaagatgggcctcttcctgtctttgagactgcttctcataatgtacatttatataggacacatactgtgattatgtgaataatgtttataatcttgttttttctcctttacccagtatcatagaattacccagcttataaacatcagttattgttaatgtattggtgccagtttgctaggctgaattcctattgtttcacattacgtgaataaaaaggttatgtctgttaaaaa

SEQ ID NO: 95994 - DNA, 363 bp, Glycine max
  Clone ID: PAT_MRT3847_57694C.1
ggatcgtgaaacactccaaggaaaaagagagagaagcctgtgctgcagaagggggttggttggactgttgtattacaccataagggtagaaagaaaactagggactctgaaagtggaatcgctgttgtgtcggttgcccaagctcctgtggaaaataaaatggccaaaaagaaacatataggatttggactagatttttatgttctaataaaataagtcctgagaaatgaaatcatgaccctgcattgcaaatttgaggaggacaaatggcggctgcaccacctgagaagctccatgaaatttagaccatattaaaacagtttccagcatggtaggtacaaaccctttttttttaatcatagg

SEQ ID NO: 95995 - DNA, 654 bp, Glycine max
  Clone ID: PAT_MRT3847_57695C.1
cggtacgcgtgggcgacgacgttgtatagcagtccttcttcttctttctgtgttgacggtggcgttgatctgattggaattcaggatcaatggcaggggcagcctctgctctgttcctcctcgacatcaaaggccgcgtcctcatctggcgcgactaccgcggcgacgtctccgccctcgacgccgaacgcttcttcaccaaactcatcgaaaaacaggccgatccgcaagctcaagatccggttgtgcacgacaacggcgtgacctacatgttcatccagcacagcaacgtctacctcatgatagccaccagacataactgcaatgccgccagcctcctctttttcctgcaccgcatcgtcgatgtgtttaagcactactttgaagaattggaagaggaatcgcttcgggacaatttcgtcgtcgtgtatgagctacttgatgagattatggactttggctaccctcagtacaccgaggcgcagattcttagtgagtttattaagactgatgcttatagaatggaagttacgcagagacctcccatggctgtgactaatgccgtgtcgtggcgcagcgaagggataaactataagaaaaatgaggttttcttggatgtggtggagagtgttaatatacttgtcaatagcaatg

SEQ ID NO: 95996 - DNA, 478 bp, Glycine max
  Clone ID: PAT_MRT3847_57696C.1
ccggtccgtaattcccgggtcgaccgacgcgtccgcccacgcgtccgtttatatctcaccctgtatgtatcagacctgcctttatcagttacctcgatctaggtgtttcacatgatcaagcgtcatcaaatcactactcagattctcattcaaacactcgcagctaatatgtactctgatcccttataccatactatgaataaaaagatattatgatactcaacaacgagttaagcgcgtgaccaatagcataagcagatgcccgtcatcacgcactgctatctaaacactgatgttgtcaccactatctgatgctccctcgatataatcaccacatatcatttgcactggaaccctataaaggtgatgaagcactattaaatctgacgcctggttactaatttcatgagctttaataaaatgctcttagatttcctcgtggatatcgtagaccgtgctctatactgcaagctttttt

SEQ ID NO: 95997 - DNA, 193 bp, Glycine max
  unsure (1)..(193): unsure at all n locations
  Clone ID: PAT_MRT3847_57697C.1
gtagtattttcctacttttgctttcgctgaattcagtgtctcgtacactgttcttgttccattgattctaatttnntatcttcttaacatgcacactttgctttcagaagcccttactcaccctccactcctctctcacccaccccgaactcgctcttccacaaaacntncnagcncgtcncttcttncctca

SEQ ID NO: 95998 - DNA, 719 bp, Glycine max
  Clone ID: PAT_MRT3847_57698C.1
gaactaataaagactaaaccatcggctgtgaaatggagagcttctcaagtgaggcactatgatcttcttgaggaactttatggttcacatcgtgccacgggactcgtggaatgtattccgaggcaaattcatcaagctatggataggggcaatgtcaagtttatctaaggaaaaaggaagtagagatggcaaacaaaagaaaaggcaaaaaacatctcaacctcaatcacctgagcctgaagcatctgaggacattgcacatatattggatcatagtctctatttctgaaaacaaaaacaaatgacatcatatgctgatgatttccttttaagggatctcgtccatcctaagataatggattttgattactttgtgactagtggtcttcaatgtcaggaattactttccgtccaaggacttgatacttttgtctcacttgagggtacctattatctgaacctgataaaagttttctatgcaaacttaaccatattggacaatggtgacttgtgttctgagatttgtaaagtgaagattcgagtcaaatcacgcgattgattggctatagctaatttgaagtatgaggggcaaaagtttcagctttccaaacttcctgacaacattgggtttcatcgtggtcaggcattggatgcgatggtcagacctgatttgcagggacgcaactgtaaaaatactggtagtttgacaattgaagata

SEQ ID NO: 95999 - DNA, 351 bp, Glycine max
  unsure (1)..(351): unsure at all n locations
  Clone ID: PAT_MRT3847_57699C.1
tttgcatantctcttgaggaagttctcattctggttgaggtttgtgtttatgttttggttggtgttgcctggcgaacggcgtgcacggggagtgttaccttttttttagtttggtattgggaatgttatgttaccttttagtttcactatcaccatgcatgcctgttgcaatcttttgaaaccttttccttgtcatcacaatgaagcgctgacacggaccacacttgtcatgtctcatgccgttcttgtgatctaattgcttttatgcctatattttttccccctcaatctcacgtttctccctgtgaatttttggctcaaataatagcagaacttttgacctgaccagtg

SEQ ID NO: 96000 - DNA, 390 bp, Glycine max
  unsure (1)..(390): unsure at all n locations
  Clone ID: PAT_MRT3847_5769C.1
gatcaggggtcgggttccattggcgtggaatccggnccttcgtgaaaataaaggaaaaagagaaaaaaaaattcatttctctctctcccaaagaagtgtcgaaaacaaagaagcaaacgaaactaaagcactaaagacagtaacgctgtcttccttgcttcgttcttgaataagagagaattcaaaatgtcgacccagaatcgtcgttcgtcgttttcgtcctcaacgacgtcgtccttggccaaacgccatgtatccgcctcaacgacgtcgccgtctttggccgctcctgcaaacatggccaagaagagacctcctctctccaatttcactacattcgccccntcgagcccctcttcctctttggttccatgcgcagctatatttgtc

SEQ ID NO: 96001 - DNA, 783 bp, Glycine max
  Clone ID: PAT_MRT3847_576C.1
cacgcgtccgcccactgtcttgctaaaaaagaaaaccccaaaaaaaaagtgttttatctttttctcctcaatacaaagtgaagcatatagtagaaaacaaacgaacacggcaatgcaaacgcgcgcagcgttgacaacaaaaccacaaaccaattaaccgaacatgaattccgattgggacagcggcggcggtggcggtggcgcgacgctaatccctggtctcccaaacgacgtagcggcgtcgatcctctcgaaggtcccctactcccaccacgggaggctcaaagcgacatgcaaatcatggaaactgctcctctcctcgaaatcgttcttagcctcgctgaacaaacgtaaccaccttctctgcatcttcccgcaagatccttcactcgcttcaccctttctcttcgatccgaactcgctcgcgtggtgcccgctccctcccatgccctgcagcccccacgtgtacggcctctgcaacttcgccgctgtctccgtcgggtcccacctctatgtccttggtgggtccctcttcgacacgcgctccttccccatcgatcgcccttccccgtcctccgccacgttcaggttcaacttccacgacttctcgtgggagccacgcgcctcaatgctgtctcccagggggagcttcgcctgcgcggtggtgccggccggcgggagcatttatgtggccggcgggggttcgaggcatacgatgttcggggcggccgggtcgaggattcggtcggcggagcggtatgaagtggggaagaaacggtgggt

SEQ ID NO: 96002 - DNA, 1551 bp, Glycine max
  Clone ID: PAT_MRT3847_57700C.1
cgaatgagagatagagagtagccaaaatgggcatatggagaaacgagatttcagaagaagcaaagaagcagctatggctatcagggccaatggtatttgtaaatgtcactggtttcagtgtgctgctaggtatgtcaagtgcacttgacacattttgtggtcaatcatatggagcacagcagtatcatatggttggcatacacatgcagagagccatagtgatcatcatgcttgctactataccaatgtcttttatttgggcatacttgaggcctattctggttgttctgcatcaagacaaaacaattgcagcacaagctcaactatatgccacatacttgatcccaagcctttcagccaacgctcttcttcggtgcattactaagttcctacaaacccagaacattgtccttccaatgatgctagcttctggattcactaccttagcacatgcccttctctgttggcttttggttctaaaatttgggcttggcatcaaaggagctgccattgcattttgcatttcaaattggcttaacacggtgctactagcactttacatcaggttctcctcttcctgcaaaagcacttggactggtttctcaagggaatccttgcagaacattcctcaatttctcagtcttgcttttccttcagcactcatggtctgcctagaacaatggacttttcagataatggtactcctatctggggctcttcctaatccaaaattgcaaacatcagtgctttctatatgctttaatacaactggtctgttttggatgataccatttggggtcagcgttgctgcaagtacaaggatatcaaatgaactaggggctggctgtccaaaagctgcatatttagcagttaaagtcaccttgttaatgtccttcgtggttggggctttaggatttattcttctcatggtcacaagaaacatttgggggcatatttttaccaatatacctgaagtaatccgttatgtggcatccatgacaccaattcttgcaagctctgtctttgtagattcaattcaaacagcattatcaggtattgtaagaggatgtggttggcagaagcttggtgcatttgtcaatcttggatcttattatcttgtggggcttccctttgcaattgtgttggcttttgtcctccatatcaaaggagaggggctccttttagggattgtgattgcacttactatgcaagtggtaggtttccttgtcatcacgttgcgcaccaattgggagaaagaagcaaataaggcagcaaaaagaataagaagcaacggagtgccaactgatgcaaatgcactgccaagtgaccaaaattaaaatcttcgacagttgaacagtaattatgcttagtgattctgattatttagaaaagcagtttttagtgaacatttttttggtacaactattttgtatataaaaggaaagtgccctcgtagattcataattgggctgttaaaatcaaaccaaagactaaattagcagtgggagaatgaatgattcacaatttaatagaatttcgtatgatattaat

SEQ ID NO: 96003 - DNA, 777 bp, Glycine max
  Clone ID: PAT_MRT3847_57701C.1
cttcaagtagaatgagagatagagagtaggccaaatgggcatatggagaaacgagatttcagaagaagcaaagaagcagctatggctatcagggccaatggtatttgtgagtgtgtttcaatacagtttacaaatgatatctctcatgtttgtaggccatttggacgagttgcttctagctggtgtttctctggctacttcatttgtaaatgtcactggtttcagtgtgctgctaggtatgtcaagtgcacttgacacattttgtggtcaatcatatggagcacagcagtatcatatggttggcatacacatgcagagagccatagtgatcatcatgcttgctactataccaatgtcttttatttgggcatacttgaggcctattctggttgttctgcatcaagacaaaacaattgcagcacaagctcaactatatgccacatacttgatcccaagcctttcagccaacgctcttcttcggtgcattactaagttcctacaaacccagaacattgtccttccaatgatgctagcttctggattcactaccttagcacatgcccttctctgttggcttttggttctaaaatttgggcttggcatcaaaggagctgccattgcattttgcatttcaaattggcttaacacggtgctactagcactttacatcaagttctcctcttcctgcaaagcacttggactggtttctcaagggatccttgcagacattcctcaatttctcagtcttgcttttcctcagcactcatggtctgccta

SEQ ID NO: 96004 - DNA, 420 bp, Glycine max
  Clone ID: PAT_MRT3847_57702C.1
cgtatgtgccctcttcccacacagctatttaagggtggcctctttgaaaacctgagggggaccaaccccaccctaaagagaaacctttcacacatacacacattagagaccactaccctatctagggcttgcgatgcaaaccaccaccatacacaaaagagactatagcaaaacggttcagttcgtcgacgacatacctgctcacctacataacgacggaagcggaagatatactcagagccctacatatcgattaagggcacgctgaaaatcccaagtctcatggatcaagcgtactggaatctcaatatggacgtgctatggtctaccagctacatgtcattggggaacctacctacgtgaacataaacaaaggagctgcaaacagttgcaatgctgaaattcagaccaagaatgagg

SEQ ID NO: 96005 - DNA, 816 bp, Glycine max
  Clone ID: PAT_MRT3847_57703C.1
aatatcacctcgttacccggggatcctctagagtcgacctgcagataactgcataaaaacggtaatttgataatacttattaattttctgcattgtattatggccttttgactttctgtatcctgttgtgatgcatcctctactttccagatgttgcgcaactgcaaagcagctcgtgtacttcctcggatagctgattgtgccaaaaatgatcgtaatgctgttcttcgtgcaaggtgagaattatctactcttggagatagatgtgtgagagttttggtttttaattaataccatttgtattgtaggtgttgtgattatgctcttttgatactagaacattggcctgatgcagcagaagtacaacgatcggctgatctatatgaggatatgataaggtgttgtgtttcagacgcaatgagtgaggtaactttcatagttttaggttatttaatgtttttgatcaatatagaccgtgcatcatatttctacttggactagctttcattgttttgctctttttcctgcgcttaatagaatttgcattgcaatcgcagtagtgggaagcgaattctgtgtttgcttttattttggcaaaagctcagttctcataaatgtataatgtgatgatatgcaatattttagctgaaatagtaaaagaaaataagcaattggttggctttatgtctgattgtgtgtgtgtgtgtgattgggagtgatggggggcataattataattttgaaactttgcacgataaaactcatgcagaagcaaaaccttctattatgtttagctatctgtctaattcttgctaa

SEQ ID NO: 96006 - DNA, 383 bp, Glycine max
  Clone ID: PAT_MRT3847_57704C.1
gttttctttttttgtctccttgtgtccccccggggattacggacccggaccttgagggcttacaacctttccttttaggagtcctatttaaagctggcgttaatgttggccgaagctcttcctggggtaaaatggctccggctccatttccgggggggggggcccgaaccctaaaggtgtaaagcctggggggcctactgggggacttacctacctttatttgggtggagttacctgcccgttttcatacgcggaaaacccttccttcgcctctggttacgtaatcgcccatccttggcggaaaggggtttctcctattgtgctcactgtaggttatggtttcaccagtcacgatggtccaaagatatgttgccctcgccccg

SEQ ID NO: 96007 - DNA, 910 bp, Glycine max
  Clone ID: PAT_MRT3847_57705C.1
atatccgttacgtatggctttgactcctgtataatggggcgggttcgttacattgttccaaggctcattattggggtatttattcagttactatgtagctatagtaccctgccactttatgcaatcgttacacagatgggaactcactttaagaaggccatatttgatgaacaagtgcaagcacgccttgtaggttgggcacaaaaggcaaagaaaaaaggacaaagaggtgataatagcctctctggccaagaaagttctcgtgcaggtgctggaattcaactaggatcagtgttcaggagggaatctgcctcagaagacaatgttattgtcccaagaaatgatggatccgaatgagtgtggaatgtggatataccgtagccaagatgtacacacgtacaaaaaaatgttttggcaccatattatatatttttaattgtaattttgcttagtatcaaatcagcaatgaaccaccccaatgttgccttttatttttatgtttttacataatgtggtggataacttaggatgccatcataacattatcaaggatagatagatcttcaacaaaagcttattatacaaaagaaatgcactaagggagtaaatgtttcaaatgaatagtaagaactttggaaataattttgtaaacgacattataaagggagaaagagcgaaaatcactcgacttagggttgttatttttgggaataaggacaatggtgatgttgttgacatgagggggaaagttaccagttttgagccatgtaatgcctttgtggaaaatttcaagaccacaaaagtgcccaaatctcttaaagaaagcagggtttaagtcatcaaggtctgggatttgtcagatttcatttcaaagagagttgattaaaataccttaatagaaaaagtggtc

SEQ ID NO: 96008 - DNA, 357 bp, Glycine max
  unsure (1)..(357): unsure at all n locations
  Clone ID: PAT_MRT3847_57706C.1
aataaaaaatgggnaaattatgttanaggttnaatnaaaattggaggagaaagtgtttganatgganaagantnataattataattattttatatatattttttttataaatnttnaataaaaattgtaggggagtttatttagtnannannaaaaaaagttatttttttattaggtgaggatggttttaattaaaaatttaaaagagaatnttatttttatttgggtttttagnaatttggagtgatgaaattgtttgagntgtaatgagattagnagagaaatttgnaggtnnnnattttgnanttttatataatgggnnatgganattttttttaaaaggttttgatgagaatg

SEQ ID NO: 96009 - DNA, 548 bp, Glycine max
  unsure (1)..(548): unsure at all n locations
  Clone ID: PAT_MRT3847_57707C.1
ggctcgagctcgagccgaatcggctcgagctattgaactcccaaatcacaacccgcatcattccattgccattcattcattcattcattcagaacatctactctttttttttctttccttccttccatccaatatatcatttcatgcctcatttttctaccttttctcactgtctcggtgtgcaaatacttttatttcacacatacctggtcatgccttttcgtccaagtaattcctgatagtactcactttctaagctctcttttgtcccttccctttttatgaacaccactctgtcaccctcagtccttctctctcagacattttttatgacttttctctctttatcactccatgtactatatgtccctgtgcctcatctattatctatcatcatcacctattataagtttataacccccctcacccctccctctccccttcataattcatgcagtagtagtactctctcttctcacctaccctcttatattcaaattctctttcttggtccaaccaacanacactacatactactactctttttg

SEQ ID NO: 96010 - DNA, 142 bp, Glycine max
  Clone ID: PAT_MRT3847_57708C.1
tattgagtctacctacgaaagggcattaattggcactccccttcaaaaccatgttggggaactgttttctctgattcggttcctgctatttactccttattcctattacttgtgcatggactgtgactgcttgatttttgat

SEQ ID NO: 96011 - DNA, 366 bp, Glycine max
  Clone ID: PAT_MRT3847_57709C.1
ggaaaaaggaagggaatgataaattttattcattaccagcagtccttttgtaatatttcaaataaaccaaaaacctatcactttcccaagtttttaccaatatggggttaacacccaaactggctccttggctcctaaggggtaggacccacctatggcctaaaccagaacctaaaccattggaggataaggttaaagggcccccttattgcagcccaaaagcaaatatttaacacatatagctcccttagccaaaacttaatcctgcatgaaaaatagtttgaaagagatccatcacatgtttgtttagagcaggcccaatttaaacaccacctttccaatccttgctttttgccaagccaatgt

SEQ ID NO: 96012 - DNA, 1142 bp, Glycine max
  Clone ID: PAT_MRT3847_5770C.1
agataacctgataatgcttacataaataattgagagtttttagttcccggggacttgtatagttcttggggttcgggaactcctacaattcttttctctgcaaaattattgaatatgtacattcaattattagatgatgtccaggctgtgtttagtacaatgggtgtcttaaataattacatagttacttaagaatttgttagttcttgaggattatcatagtttttggattttggaaactcttacatctctcttcctcttgtatatgtaaattattttatgatatagtgttaaaatatattcaagtcaatggacatcctttttttttaatgtaagaagaattatatacattattgtagaaatttgtgaaatattataaaatattaaatataagacctcacttgggttgttccgtctgagatgtcattggcattttattttagcattacttacatactctcttactcaatacttatgggtaaatgggataacttgttaatgcttacataaataattgggagtttttagttcccggggacttatatagttctgggggttcgggaactcctacaattctcttctctgcaaagttattgaatatgtagattgagttattagatgatgcccacacaatgtttatttaaatgggtgtctccaacgattatatacttaagaatttgttaattcttgaggattattatagtttttgggatttggaaactctttcgattttttttcctctatgtaaattatgttatgatatggtacaaaattatatttaattcaatggacatctttttttttatggatgattaaatctagtatccttatttttttggttttgaattctgctgtggttgaaggaattgaatcccaataaaaaatggtagcttctttctaagctatttgaaagtgaatgggatttgtgcccaggcttttgtttccttatcccatcaataacgtatggaatcaaacctttcattcatctttcttaatctctttcacaaatccttcaactaatgtttggttttgtaaatttttgtaatccagcttcgtaatctcttaatcacccttcaactaatgcgcatcaattatgtatggaacttatttttttgttttgaatttttgtgtggttttggtga

SEQ ID NO: 96013 - DNA, 313 bp, Glycine max
  Clone ID: PAT_MRT3847_57710C.1
tgcggaatggaagttctgaatctatctcatcaatttgtgttgaatctgattgcagaagtgaagtggaaggtgttcaaattttgcaatattgtgaaatgtcggattaaaggttatacaaatatttattactcctactgcttctatcagttaaatgccatgctaaatatttttctgttgtgttgtactgtatctcactctggttacacttgagtgtggaccatgtattgttatattagatacactggtttttataccaaagtttggtaaattaagagtgtgtttccagtgaataaattagatgaagttgcaaaaa

SEQ ID NO: 96014 - DNA, 622 bp, Glycine max
  unsure (1)..(622): unsure at all n locations
  Clone ID: PAT_MRT3847_57711C.1
tttcactcatgtggatgttgccgcgtttccgcttcccgagcattccatttcaatttcaaaccgcaccttctccttcactctttctctcagctacgagctataaatttcgttctgccaccgcgagcgccgcttctggttccgccggcgactcagactccgatggagagccaaaattgaacttctcgggtgtgcggttggaggaggcagtcgatagcagaatcggatctggaaaacctcagactcgacaactgggatctcttcccgcatcaatggcattagccagggcacgagttccaatcaagtttcaaaatcaaggaacttcgttcatgtttcattgggccgtgtccgttgaataaaggtttctttntcaatgtccaaatcttggggattgagaatcaagtgcaccagcccgcaattgctgcatttgagggccgtgccacaaaatatacctttggatatcgtttatgaagatgagcatgttctagtcataaataaacctgcacacatggttgtgcatccggcacctggcaatacatctggaacgcttgtcaatggcattcttcaccattgcaaccttccaaatgttgaattttctaaagacgaagctctttcagatacagaa

SEQ ID NO: 96015 - DNA, 419 bp, Glycine max
  Clone ID: PAT_MRT3847_57712C.1
aaatagtttaagttaaccatatggcaaggtgcatcacaatattattcttcgttatttatgttcttctcttcacagttgttggtggcaggtccttgttcatgatcaacaccaatattagtccagattctgttccgcacagaccagtttcttcttcccatgtaacaacagcaccacttgaaaagacacgattcaatgatgatggtggtgcttgcaaggggctagacaggactgagtgtgtggctaaaacaacaatggttgctcatacggattatgtctacacacaagacatcaataatgggccttgattgtgctatttcttgcttctgttttttaagtatttatattgtaatgactaatgagggaagtgtaattctttagaatactatagtgtcaatgtgaaaactatgtaatatctttta

SEQ ID NO: 96016 - DNA, 398 bp, Glycine max
  Clone ID: PAT_MRT3847_57713C.1
ctgtccttttttttttttttttttttttttttttttatttgatccttttttattacatttttttttgtttttttcaaaaccctgcgcacacgggcacacactactccctgaaaatgcaaaaaagactgggccccaaaagctgccaccggggttaacacaaggaaaatggccccatcgaggacacccccagacgggacaaggagtgtaatcgcaggtttaactcggccgactatatccggatcatattcatacccgtactctatcggcagcggccttgatctggacaatcgggaaaacaccaaagaaggcatcatccgcgacaccattggtaacagccagcgcaacatcggcaacactaacaggtggagctaagaggaacacagacgcaggaagagaac

SEQ ID NO: 96017 - DNA, 290 bp, Glycine max
  Clone ID: PAT_MRT3847_57714C.1
ttttattatgaaaaccagggtttgcgggcacaacaaattacatacggttatattgagagggaaccgggcaaccctaatttgagctacaaagagcattttttatcgttcttggcagttgggactattagcaaaagaaatttaacaaggagcttttaggttttacttaatcctatacctaattactattaggggtattcaacattggtttggtctcttggggacacacacaatttgttttctgggcatttatggggtgggttagacaaaccatggttccatttttaacaaat

SEQ ID NO: 96018 - DNA, 571 bp, Glycine max
  unsure (1)..(571): unsure at all n locations
  Clone ID: PAT_MRT3847_57715C.1
cggaaaaccctcgttcttcccaaaaatgtctctacgcgggttccgaatctaccagaaaattgatctcaatggtgtcggatacatcgtggaatccgttcacgcaaacgctcaccttcagttacattccggagctgcgctccaacttgacggagaggaagccgaggagctcaagaaatcgcataccaaacttgcggacggctatggagtgctcggtatcctacggatctctgatgaacaagaatacttgatcctggttacgtcgacattccctgtgggccagctacatggaagcgacatttacaagatcaccggcgtccagttcatccagctgcgacaagcgacggagttcatcgaccaccgcatcgcagagctgcaacgtctcatgtcttccggcatcttctacttcgcatacacagcgaacttgcgtaatgcatacgacctgacggtgtcactcagcaagcagaagaacgtcacgaacgaagcagggacgtacgcagaanagttcgctcggacggatgattaccgtttctttttgaaatcggacctatgctttccgctgagcgttatggga

SEQ ID NO: 96019 - DNA, 430 bp, Glycine max
  Clone ID: PAT_MRT3847_57716C.1
cgaaagagaaacaaaagctcaaaattttaagcgtcggttgattctgaagaacactttgtgtcttaatcctgcggaactcaatgttacagccaatccgacacaatacccaacccggcccacttcgcatccttcgccggcgtttcctgctcctctgtcgtctacgacaaactcgacgatgccggctctacaccataggcacactcgcacacgaaacaatcatgttgggccgaaccgtgattcggaacagcgccatcaggtgctagatctggaatcaaggcatgttcgtcggagcgatgcctctgggagctgcatgggtccactcatacccaaccccttcttccgtagtttctactattcggatttggatctaaatattcacgctgcattttgaattgtcgtggccaaggagtatgatactttagcccccact

SEQ ID NO: 96020 - DNA, 199 bp, Glycine max
  Clone ID: PAT_MRT3847_57717C.1
tgttttttaatggggattgtaaatgtgatgcaatggcgccataaagaggcatttttggacccgaacatcactggagggcccattgattgtatttaactacagggatttttaaaattccacacagaattttttcgatcaacttgcatgagggggactttgttctttctttaaaggaacataggctgattttattatcata

SEQ ID NO: 96021 - DNA, 453 bp, Glycine max
  Clone ID: PAT_MRT3847_57718C.1
tattaagtaactcttggatcctcacccaatcttatcctttaccatattggaattaaaggttcattccttggagcatattgaatctgtggaagttacaagcgaatcactttctaggtgtgttaatatcactctctgtttctctcaaatgcatattttatttttcctttttgcctgttttttagagtgcaaataatcttggttaaaatttattagaaactacaaaatcatgagtgaggctcattaaataagaagtgagatctacaaatttgtgatttctaataaatttcagttgatagaagtgtgttgttagcatttctcttttttaagacttgtaccctgtttggatctctttgcttacttttatacctaagcagaaatctcctggaccattacctggatccagatcctctaattgaatattatatactttatgggattctattcaatgcttta

SEQ ID NO: 96022 - DNA, 454 bp, Glycine max
  Clone ID: PAT_MRT3847_57719C.1
atcacttctttctgccttcacgacgcctccacgaccctcttcgtcttccgaccaccggttcctttccttcttcttccgctcgacaagttccaatcgcataaacgccgccatcgtggccgagaccaagagatactcctaccatctacgtggccgagcacgagcctcgacaaggactgcttcctgatgatgcacgagaaggtctaccactgtgtgatagttcgtccaccagcaccccgcggaagaggaggtcatgctcaatgctgctgcccaggacaccacctaggttttcaaggatggctaacacagtgacgagtgccgtgagtagcctcgacaggctccttgtatgatactctgaaaagacagactgtggaccctgctccctactgttctgcctactacgacaacgcctgcatagccacgatgagcagtacgttcatctgagttcacctctcta

SEQ ID NO: 96023 - DNA, 179 bp, Glycine max
  unsure (1)..(179): unsure at all n locations
  Clone ID: PAT_MRT3847_5771C.1
gaantnttgntanaccggatcacatgtngccgcaccttaanaccggacacagtagcaatggtnncttggttgcagngaatttctcaanttcntgcctatttccgtgtgtacgatttcttagtggaaanancnatcantntctgtgctggncacaganttacgtgantcantttctttcc

SEQ ID NO: 96024 - DNA, 256 bp, Glycine max
  Clone ID: PAT_MRT3847_57720C.1
agaataaataaattatatttagtatgtggttcacaattagtttctagcaatccatatcttgcatgccctttggttgtacaagtggtacactgaccccaaacatcattgttctccgatctagggaattaggatgtgtgttgagaagcaatagaaagtagaaacatctactgagtagcatgattgttaaacatttactaatggtatcacagttatcgatattgaaaaatggacctgccaactgaaactgtgaagtata

SEQ ID NO: 96025 - DNA, 236 bp, Glycine max
  Clone ID: PAT_MRT3847_57721C.1
aaggaccacacatttccttggatttcccacttggttttggcaagcctccctcccaaaaattcccttcctcaaaaaacaccgggggttaaacagtttcctgatcctatacggggaaaattttccccgccccaaaggaaaaaggtcacaacaaaaatttttatacaaaccccccttaggccagtttcacattacaaccccaatcgggcctttttttggatttaagggggggtcgagcc

SEQ ID NO: 96026 - DNA, 558 bp, Glycine max
  Clone ID: PAT_MRT3847_57722C.1
gggggaaaacaaacacgggcccaaaaaggtgggggaaaaaaaaacccaaacccccccaaaaaaaaaaaagggaacgggaacccgggaaacaaaacattgaaaaaaaaaggggaaggaaaaaaggcccccccacccttttttttttggggggcccccaaggactatttaaaaaaaaaaaaaaaaaaagggttttcccacccggacaaaaaccccaaggggttaaatgggggctaaaaaaaaaaaacaagcccaatttgggatcccccccgaagttcccggggaaaaccccttcccccaaaactttgggccccataaaccaaaaccttaaccacaaacccatggggccgggaaacggaaccaaaacccctttttttaaaaaccccgaaaaaccggcccggggattctctggcccaaaaaaaaaaaaaggccttgataaaacgggaaacccccttgggaacgccccccctgatttcttcattttcacccccaagggcgaggaaaaaaccgcccccggggtcggccatttcggcggcggcggcggcggcgaaaaaggcaaaa

SEQ ID NO: 96027 - DNA, 358 bp, Glycine max
  Clone ID: PAT_MRT3847_57723C.1
tatagggaaagcaggtacgccaggagggaccggcccggaaacccgggcccgaaccacgggaccaaccatgcgcccggataaaggggcaagaaggcataagcccaaactgggggagaagataaaaccggacaacgggaaagaaaaaggggggaaatgcacatcaccaagcaaacatagcaaggagcaaaaaaactcacgagccccagaggaggaaggaaagacattcaaagggaccctgaaccttggagcaacataagtagacgggcaaaaacccagatggaaaaagcccggccaaaggcgactaaagaaaagaaacaagggggaaaaagagggaaaggaggcacggaccgcaccaaaa

SEQ ID NO: 96028 - DNA, 211 bp, Glycine max
  Clone ID: PAT_MRT3847_57724C.1
ccaggcgtccatgttatggataaatagatttttggcgattgcgcatgaatatactgatggtgatcactcacatatgtatcgacataatgctgaaatacaactaattacgagtccactacatcttgacaccatggtgacaaacaacatttgtggcgatatcttatcagatgaggcgtcaatcgtcactgaaattatggcgatgcttacttca

SEQ ID NO: 96029 - DNA, 1607 bp, Glycine max
  Clone ID: PAT_MRT3847_57725C.1
tcgcggactgctggtctatcgtttctggcgcacccccagccgccccttctgactccctattcgacccacgcgtcatcttatcctatccccacaattaacgatcgcttctgatggctctgttctgtattcatgagatgtgacgtgtatccgacacgacatggtgaactcccttttttttctcctctgactccgaaacatttccgggtagatcgggtatcatggggcaggacacaaagaactacaacaacatcgcatcatctcctctgttggaacctctgccttcgtcgaattcgaaacgagcttcgaagcttcaaacgttgggaaacatcatcgtcaccgtggtcggaactggggttctgggattgcccttcgcttttcggatcgctggatgggtcgctggatcgctcggggttgccatcgtcggcatatccacctactattgcatgctactgcttgttatgtgcagagaaaaattggcatcagaagaaccattaggggaatcaaacacatatggagacttgggttataggtccttcggaacccctggtcggtatttgacagaagttataattgtggtagcacaatgtgcagggtctgttgcttattttgtttttattggacaaaacctttattctgtattccaaggccagggactatcaatggcctcctacatatttatgttggtacctgttgagattggattgtcttggatagggagcttatctgctttggctcctttcagcatttttgctgatgtgtgcaatgttgtagccatgggaattgtggtgaaggaagatatacaacgggccttcgggaagggattttcatttgggcaaaggacaatgatcacatccaacatcggggggttgccgtttgcagcaggcatggctgttttttgttttgaggggtttggaatgacactggccttagagaattctatgcaggatagacgaaagttcccaatattgctggctcagacttttggtgggataacacttgtgtacattctttttgggttttgtggctacatggcttttggtgaagaaactagagacattgtgaccctcaatctccctaggaattggtcatctcttgcagtacaggtaggattatgtgtggggcttgcattcacactcccaatcatgttacacccaattaatgagattttcgaagggaaactcaaaatcatcctcagaaacaataatgattcaacaggactagaaaatatttgcatgtacatcagccgagcgattgtggtggttggactggcagtcttagcttcatttgtgccagaatttggtgtatatgcctcatttgtggggagtaccttatgtgcaatgctctcatttgttatgccagccacatttcacctaaagttatttggctcttccctacccatctggcaaaaagccttggattctattgtattattgtctggattatttttcgcattttatggcacttacaacacaatagttggagtttgatgcatctagcatgtattttacttagttgaaggcttgaagcttttatacaactcaatttgatatttctacataagtggttacagcaaaatgctaatgaaagcctgctcaattgtttgattt

SEQ ID NO: 96030 - DNA, 745 bp, Glycine max
  unsure (1)..(745): unsure at all n locations
  Clone ID: PAT_MRT3847_57726C.1
tggtatgatctcaaacattagtactaataacccaaaaatggcaccatcattttcatcagcaaccaagctcttctccttctcattgcttttgctaaccacaacaatggtttatgaagccaattctcaattacctctgcaaacgacgttggtgttctacctccaagacatagcaacaggacccaacgcaacagtttccccaatcaccggcctcaccggaagggattggacctacgaacaattcggaacaatattcgcagtggacgaccccgtgatgatgagcccaagcccggtctcagctcaagtgggccgggcccagggcctgctggtagtgtcagcccacgacggcgctaacgtgaacgcggtgctttcgattgtgttcacgaacttgcagtacagtgggagcagcattgagattcaaggcattagtcgtcagcgtgagagttataaagagctttccgttgtgtctgggactggtaggtttcgctttgctaagggctatgctgcgtttgaaactgtgttttatgatccgggaactgcacactcggtcattcgcttgactataaatttgagacaatcttgacaaagttttactactactaaagtctaataataatgtgatgtggttaattaatggttgcttatgaattaattaaccagcaataataatgtatgacaaaaggtattatatatcttttgacttccccnnnnnnannannaannnnnnanannnnnnnnnngnnnnttt

SEQ ID NO: 96031 - DNA, 462 bp, Glycine max
  Clone ID: PAT_MRT3847_57727C.1
cccacgcgtccgtacggctgcgagaagacgacagaagggggtggtggtggtgccaatagtaacactaccaccaccaattattggaacctcaagatgtgccaagaagtgaataatcctccaaagaagggtgtgatcaacgtggctgatcatgatgatgagaagggtgtgatggagagtgaggaaaacggggtctatgggcctgactttagggtgtgccaagattgtggcaacatgcgctaagaaagattgcgtctttagaagatgcatgacttgctgcatgggacgtgggtatgattgcaacactcacgtgaagagcacgtggatccgctacgttcgacgactctagcgcgatatcacggtggctctcggtggctgtgttagcggatatggtggtctgtagatgccaatatctgtgctggggtcatctcataatgccacttttcatagttacaactctaatgc

SEQ ID NO: 96032 - DNA, 247 bp, Glycine max
  unsure (1)..(247): unsure at all n locations
  Clone ID: PAT_MRT3847_57728C.1
tggggggggcattatatttaccggtcctactatttccttaactccttttcttctctaaacatcttatcatccatgtgctgggcagncaggtaagattcggaaaagaagtacatagtttaatacaacataagaacccagttggtttggaataatttgaaaacatgtcgggttttttttattagttctacttctctaaaaaatagattgaaaattcatcttgctctcaaagatgtgtcagcaacttttt

SEQ ID NO: 96033 - DNA, 757 bp, Glycine max
  Clone ID: PAT_MRT3847_57729C.1
tgtggccattcatggtatagatgtgcagtttgctggaatcaaattcctcgaatcattggtatgagatattttatgattaagaaattttagccatttcgcttattgctttggatgttaaatatacctgttttttaatttttgatttatattcaatatctgtaggtatcagaattttctccatctacttcaagtgctatgggacttccaagggaatttcatgagcagtgtaggaggtcacttgagcaggactacctaaaggtctttctaattttgaatatttattttcacttttctcttactaagttgattgaagttttttcattagaactgacaattattttctgaattaatattagtttttcccttccccccctcttatagacattctaccactggacacaagaagctgcttcaagtgtcacaaacaggattattgaatctgactctgttgtaccagaggttaaagtttgcagtgctgcactggatctcatgcttcaaattctgaattgggatttttgtagcaatactattgaaacaaaaataaatgtaaatgtcttctctgctggagttagacaagatggggattctctcaaaaagtctgaatgtcacctagtgcaggtaatcagttggtttgcttattaacaatttacatgcatttgatagaatgaaacataacacactgattgctgtcataactagaaatttggactaaatctcccatggtttggccttcattctgttttttatgcttacatgc

SEQ ID NO: 96034 - DNA, 547 bp, Glycine max
  Clone ID: PAT_MRT3847_5772C.1
aaaaaaaaaaaattggggaatcccccatataaaattaccccaaaaacaggaattaaacccaaggaaaacccccaatcataaaacacaaaagggggggggaatcccccaaggaaatccacaacagaaagagaaacagggggtcgggaaacaaaggaggggcccccggaataaagggggaccccccaaagggggggacggaaaacggaacggaactatgaccccttggggacttttcccacgggaaacttaagaaggcaatcttcccaggggccataaggaaaaggcctcaaatttctaaaagccggccaaaccggacgggtaccctggaaaccccttccaaacccaattggccaaaaccgggaacccttttggacccccccttggggttcaaggggggcccacccaacccaaaggggggtgggggaaggggccccaaatctaggagggggcatcctaaaaccccccacatgccaagaaaacaacgggggggttttttccaactaataaaaaacagcccggcccccaggtggggaacaaaaaggaaaaa

SEQ ID NO: 96035 - DNA, 605 bp, Glycine max
  Clone ID: PAT_MRT3847_57730C.1
gcaccaggtgatagtgaaggtaaaccttcattttggtttgcggtttgcttaccataaattactatgtttacattgatataagcttatggtgattcatgttttttggtacatctaaaacagaaaagaaactagggtctaatatatgaggactttgagtgttaaatcctcagcattctatctattctactcaagatgagactctgaattatatctcgtttgtggtttctgtcttcctaattgctggcctagttatgaatggatttcatgcatgttatagaatcttaattactattaagtgcaatgagaatgatcatgtggcagtataacttcaaattaccttgcataatttaacttgtataagttggagtgatgttaagttggaaaatataatttttagaattaagggtttgtggttaagggcactaaacacataacatatatcctttgaactttgctttggtgaataataatctacaaaattgagtgtatttatttatattgtgatctaattattataaaggtagagaaattgtattctggagataatgatgtgccgatgcctcttgtgtcatatcagatggttacttctaactttctcttctaca

SEQ ID NO: 96036 - DNA, 371 bp, Glycine max
  Clone ID: PAT_MRT3847_57731C.1
aacttcagaggcaaatatataagaagaaataagctagtcaaaaaggtttgttagtttcaatctcacagaagtgaaactgtcaaataacagaaaaatagtttcaatggtcatcatgtagattgccaaagtctcgtaaaattgtatgtcccttcttgactcagtaagttagaaacataaagaatgtcttgatctaacaattgttagattgtctgggcaaattttcttctccttattttgtattttcacatttttttaaattttttccccaagttaaaataaaagttttatgaagcaatgtaaaacactgctacaaccatttggaggctgtccttcttactatgcttttcttcttttatgacttaaaatgaaat

SEQ ID NO: 96037 - DNA, 515 bp, Glycine max
  Clone ID: PAT_MRT3847_57732C.1
cctcgtgccgaattcggcacgaggacataagaatttctacagatggatttcttcgctatgattctttatacaaactttacctcaatcagtaagagaataatacttcttcctttcattaacttcttactaaagtcttagtcggagacataaatggacgagtcctagttgtttcttgataccttttggccaacattccctgcagcctacaaaatcataaatgaattgagtcctcgctggctcattggagcattgctgtttcatgcagacgagacatattctctggcttgacaaatgttcatgaccaaaggcttcccatgctgtcctgcacagaggccagtttctcaattgtcactatatctatgcggctatgcctcttgtgttgttttactcctttcctccaggttgggttggcacttggcagcgcagttgtggtggccagtcacagatggtgataaaaaattgacaattttttttcataacagctttatccactctaatttgttctaaaactttga

SEQ ID NO: 96038 - DNA, 585 bp, Glycine max
  Clone ID: PAT_MRT3847_57733C.1
ccaggcaccagtgaccctattattcctctcacaaatatcatatcctccgattaaactagtgaaactaaacaagttccaaattatttcattcccctttcctagctagacccacctacttcctattccttaatttctcatttcattcatttccccacgtgccaaaaaaaaaccttgcttttcttgcaaacaacaccaccaccaaacatggcatcatcatcatcattatcatcatcaaagaggcatccattgtaccatggaatccgttgccgtggaggaaaatgggttactgaaatccgcgaaccgcgaaaaacaaaccgcatatggctggggacgttcctgactccggagatggcggccgcagcctacgacgtggcggcgttggccctgaaaggcggcgaggcggttctcaacttccctgactcggttggcgggtatccggtgccggcatccaaatcgcctgcggacattcgcaccgctgccattgctgcagcagaactcatgaagcctgaagcaagccacaacaacaacaacgttaatgcatcaacaacaaatgaggcagaagtagttcagtatgataacaataac

SEQ ID NO: 96039 - DNA, 219 bp, Glycine max
  Clone ID: PAT_MRT3847_57734C.1
ctttctattgacgtgcatcatggaatgttcccaatgctctgtttcaccacatgtactcatacgacgtaagtaactagatcgctattacacgcgctcaggacagggctagcattggcacgctgggaggaccagcagcatatgtgctatttgcacactcactcaggctaggtgactgtgaatgcagaagctgggagcgcattgttctattggctagttgag

SEQ ID NO: 96040 - DNA, 331 bp, Glycine max
  Clone ID: PAT_MRT3847_57735C.1
tgtattttcttctctgttacgtcctccttttacagcctcagtcacagtcacaatcacaaccacaaccacaacccttcgagtttcagaaaccctatccccacaataaccttttacaaactcactatttttcatcattcgataatacgaacttccaccatctaccttaaagtttgtaatcatggctgagtcggcatcccgaaggatcacaaattgatgctcgtctatatgatgctaaatttataagagcaacatggaactgatgggtaagattttttttacttcttatgacgaaagtttgttaaagctttaatgttattgtatttcaaagata

SEQ ID NO: 96041 - DNA, 373 bp, Glycine max
  Clone ID: PAT_MRT3847_57736C.1
ctttagccgttcgagccgcagcgtcgctcctgaccatttacaccggacgtatatcttgttcgcagggcgatccgagaaaaactctgtaaacatgttggtggaccaggaccttcttacaggggatgacgcttctctctgactccttccgctacaaggaaattgcaaatggaatgctgtgggccgctgacgggaagagcgttgtggaatgagcagctgatgtctacataggtgcaaacccttctgctctgggtggaggagatgatcagggagttgatgatgcatttttttgaggtgcttacattgttgacacattcagacttcgagatcaaacatgatgcattatgaaccaagcagacaccttgatgaagaggtt

SEQ ID NO: 96042 - DNA, 477 bp, Glycine max
  Clone ID: PAT_MRT3847_57737C.1
gctaattactagtcgttgaatccatggctcccccagcagcaaagctaagagagattggtttggaaggctttgctctatggtgcagaggcagaagggccagtagcaataatggggtatttcctgcatcacaaggacgttgggtggttcaagtgcccaatgatgagatggaagagcttgccttgaatagcaaccaggtagctgctcgctttggtgggataatgcttctcaattgcttcaaaggaacacaacatagtcgttgtggtacaccaattcgtacttgaagtctcatatgttattagcttcaaatgcgtgcctctatatatgactatataggcaaactgcaaattctgctgtgactgtgggactacatttttaagtcctgttagtttgaggtaaaatctaaacttgagtataagaagtcataaaagtatctcttctactgtgagttcttttttttttttttcctaatgtcaatct

SEQ ID NO: 96043 - DNA, 435 bp, Glycine max
  Clone ID: PAT_MRT3847_57738C.1
ctttacttctttggactgcaaaggttatatctgttcgctttgagttttgatttttttacatccatttttttttatatctcactttcttccacccttcttgcacccccacatggattgtgaaaccaacattactcttttcttgtatatctcactgttggtcgggttagtgtgttagattaatcattctcatggcagagtagctaatgatttcatacactattcaaagtatggtcggattgtgaaaccaacattactcttttcttttatagatacactctttatctggaaattgtaattttctttttgttgcttcgattttggtggttaataattcttgctgagcatcgaaatgtgatgcaaatggcttgtgttcttaacttgttgggttgtagttgtggtacttgtgcttctcgagctgcttgttgggaatctatt

SEQ ID NO: 96044 - DNA, 146 bp, Glycine max
  Clone ID: PAT_MRT3847_57739C.1
tgcgttccccggtcctttcggttccggattcctcagcccccagccccccggggtcgacgggatcgggtctgtaacgaacgccgcgcacatcaaggttttggatgcaagacaggttttgccgcgccgacggcagaaagcaactgccc

SEQ ID NO: 96045 - DNA, 243 bp, Glycine max
  Clone ID: PAT_MRT3847_5773C.1
ccaaaagaaagttcatgcagaagacagacacgtggcattatttgaagacagggctgacacatatgataagcctatggacagtgaaatggaggggcacccaacaaacaacattctctggtcagcacaaaaagatgagcatatttccttttctacccccaaagaaaaaaattctttgctgggccttcaaacaaaagttgggctagacggaaatcagtggcaagtttattcaaggaagaagaggtc

SEQ ID NO: 96046 - DNA, 283 bp, Glycine max
  Clone ID: PAT_MRT3847_57740C.1
cccttagcgcgaaggcaaaacaaaaaactcaatagcaaaacacactaaagccaaggcgaactaagtacgcaaacatgaagtgggtatacaaaaaaaaaaagcaaactcataatcaaaataatggattcccaaccgtaaaagacaaagcaaggcggaactcacacgggagcacgttcacaataagtgagggaccatgctttataaggatggacccccaaacatgaaagagttacactactagcccagagtataggaagggctgaagaagtggaacaccgtctta

SEQ ID NO: 96047 - DNA, 315 bp, Glycine max
  Clone ID: PAT_MRT3847_57741C.1
atgttttcataatgggggttctatcccctctggaaatgctctcacacctattcgccatatcatttatgatgagatgctcattaaatatacctttgtaaaataactgcgccaggcttaagctacaagtatgtttttacaaaccatcaaaaattttggttctttttgcgcctactgtgttgatcacttaattatagctccagaatttttctagccttactttaacagctctatattaaaaaacgtatttgcttggcataacaatcccattactgagggtattggccaaactattgccacttttcaatttataaagtt

SEQ ID NO: 96048 - DNA, 144 bp, Glycine max
  unsure (1)..(144): unsure at all n locations
  Clone ID: PAT_MRT3847_57742C.1
tcnctctttctctgactcnntctntctctctntctagatcgcancgcancgcacngntggnaacacaatgatccancncgtaanccaagcgcntcttacctccaaggncttccattttcttcttaatncctcttccatatcccc

SEQ ID NO: 96049 - DNA, 585 bp, Glycine max
  unsure (1)..(585): unsure at all n locations
  Clone ID: PAT_MRT3847_57743C.1
atgggtaccctccagccgtccgggctttaggtgaccactactanccaagtgaaaaagcaactaagcatagtgtgtaagaaaggggagaaaacagtgctgtgtanatagaaaaatggctaggtgggtgcatgatctttgggggttctttgctcttgccgtggttgcaagtgcccaaaaaacttgcccaatgacccctggttttggagggacccaaaaaaaactttcctttggggtttgggggtttttcgggggagtttggccaacaaggggggctttcccctttttggggggggaggggggtttcttgggggtttttaggggggaaaaaaaggggggggggggcccctctttttggggcgctcctcggggggagatttttggggggagttttttggggggggcccccctcgggggggtcttttttggggggccctctttagggggggtcccttttttttaaccggggggggagagggaaacccccccccgtctttttctctccctcccccctgcgcggggggggggggggggccaccccaccccccccccccgcttgttgggggtttttttttttttggggggggg

SEQ ID NO: 96050 - DNA, 1296 bp, Glycine max
  unsure (1)..(1296): unsure at all n locations
  Clone ID: PAT_MRT3847_57744C.1
ttttttttttttgagagcgaaagaatgaaccgtttttacattctacatatgattaaacgtacattgaaaccatggtcatctagataaaacaaatgaagccgggaaacaaagaatcacaaaattatgtagcaatgaacaaacaccaacgaaaccaacacaattaagaagataattaaacagagtaactcaacagagaccaaagaagaaatcaaatagatcgatctggtccgtccacgaccaaaatcaaataatcatttttttttccttcaaagtggacgaatcataaaaaaatttctcatcggaagaggtttaattaattaagccaaagccacggcgaggaaggttccaacaagagcagtggcggcaatgcatgtcttgcttatggagaacgctgcggagggaggctcggaggctggttggtctggagccgggcctgatgggcctggtgctgggcctgatgggcctggcgcgggaggggaggaggtggttgggcctggggcctgggatggagctgttgttggagttggagatgaaggagcgggtgtgggtgtgggtgttgcgggtgcaggtgcagccgcaggaggaggggtgtttgcggttggtgatggggcgggtgctgacgtggacggtgatggggttgttgatggtggttgcgtgggtgcaggtccaggggcttgtgctacacacgcggtggctaaaagccccaatatcatgaacactttaactgcggcaaaggccatgctaattataagacaatgaaacgcaaaaattatttcgcagagtataatggaggatcaggcggaggctatggaggaggagcggctggcggtggcggtggtggctctggtggcggcggtggtgccggttctggcggtggaggtgcacatggaggaggttatggaggtggtgctggtggtggcgaaggtggtggccacggtggatattacccttgaggcttaatgagcctacaataaattccaatgttcaaaaagaatatctagctcatcgtaaccatactagtaccaacaataagatatgggtacgaggatgcttataaactaatgaaattgaagtgtaacatgtccttgcatgttgtcaaatgttccatgaatggtttggaagcctttacatatagtagtattatgtcactatatatgattccatttccttccaaaaaaaaaaattaaaaaaaaaaaaaaaaaaaaaaaaaaaaaaaaaaaaaaaaaaaaaaaaaaaaaaaaaaaaaaaaaaaaaaaaaannnnagggagggaaaaaaaacaaaaancannaaaaaa

SEQ ID NO: 96051 - DNA, 327 bp, Glycine max
  Clone ID: PAT_MRT3847_57745C.1
gcagcgtctgtttaagccttccgctaatctctttcagcatcttttcctttcttgatctcatggcctcccatgccgcctctgcctcgctggcgttgcgcattcccgtgccaaaaataattcatggatttcaacataaacgacaccgcctcaagcaggctatcagctcaatgtgagtactggtgactctagactctttgtttctccacgacacagatgtaaaggtagaggaagaggaggagatggagaccatgatgatgacgacgctgcgtttcaatttcagagatcacctatgagaagcgctactagtgggagatcctcttgatcttt

SEQ ID NO: 96052 - DNA, 362 bp, Glycine max
  unsure (1)..(362): unsure at all n locations
  Clone ID: PAT_MRT3847_57746C.1
atggagtcaaggcttttacacaggatctaatancaagtgggacttaaaattcaacagtgacaatggagatgggcaatcacaaagctattgaaaaagccaaaaattttcaaaaaagcaacaaaagaacttaaccaggtaataagtaaaaaaaaattggtttaaaaaaaagacattttaaatttgccttatgtgaattccattgcgaaagaaacaatgaagctgcaccctttggcaccaatggtggtgccaagactatccaaaaaagattgccaaatttgaaggtattacattcccaaaaggacacaaatgcttgtgaatgtgttgactattgggagaaacccttcaatttgggacaaccctac

SEQ ID NO: 96053 - DNA, 335 bp, Glycine max
  Clone ID: PAT_MRT3847_57747C.1
attaagagttttatttgtgggttgggtcccaaccaaaatggtttaaataactccttaaaagggcctcaaaatataaattttggcaaataatgttggtttcctgaataaaacagttaactttgaattgccacatgaaattgacagccccccacccccttggttccttaaggggttgggatccgggggcttttgacagggtacccccctattatttatttttttttaagtaaaaattaaaacctgggtggtaattctccctggctgatatttaatattgttgggtatttttaatgggaattcccctggttaggggtgggccctaatggccttaattt

SEQ ID NO: 96054 - DNA, 392 bp, Glycine max
  Clone ID: PAT_MRT3847_57748C.1
tcgcaagctatttttaagaatcccatgctaggataaagattgtgggtattgatcaagatgtgtcgtttgtaccaaacaagttccccgagagacagccgattgggacggcggcgcagatccaagacgacggcaaggactaccatgatccgtcaccggcgccgtttgttgacccgacggagtttacgtcatggtcgttttacagagcatggatatgcagagtttgtggccactattctgtttctctacatcaccgtcttaaccgatatgggagtcgccttggctaagtctaagtgtagtatccgtttgatttaaggaattccttgcgccttctgtggcatgatcttcatcctcgtttactgcacctatgtcatttcaaggggacacattaaccc

SEQ ID NO: 96055 - DNA, 205 bp, Glycine max
  Clone ID: PAT_MRT3847_57749C.1
ggcatggctcggcagcgttactggcacgatagctggcctcttcacctcgctgaatctgacgacttttatcaaagggctggaaaagctgctcggccatcaattcctttctggcgaatatctcagttactgattttctgccgtcagaattacatgctatggatattttctatgtcctgttaacgggatcgagagtgagtgtgttgac

SEQ ID NO: 96056 - DNA, 787 bp, Glycine max
  Clone ID: PAT_MRT3847_5774C.1
ctcagaatttctatctatctcttgtttcaatttcaacaacggttactcctttttcgttttgagtttcaatcaagccatcatcatgtctaccgcatcgcaacccaaggccaagaaaacggcgtcgtccaagaagcccctctcccaccctcccttcgccgtgatgatagcagaggcgattgcgagtctgaaagagagaaccggttcgagccaatacgcgataaccaaatacatcgaagggaagcacaaggagttgcctgcaacctacaagaagcttgtcctcgttcatctcaagaaatctgttgctgctggcaagctcgttaaggtcaaaaactcttttaagctcgcaccgactaagtctgctcctgttaaagccgctgctgctcccaagaagcccgcttccaagcccaaagctgctgcacctaagaagaaggctgttgccaaacccaaggccaaagctgcggccaccaagcccaaggccaagcccgctaaggccgcgccgaaaaaggtcggcgctaagcctgcgaagaagactcccgtaaaggccgtgaagaagcccaagagcgtcgtgaagaaacctaaaagcgtgaaatctccagcgaaaaaggccaaggctaagaagtgagggattggagtgggttttagtttggcgttatagggtttatgtatttcgggttggatcgtagtataggtggatatatttttagaagagtattgatgtaaattcctttgctagaaattttaaccagtgttcttcttttgccttgaaaacagtttcgttttcttcgcg

SEQ ID NO: 96057 - DNA, 3242 bp, Glycine max
  Clone ID: PAT_MRT3847_57750C.1
cccacgcgtccgcccacgcgtccgcccacgcgtccgcccacgcgtccgcccacgcgtccgcggacgcgtgggtaatcagcatcaagttaggagatatcattccggccgacgctcgtcttcttgagggtgatcctttgagtgttgatcagtctgctctgactggagaatcactccctgtaacaaagagtccctcggatgaagtgttttcgggatcaacggtcaagaagggtgagatagaagcagttgtgattgctactggggtgcacaccttttttggcaaagcagctcatctggtggacagcaccaaccaagttggacacttacagaaagtgcttacagcaattggtaacttctgcatttgctcaattgcgtggaatcgtcattgagctcatagtcatgtacccaatacagcaccgcaggtacagggaaggaattgacaacctgttagttctcttgattggaggaattccaattgccatgccaactgtgctgtctgtcactatggctatgtggttcccacaggctttcgcagcagggcgccattacaaaaagaatgacagctattgaggaaatggcaggaatggatgtcctatgcagtgacaaaactgggactctcaccctaaataagttgagtgttgataggaacttgattgaggtttttgctaagggtgttgagaaagagtatgttatccttcttgcagcaagagcttctaggactgaaaatcaagatgccatagatgctgcaattgttggcatgcttgctgatccaaaggaggcacgtgctggtatcagggaggtacactttcttccattcaatcctgtggacaagaggactgctctaacttacattgattctgatggaaattggcatagatctagcaaaggggctcctgagcagataatgaacctctgcaactgcaaagaggatgtaaggagaaaggttcatgctacgattgataagtttgctgagcgtggacttcggtctttaggtgttgcaagacaggaagtacctgaaaaatcaaaagatagtcccggtggaccatggcaatttgttggtctgctaccattgtttgatcctcccaggcatgatagtgctgaaaccattcgaagagctcttaaccttggtgtcaatgttaagatgattactggggatcagcttgccattggaaaggaaacaggccgaaggcttggaatgggaacaaacatgtacccttcatcggcattgcttggccaagacaaggatgcttctatttcagctcttccagttgatgagttgattgagaaggctgatggatttgcaggagtatttcctgaacacaaatatgaaattgttaagaggctgcaagagaggaagcatatatgtggaatgacgggtgatggtgtcaacgatgctcctgcattaaagaaagcagacattggaattgctgttgctgatgctacagatgctgctagaagtgcttctgacattgtcctcactgaacctggtctgagtgtcattattagtgcagtgctcaccagcagggcaattttccaaaggatgaagaattatactatctatgctgtgtcaatcaccattcgtatagtgtttggtttcttgtttattgcgttgatttggaagtttgattttgcacccttcatggttttgattattgccatactcaatgatggtaccattatgactatatccaaggatagagtgaaaccatctccacttcctgatagctggaaactgagggagatatttgctactggtgttgtgctaggaagttacatggcactaatgacagtagtatttttctgggcaatgaaagataccaacttcttctcgaacaagtttggtgtgaggccattgagagatagccccgatgaaatgatggcagccttatacctacaagtcagtataattagccaggctctaatcttcgtcacaaggtcccgcagctggtcttttgttgaaagacctggtcttctcctactaggtgcattttttattgctcagttggtggcaacttttatagcagtgtatgctaactggggctttgcaagaataaagggaatgggatggggttgggctggtgtaatctggctgtacagtgtggtaacctatatccctcttgatttactcaaatttgctatccgctatattctaagtgggaaggcttgggataatcttttggagaacaagactgccttcactacaaagaaagactatggtaaagaagagagggaagctcaatgggcggctgcacagaggacacttcacggtcttcagcctccggaaacttccaaccttttcaatgacaaaaatagctacagggagctttcagagattgcagaacaagccaagagacgtgctgaagttgcaaggcttagggagcttcatactctaaagggacatgtcgagtcagtggtgaagctgaaggggcttgacattgacacgattcagcagcactatacagtttaaggagcttggacaagtttcaagaagaaccgtgcttttttgagaaaaaatcacatataaagacgaagaaagaccatgttcaatttgtctttaagttacataaaaaaatgagtcctgtgaaaatttgaatggcctctctcactgtctccatcttttctaggagatactatgctctttacgcaccaaataacataattggtagggtttactatcatctttttatctggtagtatgctagtgttattgcttactaagataatattaaaagctcaatacattggtattgacaccgttgctcaatattgaactcaatcttactctcttttcctccactgaagggacttgacattgatacaatccaacagcattatacagtttaaggaatttggacaaccttcaagcagaacacactttggtgcttatccaagaacaagaacaacaaatgtaatgaagacctaagttaatccgtctttagattaggatgaaggtccttttgtcagtcaaaatctgaatggtttactcttctattccataccaaataacgtggttgataggatttacttttcgtcttgttttgagaatgttaatgatatctaggtcactttaaggctctatatatatattttttttttctgatgaaaaaactcaatatatttccgatcttgattaatgttgctcaataatgagttcaatcaggaaatgtacggtgatcgtggtgttgaactcgagaatgagtttttaaaaaaaaaaaaaaaaaaaaaaaaaaaaaaaaattaccaag

SEQ ID NO: 96058 - DNA, 142 bp, Glycine max
  unsure (1)..(142): unsure at all n locations
  Clone ID: PAT_MRT3847_57751C.1
ttgtggcaccatgtctctgactatacaattcttatttattgttctccagtgggcagctaccanaagggtgcactaaatttaaaggttgagattaaactatatatagcaatatctggctgtggnggaantggagggancaaaa

SEQ ID NO: 96059 - DNA, 664 bp, Glycine max
  Clone ID: PAT_MRT3847_57752C.1
agtatatcctaactgaagcttgcacgaataaagggaatggaatggggttggcctggtgtaatctggctctacagtgtggtaacctatatccctcttgatttactcaaattcgcaatccgctatattctaagtgggaaggcttgggataatcttttggagaacaagactgctttcactacaaagaaagactatggtaaagaagagagggaagctcaatgggcggctgcacagaggacacttcacggtcttcagcctccggaaacttccaaccttttcaatgacaaaaatagctacagggagctttcagagattgctgaacaagccaagagacgtgccgaagttgcaaggcttagggagcttcatactctaaagggacatgttgagtcagtggtgaagctgaaggggctggacattgacacgattcagcagcactatacagtttaaggagcttggacaagcttcgggaagaaccggctcagtgcttttttgagaaattttttttacatataatgacgaagaaagaccatgttcaatctgtctttaagttacataaaaaaatgagtcctgtgaaaatttgaatggtctctctcactgtctccatcttttcttggagatactatgctctttttacgtaccaaataacataattggtagggtttctatc

SEQ ID NO: 96060 - DNA, 139 bp, Glycine max
  Clone ID: PAT_MRT3847_57753C.1
aagcctccctttcttttttttttgaacaataatctattaagatggccatttggaattgcaatttgaatacaactaccgcgcatcactaatataaccatatgatcacagtctacatgcgactgatattagataccgaata

SEQ ID NO: 96061 - DNA, 484 bp, Glycine max
  Clone ID: PAT_MRT3847_57754C.1
tcctctagagtggccgccttttgtttttttttttcttacaaataacttgactatactcaaaagtgcaccacctgttgtatcgggaactattccctgttaacaaaatacaaagaagggaagaaacatctatgtcaaaacacaagtcgaaacccccatctccaaataacttgcagatggggaggagtaaaacacaggtatgaacaacaacaacaacacatcgatggcatgctgtatgttacacggtgtagctctgttggattgtgtcgatgtcgagccccttgagcttcaccaccgactctacgtgccccttgagcgtgtgcaactccctcagtctggcgacctcggctcgctttgcggcctgctcggcgatctcggagagctcgcggtagccggtcttgtcgttgaagaggtcggagctggtggacgactggttgagcccgtgcagcgtcctctgcgccgtcgcccactgcgcctcccgctcccc

SEQ ID NO: 96062 - DNA, 416 bp, Glycine max
  Clone ID: PAT_MRT3847_57755C.1
tctagctatctcgatcgaactgtccaaggtcctgtcactggtacggagctcgggtgtgtgtgacttcttagtagtatgagcgtagttttaaatctcgtttgacgtttatctcttctgttggtgtttcctttcagcttctctttcttgttttagttgctctgttgttgccttcttgccttatgttcttgccgttccacatctcctctccactcgacagtttcctcatccattgatgcacttcccccctgcatcatccaatacctggtctccgtgtctccactgcttcttcgtccacatttatactcagtttccccagtctctgtcttctagcttgcgtttccctttgcccctgtccatttacacaatcactgtaccatacaagtctcttcttgtagatacatgtatagccatacata

SEQ ID NO: 96063 - DNA, 298 bp, Glycine max
  unsure (1)..(298): unsure at all n locations
  Clone ID: PAT_MRT3847_57756C.1
aaattcangtagcgtacngaantcngaattcggctcggtcnngantagnanngcgcatntnnaaatcaagaactacaanganatgtaatcccgngtncgcngggangananaanggnancatnagaggcaaatgcaagtanttcatattnaggcatggtaggaanaatttggatcgtgcacgtcnnggntannggtaagcttttntnaagctatcatccttgtnntnctgangtgcnggtanttngagncncngttnntntcatncgngggttnctgagcattactnatgtnangnnt

SEQ ID NO: 96064 - DNA, 457 bp, Glycine max
  Clone ID: PAT_MRT3847_57757C.1
tagctatctcgatcgaacatgtccaaggtccatgtcacccctggctgcattcgagaaacctagcggcaggccaacttaccacgaacggcccagctaaccagccactgatgtttggactgcaggcatgccatggtgccctaccatgggacgtacagcgataccaacttatggtaaccaggagcgtacacaccatagccaaaaggcagtttgcttcagctttgtggcagtgtaggaggcaaagggagggcggccccacttaaacaacccatacaaaaagcgagaggctgtaggaaagagaaggccgtagcattacatatacggatgagtgacttgcacgataggctggaaggcggcgttcggatggtccccaaaaggatgaggatggtgccgcaggcatgtatgcgagtggaattgattgcatagcaaaagtcagagtcagatgaaacgaaggggtagg

SEQ ID NO: 96065 - DNA, 200 bp, Glycine max
  Clone ID: PAT_MRT3847_57758C.1
gctttgcataaaatttgttttagtaatttttttctaacaaattaccgcaaaaaggttccaggatgactgagaacacaactctcacattattgccggtttaaggactatctgctttaaacaagactatttaccagttatttatccatcccatcgtggggattttttatacctcccattgggcgcataagaccttctaaaaa

SEQ ID NO: 96066 - DNA, 370 bp, Glycine max
  Clone ID: PAT_MRT3847_57759C.1
ctcgagccgctcgagccgattcggctcgagcaagaacacaggtggaggaaccattctgcgtagtgatctattggcaaattttttgacagagggcagtattagagcaagtgttgatgtgctacgaactcatcgtattagaggaatgattaaaatggtggccacagttggtattcctgagaatacaggtatatcattggcctgtgctatgaataattattatatggggcgcatcacctatactgtatacatcaatctgtttgcaggagcaaattagaaatttgcatttcccgcgaaatggggtagtgatctttatagtgaacatgagcgttatataactgaagaggtatttagtggatgccctgcgataatt

SEQ ID NO: 96067 - DNA, 1204 bp, Glycine max
  Clone ID: PAT_MRT3847_5775C.1
caaggctaaccgagggatgctcctttaggaagaagggagactgagtggattgccatctttttttgtttgtgattggagagtttcagtaatgccttcttttgttttggttatgatgatatgttaattttgttaaatttgtaagacttgagtctacaagcttatccaagacattagggatccacacctctctctctctctcagaatttctatctatctcttgtttcaatttcaacaacggttactcctttttcgttttgagtttcaatcaagccatcatcatgtctaccgcatcgcaacccaaggccaagaaaacggcgtcgtccaagaagcccctctcccaccctcccttcgccgtgatgatagcagaggcgattgcgagtctgaaagagagaaccggttcgagccaatacgcgataaccaaatacatcgaagggaagcacaaggagttgcctgcaacctacaagaagcttgtcctcgttcatctcaagaaatctgttgctgctggcaagcttgttaaggtgaaaaactcctttaagctcgcaccgactaagcctgctccggttaaggccgctgctcccaaaaagccaaccaaagctgccactaagcccgcttccaagcccaaagctgctactcctaagaaaaaggctgttgccaagcccaaggccaaagctgcggccacgactgccaagcccaagtctaagcccgctaaggtcgcggccaagaaggtcgctgctaagccagctaagaagaagacacccgtaaaggccgtgaagaagcccaagagtgtcgtgaagaaacctaagagcgtgaaatcaccagcgaagaagactaaggctaaggctaagaagtgatgatttggattggggtttggttttggtttggcgttatagttttatgcattccgggttcattcgtagtagtataggtgaatatatttttagaagagtattgatgtaaatcctttttctagaaattttatcaagtgttcttgtttacattgaaaaaaaaaaaaaaaaaaaaaaaaaaaaaaaaaaaaaaaaaaaaaaaaaaaaaaaaaaaaaaaaaaaaaaaaaaaaaaaaaaaaaaaaaaacccccaaaaaaaaaaaaaaaaaaaaaaaaaaaaggggccctttttaagggcccaaatttttttccccgggttttgcaacttaaaactttttttttggggcccccaaattaaat

SEQ ID NO: 96068 - DNA, 2013 bp, Glycine max
  Clone ID: PAT_MRT3847_57760C.1
gcattttgtctaagatatctgagatttacacttttggtggattttctgctagccttgaggcattgaaaccaattatgattgtagctttgactatggtccttcttgttcgcttcaccctttctagaagacctaaaaactttaggaagtgggatctttggcagggaatagacttctcacgatctaaagctgacgctcgtgttgatggttcaactggagtcaagttttgagatgtagctggaattgatgaggcagctgaggaacttctagagttggtgagttccctcaaacgtcccgacctggtgggttatttcgcgatcctccccccactcggtgttcctcttgtgggccctcctcgtcggcgcgggcccctccaagccccagcgattgctgggcatgctggccttcctcgttgcctcatggccgggtcccattatgtgggagcttgcgttggggttggatctgcacgtgttctggagtcctttttctgtgccattgtatccaaaccatcagttgtatttatagatgaaattgatgcgttggctactaggcgccaaggtattttcaaggagaacacagatcacctgtataatgcagccacccaggaaagggaaactacattgaaccaattgttgatagagcttgatggttttgatactggaaagggtgtcatatttctagctgccacaaatcgtattgatttgttagatccagcacttcttcgtccaggtcgcttcgatcgaaagatcaggattcgcccacctagtgccaaaggaagacatgatattttgaaaatccattctagtaaagtaaaaatgtcagagtctgtcgatttatccagctatgcacagaacctacctggatggtctggagcgagattggctcaattggtccaagaggcagctcttgtggctgttaggaaacagcacaactcaattcttcagtcagatatggatgatgcagttgacagacttacagttggacctaaacgtgttggaatagaattaggttaccaagggcaatgtcgtagagctactactgaattgggacttgcattaacttctcatctgcttcggcgatatgagcatgcaaaagttgaatgctgtgatcgcatctcaatagtacctcgtggtcagacattgtctcaattggtatttcatcgacttgatgatgaatcatatatgtttgaacgtcgacctcaattgcttcatcggcttcaggttctgcttggaggtagagctgctgaggaggtcatctatggacgtgacacatcaaaagcctcagttgattaccttgcagatgcatcctggcttgcacgcaaaatattaaccatatggaatttggagaatccaatggtcatacatggtgaaccaccaccttggaggaagtcagttaaatttgttggtccaaggctggattttgaagggtctctttatgatgactacaacttgatcgaacccccactaaattttaagatggatgatcaagttgcacaaaggactgaagagttgatacgggacatgtacagaaagacggggtctctccttaggaggccccatgctgctttgctcaaaactattaaggttcttctcgatcagaaggagatcagtggtgaggaaatagagttcattctgaacaaataccctccacaaacacctataatcttttggaaaaggaatatgctggtaaccttccattccccagagaacaagtgcatgatttggagtatgccttaaaaattcaatccaacgaagaaaccatgtgagttatttctctatcctcatctaaatcagtgtttcagttttgggagctgcacttcggcaaggtcccctccaaattccaaggatatatatgcatgaaggggtacttcgaagcttcattttgttgagccataaattttgatcatgcaatttgtatgaattataacatgttttagagacctattttttttccattttttcaacgaaaacgagatactttgtcttgaaaattgacataatttactttgggctgttc

SEQ ID NO: 96069 - DNA, 403 bp, Glycine max
  Clone ID: PAT_MRT3847_57761C.1
gtttgggcttttatcttcttcttcctctgtcttagatctatcattgctttacgccgcacgccgtaaccatggccggaaaaggagagggttctgctctcggaatccacctcggcaccacctactcttgcgtctgtgtgtggcaacatgaccgtgtttaaatcatgatcaacgaccaggggaacagaaccacgccggcttacgtcggattcactcacaccgcgcgtatcatatgtgatgcaggcaagaatcaagacatcatgaaccccatcaacaccgctcgtccatgccaaaaggaggattgatcgtacatgcagcgagtcctgtgctcagagagatattcatattgtggtctatcaaggacatatgtggtgctgctgacaagtcaatgatcgtggttaactac

SEQ ID NO: 96070 - DNA, 438 bp, Glycine max
  Clone ID: PAT_MRT3847_57762C.1
ggtgatgaatcataatagtaataggtctggccgggttaaaaagaatagcagcggggccacttgggcagaggaagaagatcaagaagacaacaacatcatcaccctcaccaaacaagcttatggagatttgccgcaacatcattttccccctcaggcgtctctgccttgctctctctgctcgcctcaagcctcgcaaaaacggagctggactgctcaagcttcaggatgatgtacagacatgcggatatcaagatgtacaagtgatgtgggaaatgctacagagaacagaaggtgaagttatagaaaaccaccatcataagcgcaagcaattgcccttctggaggatctttgtatggtccaaccatactgaatctgcaaatcatgcttaatgttaaaaccagacacaagttttaagtttacaaataaaacctctactgc

SEQ ID NO: 96071 - DNA, 890 bp, Glycine max
  Clone ID: PAT_MRT3847_57763C.1
caccacccgacagcaattcgagcaggatgtcgaccttcgagcccgtgatcgttatcgacggcaagggtcacctgcttggccgcctggccagcaccgtggccaagcagctgctcaacggccagaagatcgtggtcgttcgctgcgaggccctcaacatctccggagagttcttccgcgcgaagttgaagtactcggctttcctgcgcaagcagacccgttacaaccccacccgtggtggccccttccacttccgcgctccctccaagatgttctggcgcaccgtccgcggcatgattccccacaagaccgcccgtggcgccgccgccatggagcgtcttaagaccttcgagggtgtcccccagccctacgaccacatgaagcgcgtcgtcgttccccaggctctccgtgtccttaggttgaagcccggccgcaagtactgcactgtcggccgtctgggccacgagttcggctggaagtaccaggatgtcgtctccaggctcgaggagaggaggaaggtcaagggcgctgcctactacgagcgcaagaaggctctcaggagatcgctcgccgaggcgcagaagactgcgaaggtcgacgagaaggtcaagactcagcttgccgagtacggttactagattcgggttacggtcaccggtggcatggcttcttaaagggtagtggacacggttcggcgcgtatgcatgggaatgtggagacggtcttgaaactcctctgttctcggattcgacttgccggcacacgaaaaaatcaacgaccgagattgggaggcatcggatggatatgcacttcaatccaaaaaggcttctcagaaatacctattttgctgcttccccgcttatggcttgtagtaaatttcaagaaaatgaaac

SEQ ID NO: 96072 - DNA, 152 bp, Glycine max
  Clone ID: PAT_MRT3847_57764C.1
ctcaaagatataataatatatagatatagctgatgagagagacagtgtttgtggataattggtcattgtagccatatcaaagaaagaaagcataatctattattcttgtcttgtgctttcatgtgtaacaaattgcgcgttacagtttgtgt

SEQ ID NO: 96073 - DNA, 153 bp, Glycine max
  Clone ID: PAT_MRT3847_57765C.1
atgatggggaagatggaagacgtcaagggaggcgattcgggcgtagttggtggcggaggaggggaggtcagttggtggcactcgcaagcggtgaagagtgaggaagacacagtcgaggacgatgctgcgcagatattcagagtggagagatga

SEQ ID NO: 96074 - DNA, 306 bp, Glycine max
  Clone ID: PAT_MRT3847_57766C.1
aatttttgaatgatacctccaatttttatactgctgctaaactatactacatccgcggcgggtcactaataatcaacatatacaaatggttatataaatacaaatttttacctatatttaacgtaaacccaatacaacactttttttcaatatttttataaacaacgaacttattacatatttacttaaaatctaactactattcatgacaaaaacgctatactgatctatattattattatatctataataatcttgcccccttataaatacttctactaatccatgcctttctttatcatttat

SEQ ID NO: 96075 - DNA, 444 bp, Glycine max
  Clone ID: PAT_MRT3847_57767C.1
cccccccgaggggcccccccgaaatttccggaccaatccctacaggcctcccttttttctttttagagggggtttttaaaccttggaatatccatggctttttctttttccgtaaaaaaatagttacccaataaaaatcccaaccaactttcaagccgaaaacttaaatgtaaaacccggggggcccaaataagaaaccccccccaatttattggcggggccctcccccccccttttccaagggaaaaacccggcgcccccgtttttttttttttaccccccccccccgggaaaagggggttttcctttaaagccccccaggtgttttttttttaccaaaggaaaacggcaaaaatttgtttgccccccccccccctaccctaaaaaagataaagaagggccccaccttttttttccccaaaaaaaaaaatctttttttttttt

SEQ ID NO: 96076 - DNA, 250 bp, Glycine max
  Clone ID: PAT_MRT3847_57768C.1
cagcgtacccgcttcaaggctatcgtcgtcatcggtgactccgagggccacattggtcttggtatcaagacctccatggaagtcgctaccgccatccgcgccgccatcatcatcgccatgctctccgttgtccccatccgaagaggttgctggggtaccaaccttggtgagcctcactcgctccccaccaaggagagcggaaagtgcggttccgtcactgtccgtctcattcccgctccccgtggtaccg

SEQ ID NO: 96077 - DNA, 389 bp, Glycine max
  Clone ID: PAT_MRT3847_57769C.1
ataagcttcaatcacatacttcttctattatatctagaactggttgtgaagcgaagaacatatatattcgtaagctgtttcaacttatccttcattgatcaaattcacgatcttccgtcttttaccctttgaaggaccctgcccctctatagtgttgttgatcccagagaaactgaaaacatcaaagatccattaatacaccgcaatccaatcatattgcagatcgaggacttaaccaattatattctggaaactgatgtttaccctacagaacctgcgcctctaaaagagctgaaggaagccactaataatcacccttgttgctctattgctactttacctcaagcgcgtcaactaatgcccttacttttgaagctgttgaatcccaa

SEQ ID NO: 96078 - DNA, 974 bp, Glycine max
  unsure (1)..(974): unsure at all n locations
  Clone ID: PAT_MRT3847_5776C.1
tttctctctctctcagaatttctatctatctcttgtttcaatttcaacaacggttactcctttttcgttttgagtttcaatcaagccatcatcatgtctaccgcatcgcaacccaaggccaagaaaacggcgtcgtccaagaagcccctctcccaccctcccttcgccgtggtactttcccaaaatactctccttcaaaatcaattctcttagtttatttcttttccaattgtatttaatttgattattctgtagatgatagcagaggcgattgcgagtctgaaagagagaaccggttcgagccaatacgcgataaccaaatacatcgaagggaagcacaaggagttgcctgcaacctacaagaagcttgtcctcgttcatctcaagaaatctgttgctgctggcaagcttgttaaggtgaaaaactcctttaagctcgcaccgactaagcctgctccggttaaggccgctgctcccaaaaagccaaccaaagctgccactaagcccgcttccaagcccaaagctgctactcctaagaaaaaggctgttgccaagcccaaggccaaagctgcggccacgactgccaagcccaagtctaagcccgctaaggtcgcggccaagaaggtcgctgctaagccagctaagaagaagacacccgtaaaggccgtgaagaagcccaagagtgtcgtgaagaaacctaagagcgtgaaatcaccagcgaagaagactaaggctaaggctaagaagtgatgatttggattggggtttggttttggtttggcgttatagttttatgcattccgggttcattcgtagtagtataggtgaatatatttttagaagagtattgatgtaaattcctttttctagaaattcaacaagtgttcttgtttgcattgaatacaatttcgttttctttacgtaaaaaaaaaaaaaaannnnnnnnnaagcggccgctctagaggatccaagct

SEQ ID NO: 96079 - DNA, 257 bp, Glycine max
  Clone ID: PAT_MRT3847_57770C.1
gatatcctcctactgctgtatttgtactattatactgttatattaatgttgtaatgtttgattactgctcttcttgtctattatagttgttaatatatgctgcttcgtctttagcacttgcctcttgtggagattgttgatttatatatacttattctttttgctacttgcgatattgcaattatcaagtattagtcttacatgtattcgttttatcatttccattagtgcaataaacgagtccaatcttacttttg

SEQ ID NO: 96080 - DNA, 167 bp, Glycine max
  Clone ID: PAT_MRT3847_57771C.1
ttccaggactaattgctattttatttgttgtctcaactcttgttcctgttggtgatgagcttgcagaggagctgggtatatggttcgtaactgcattttgatgtttatttatgtgtacactaaggtcatttttaattaaaattgaggatcgttatatatatatatat

SEQ ID NO: 96081 - DNA, 255 bp, Glycine max
  Clone ID: PAT_MRT3847_57772C.1
aagacattcttcacatcaatttatacattttttttctcaaaatttaaactgttatccagttagtttcaaaaccaattccgaccaaccctattatcccaaccaataaatctcaattattcaccacctatcacaaccaacacactacaatctccattctaattttctaactctatataattctcacaaattatttcctccttctttacaaatccaatctatctctaattcctccatccccaaattttacacctaaaa

SEQ ID NO: 96082 - DNA, 238 bp, Glycine max
  Clone ID: PAT_MRT3847_57773C.1
atataaagaactatattatgaccttgagaagatgaaccaaaactgatataccataagtgaaagtggttcccatggagctccaggaggagaaatgttgagtgaaagcaaggtgagggatgttgtgcatggatctgagtatgtgctcagttatgaagataaagatggggatgggatgccttgcggggatgtgagatgggaaatgtgcctagatatttgaaataagatgaagttagtaagg

SEQ ID NO: 96083 - DNA, 1095 bp, Glycine max
  Clone ID: PAT_MRT3847_57774C.1
ccgctcaggcggcgggcccacgcgtcctctcgcgctagaaaccatctcttcctctctcagctgtctttttaatcccccttttctcattttcccttttgcaattttcactaacagtccttctttctatcttagctctcagaaacttcaataacaatgaagaaagttgtgttgaaggtggaagtacatgaagacaaaatcaagcaaaaagctatgaaggttgtctctggcatttcaggggttgagtcagtttctgtggacatgaaagacaagaaattgaccgtaattggggacattgatccagtaaaagtagcagccaagctgaggaagctttgtcacgcagaaatagtttcagttggaccagcaaaagaggaaaagaaggaagagcctaaaaaagatgataaaaaggaagatgacaagaaaaaaaatccaccaagcgaaatcgtggcagatcaactcaagttctatcaaacccatgcctattattatcagatgaaaccacaatacaatccatattacagtgccataagtgtggaagaggatcctaatagctgtgtcattatctaaattttttattactaggttggatcaaacaaattattccaaaaaaatatatattgtatttgtattatctccgtttcttctaatgatttaaattttaaattgagggatagctagctagtgtggccaaacagtaagattagtatggtatacatgcttagattttgttggtttcaaacaaaacttatccagaatcttgttgtcttacttataagtaacaactaagaaatattcggcgattgagtaaatttgagtgtaattttaatatacatgggcccggtaaaagtagcagccaagctgaggaagctttgtcacgcagaaatagtttcagttggaccagcaaaagaggaaaagaaggaagagcctaaaaaagatgataaaaaggaagatgacaagagaaaaaatccaccaagcgatatcgtggcagatcaactcaagttctatcaaacccatgcctattattatcagatgaaaccacaatacaatgcatattacagtgccataagtgtggaagaggatcctgatagctgtgtcatt

SEQ ID NO: 96084 - DNA, 290 bp, Glycine max
  Clone ID: PAT_MRT3847_57775C.1
gttgcacaggcaagttgagactccgagattcagttaacaacaatttcaagttgtgctgtgctcaccgttttctgtagagaagaacaccagtgagtttaacatataacgattatgatatgagattcacttatcacaggtttcggagtataacactaccacgggactatacaagcccagacaaataccattttaagagggtttattcacgggaaatggggaatttaaataaataataagcttagtgtagccactaaaatacacaaggatgcaaaaaaaaaaaaaaaaagagc

SEQ ID NO: 96085 - DNA, 616 bp, Glycine max
  Clone ID: PAT_MRT3847_57776C.1
cccacgcgtccgcccacgcgtccgcccacgcgtccgtacgggtgcgagaagaccacagaaggggacatcttcatttttgagattagaaaccatctcttcctctctcagctgtctttttaatcccccttttctcattttcccttttgcaattttcactaacagtccttctttctatcttagctctcagaaacttcaataacaatgaaggtcggtgttccaatttggtttcttcataattcttcttagatattcatactttgagactcataattcagagttgtagttttaacatgtgcttttgtctttgatcgtttctgtactaaatggacttgaaaagtgttgtaaagttctaacaagtatttgattttgctgtaacagaaagttgtgttgaaggtggaagtacatgaagacaaaatcaagcaaaaagctatgaaggttgtttctggcatttcaggtattcaattggatttcaatttttaatgtcccttctctctttggcttctcttctttcaatgctctaaccaattgagaaaaaaaaaaaaaagagaggtaatcaaaatcaaaatccacatgaaattggaaggcccaaaaaaaaaaaaaaaaaaaaaacccaaaa

SEQ ID NO: 96086 - DNA, 753 bp, Glycine max
  unsure (1)..(753): unsure at all n locations
  Clone ID: PAT_MRT3847_57777C.1
actgcacttgtgtacaatgtggatgatctgaaggaagttgttgcagctaacaagnaggacaggcttcctcaagcggggaagcccggggaattatactagaggagttgaataaagtcgtagcttcgaaagtctctctggaaactgttcctactattaagaagtttagagcttatgttgagaggataagagcctcggagatggagaagtgtttgtcgaagatgggtcctgatgtctcaaagcaacagaaagatgcaatttatgcccttagtatgggtattgtgaataagctacttcatggtcccatgcagcacctaaggtgtgatgggaaaaatgatagtagtctgagtgaggtacttgagaatatgcgtgcccttaacagaatgtacgatcttgagacagaaatttccttgatcgaagaaaagatcagagtcaagatggaacgggttcagaagtagattcttcttcaattggtttagttttatttgattcttgtgggggctgcaaccctcgccattttgtacactacaatagtagattgaggccctatgaaggctaattttttcaattatttttaacattatgcagaagtaattggacatcgatagtccaattgaattcaacatgtatttttctcaatgagcctgatatagatcagttgtaaattcatgatcctcatgacaacagatgattcttgttttttaataacattaatgttagagcggagtataaatgagtctaagacgttatctgtng

SEQ ID NO: 96087 - DNA, 475 bp, Glycine max
  Clone ID: PAT_MRT3847_57778C.1
acggctgcgagaagacgacagaagggctgggggtttattgtgtatctggaacaataataatttccaggttgaggtcaaaactgctgaaaggggattcattatgttggagggggtttggatggaagaaatgcagagagtcgtggtggccaacatttatgctccttgtgagatagaaagcaaaagacaattgtgggagaagctgtactcaaggaagagccagtcccagattcagtcttggtgcctggtgggagactttaattgcattagacacccagtagaaagattgggaagtagactctccaattcagaagctaaccttatagctaaatttaatgattggttggctgaaatggagatagatgatatcccctgtgtggggaagcctttcacttgggttaggcctaatggctcttgcaagagtaagctagatagagtgttagtttttgatgactggctatctaagtggcctgatagc

SEQ ID NO: 96088 - DNA, 514 bp, Glycine max
  unsure (1)..(514): unsure at all n locations
  Clone ID: PAT_MRT3847_57779C.1
agtgttgtcgaaagatgggccntgatgtctcaaagcaacacaaagatgcaatttatgcccttagtatctcgagccggaataagctacttcatggtcccatgcagcacctaaggtgtgatgggaaaaatgatagtagtctgagtgaagtacttgagaatatgcgcgcccttaacagaatgtatgatcttgagacagaaacttccttgatcgaagaaaagatcagagtcaagatggaacgggttcagaagtagattcttcttcaattggtttagttttatttgattactgtgggggctgcaatcctcgccattttgtacactacagtagttgattgaggccctttgaaggctaatttttttcaattatttttaacattataagtaattgaattcaacatgttatatttttctcaatgagcttgatatagagcagttgtaaattcatgatcctcttgacaacagatgattcttgtatttttaataacatcaatgttagagtggagtataagtgagtc

SEQ ID NO: 96089 - DNA, 2214 bp, Glycine max
  Clone ID: PAT_MRT3847_5777C.1
ctcatatttcaatttcaatcaacggttatacccttttctatttgatcatcatcatgtccaccgcagcggaggcggaggccaagaaaacggggtcgggcaagaagcccctctcccatcctaccttcgccgcggtacttcctaattactctctttcgattcaatttcgaaatcaattgtgtttaatttagcggcatcgtgttccggctgatcgggaaagcagaaggcggaaaccttattctctccttctcccgccgcaactcactgtcttccttctctagggtttttagctcccccaatttcttcgctcaacatggttcttcaaaatgatattgatttgctaaatcctccggttgagcttgagaagaggaaacacaagctcaagcgtcttgttcagtcaccaaactctttcttcatggatgttaagtgccagggttgcttcaacataaccactgtctttagccactctcagactgttgttgtatgcggaaactgccagactgtcttgtgtcaaccaaccggtggccgggcaaggctaaccgagggatgctcctttaggaagaagggagactgagtggattgccatctttttttgtttgtgattggagagtttcagtaatgccttcttttgttttggttatgatgatatgttaattttgttaaatttgtaagacttgagtctacaagcttatccaagacattagggattatttacacctttcccacgcgtccgcacggctacgatatgactacacaagttgatcatcatttttttctcatctttcaatttcaatcaacggttatacccttttctatttgagcatcatcatgtccaccgcagcgcagcccaaggccaagaaaacggcgtcgtccaagaagcccctctcccatcctaccttcgccgcgatgatagcggaggcgatagcgagtctgaaggagagaaccggttcgagccaatacgcgataaccaaattcatcgaaggcaagcacaaggagttgccttccaacctacaagaagcttgttctcgttcatctcaagaagtctgttgctgctggcaagctacgtttaaggtcaaaaagctctttcaagcacccgctccgactaagtctgctcctgttaaagccgctgctgctcgcaagaagcccaccaaagctgcggctacgcccgccgccgagcccgcctccaagccccaaagctgctacacctaagaagaaggctgttgctaagcccaaggccaaagctgcggccaccaagcccaaggccaagcccgctaaggtcgcaagccgaagaaggtcgccgctaaagcctgcgaagaagactgcccgtaaaggccgtgaagaagcccaagagcgtcgtgaagaaacctaaaagcgtgaaatctccagcgaaaaaggccaaggctaagaagtgaggggattggagtgggttttagtttgggcgttatagtgtttatgtatttcgggttgaatcgtagtataggtggatatatttttagaagagtattgatgtaaattcctttgctagaaattttaacaagtgttcttcttttgcattgagaaaagaagacaaagactaaggctaagaagtgatgatttggatgggtttggttttgtttgcgttatagttttatgcattccgggttcattcgtagtagtataggtgaataattgggtgttctctttactgccgttccgttcatgtggccatgttagatgcttacttttaaattagagtgcatggtatgggaaacgtatctttctgtttcttcagtagatgttttttctgatagttctgggtgtgtctgctccttattcctctttttccgtggttaccactgttcaatgcttgtctggaactggttctttaagagttgggggtgaatttttggctaaacactatcaccaacggactatatacttgccaacaccaacttggggcaatcacccgaaggttttcaacttagcaggcttgtctgtcaaaacataccgctactatgctccagcaacacgaggacttgactttcaaggacttctggaagaccttggttctgctccatctggatctattgttttgctacatgcatgcgcacataaccccactggtgtggatccaacccttgagcaatgggagcagattaggcagctaataagatcaaaagctttgttacctttctttgacagtgcttatcaggggtttgctagtggaagtctaaatgc

SEQ ID NO: 96090 - DNA, 536 bp, Glycine max
  Clone ID: PAT_MRT3847_57780C.1
agtactccacatctctatctctgtcgttccgtcgttgacgagggccataaaggtgtgctaaggccctagaaccatccagctctctgtgtctattctctgtgtggaccatcgattgcgccaatgaattaatccaagagcgtgtctgtgacagatgggaaaatcgcagggctaaatcagattggaaaacagatgataacgtggctggagagaggccccacacctatgagctatggaatggaaacactaatgacaaaggtattggcaccagagcggatgacatattctatgctattacacctagagaccctgaattcaacgacaagggtacgacactaagatctcaatatgctgttaaggacgaacagaagcatgactgtggtggcggctacatgaaggagctcagggaggatgtggatcatatgaaatatggcctggctactccatacagagttctgattggcccagatatctgcgggtacagtgctcggcaagttcactctgatctaacctacaataacacgaaccacttggtaaaa

SEQ ID NO: 96091 - DNA, 1158 bp, Glycine max
  Clone ID: PAT_MRT3847_57781C.1
aaaagaaactaggaataattatatgaaaaatctaaaagtaaaattttcagttttacgagaatcaaattgactaggcaccaattgccaaatatgctaagtaataccaggtaaaaaagccattacaatctcaacatgagtcagtcagtctaaattataattattctgtatcaagaagatcaacggacattgatgaaggtattctgtgacgcttcaaaattctagaagtcgcaatttttgccgttccatagttcaagacaataactcgatcatcctccaaatcaagccgcaagaattctgtgttacagctttcaacaagttggcgtaagtgttctaggttgtcaatttccgtttcattgaccttcaaaacctgtaattctgcgagacgctcatatccagcattgatatcatccatcaggacctgagataggataacaagttgttgatttgctttctttggcaattcccgcagtgcccgttcacacaaacgacgaggtgaagtattataccagtcctccccatactcatgaaggtatggctgagtgagtggaatgaataccagaccagcaaaaatgtaataacttggaagtttatcgaactgatgaactggaactaagggttggataggttggagaatgatactaagctcctgctcttggccatcccgcagaattctgactaatgctttttcattagttttcttcatagacaccaagtgatcaaatgtcttcccttctctgttgcgaaatcgtacggtcccatcatttgcgataggcacaccatcgtatgcttctcgtgtgtcatctttcgtcaacgccctgtacgcagctggacgcggttttattctgctgacaagcacccctgtctggtcagccagcgtgcgaaactggtgtccggggggcactcctcctggtccctgccaggacttacccagcccgcaaaagcctgtgcattccccattgtctccttccccggggatcctatgccctatctcggctgccggcagtggctagcctggtttcgcgccacctcatagctttcggagggccgctccgccggccgcgcggcccgtcattgcagggccaccactgttccctggatttatggctgcatcaatctgtattgccatcagctgtgatgcaccatgaacatactgtgtgg

SEQ ID NO: 96092 - DNA, 462 bp, Glycine max
  Clone ID: PAT_MRT3847_57782C.1
ttttactttttttacttttgttattttattctttttataattttctctgaattttttttggatgttgcttagttctataggaagtggtttattgtaggaaggggaaaatttggaattagatgggtgttttttgaggtttataaaatattagaatcttgatgggtccttaatcagatattcttttcctcttggcttgttatgaaatacataaacactaggtcggatggagaagcagtccctggatcttacaaagatttctctttctttaccaaacaactaagctcgaaccactctttttttttttatatgcagttttaggcttgaacctctatctcaattcttaggtttaatttgcttaccctggatgatcatccaaatttgagagatctaacacatggcttcaattttgtccatttaatttagtgaacaaggctatatgtctgtagggaagaacatgatacc

SEQ ID NO: 96093 - DNA, 1117 bp, Glycine max
  Clone ID: PAT_MRT3847_57783C.1
gcagcgtccctgaagcaagtgtactcatgcattaacggaggtgtgtcgaattccaactacgtggtgccgctggacaatttctccaactcatcctgcataacagtacagttagccgagatacctagatatctcaataagagaatccccgatactatcgccaactcgaaatgcaagtggggatctgagaggagaggtgcggcgatggcttttgcagttacgcccaagataataacggtgtcattcgataagcaaaaccaaaggaggagtttcgaaggattgtttgggaaaaggtatcgggtaagggtgaagcgaagtcaagatcattcagtgaagtgtggtattgagcgaagcagcagcgatggaaagaaagggggcggaggaggaggcgtgtcaaattcgaactacgtggtgccgctggacaacatggcgaactcatcctgcataacacgtcctttagccgagatactcagggacctcaataaaagaatcccggatactatcgtcaaacatgatcgcttcatcccctggtatcatgccaacaggatgctcagcttctacgccccaggttggtgtggcgagatacgtgatgtcattttctccgacaatggctccgtaactgtcgtataccgtcttactgtacggggatctgatggagaggcatatcgtgagtcaactgggacgatatcacccagtgatggctccattggcgatccagtttctgctgctgaggaaattgctttctgcaaatcttgtgcccggtttggtcttggcctgtatttgtatcatgaagatcaaatgtctaatttttaagcttctaaatttttgttttggttggatgtgatattgtattgtttcttctcgttgatgtgaatagaagtagacaataggtggctgttaggtacttttcataaagcactgtcaagtatggtggaaaacttgaagccatatctttgtttttatgagtatccgatgcttatgtgtattcaagtttcttttattgctcaggtacatttaagttttgttttatggtggcctaaagccttcaattaataaatgaacaattattattattattattattattattattattattattattattattattattatt

SEQ ID NO: 96094 - DNA, 353 bp, Glycine max
  unsure (1)..(353): unsure at all n locations
  Clone ID: PAT_MRT3847_57784C.1
gcacgaggtgaaattgagaagaagcgcaggaaggatgtggaagagaaggtacaagaactaaagtctgttatcaaggtcggttgaatttattttcttcctttctcttaacagcatccttcccccctccccattacaaatgagaaaatgtccaataaaaaattgcttgtgtgcatataattctgatcttgtatataacttgtggctttgtgccagaatagatgtatctaccctttgcttctttgggaatcacgattatttggtgtaaagggtttgtactgattatgtagaagttttcaatttgcctttaaaaaaaaaaaaaaannnnnaaaaaaaaaaaaaaaaaaaaaaaattn

SEQ ID NO: 96095 - DNA, 504 bp, Glycine max
  unsure (1)..(504): unsure at all n locations
  Clone ID: PAT_MRT3847_57785C.1
ccacgcgtccgagaaaaccaaaacacacgcagaaaacgaaagagagggagagagagagagagagagagagagagagagagagatcgatccatccatcatccaccttaccttagagccttctattcagcggtgccctcggaagaataacaatttcattcccatctctctgtctctctctctcattggatcctccaatcttctcttcttcttcttcttcttctttctctccatttccaatttcatgtgctatctcttcaataacattgttattattattaagtaacagtttgttttgaattaaaagaagaagaagaagatgagcgtgatttcacgaaacatatggccggtttgcggaagcctttgctgtttctgccctgcgttgcgagagcgatccagacatccgattaagcgttacaagaaatttctcgctgatattttccctcgcacaccggatgaggaaccgaatgagcgtatgatcggggagntatgcgaatatgcctccca

SEQ ID NO: 96096 - DNA, 1195 bp, Glycine max
  Clone ID: PAT_MRT3847_57786C.1
ccacgcgtccgcaactcccaagtctcgccaataaaacgttatattccaacctctctctctcatcccctgctattcttcttcatcactcttctcttctctcttctcccctataataatataataatattaccaacacaacacaacactcacaaaaacagcagacaagtagccagaacaagaaatcctttgacacattaatcactttctttaaggaaactaattaacatgggaggaaggggtcacatggggtggttcctcttctgttgttgttcttcttctctccttttttttgttgcttcttcttcttctgtgtcacccagaagaaacttgcccatcatagcctttgaggatggctacacacccttgtttggtgaccataatttggccatccatagagatggcaaatcagttcacctttcacttgatgaaagaacaggttctggatttgtgtctcatgacctttaccttcacgggtatttcagtgcctcgatcaagttgcctgccgattacactgctggagttgtggtcgcattttatatgtcaaatggtgacatgttccagaacaaccatgatgagatagactttgagtttttggggaacattagaggcaaagactggaggattcagaccaatgtttatggcaatggaagcaccagcattggtagagaggaaagatatggcttatggtttgatcctgctgaggatttccatcagtacagtattctttggacagactctaagatcatattttatgtggatgatgttcctattagagaagtgactcgaacagaatctatgggaggggatttcccttctaagccaatgactttgtatgcaacaatatgggatgcatctgattgggctaccaatgggggcaaatacagggttaactacaagtatgcaccctatgttgctgaattctctgaccttgttctgcacggttgtgcagtggatccaattgagcagcacgtggccaagtgtgacaatgctcctcaaagttctgaggcaactacaacaattccttcttctggtgttacaccagcacaaagaatcaaaatggagaatttcaggaagaagcacatgacatactcctactgctatgacaaagtcagatacaaagtccctccttcggagtgtgtcatcagttcccaagaagctgagaggctgaggaggttcgatcccgtcacatttggaa

SEQ ID NO: 96097 - DNA, 1261 bp, Glycine max
  unsure (1)..(1261): unsure at all n locations
  Clone ID: PAT_MRT3847_57787C.1
tttgttctctggnntnccccnccanatnntttccnccagnncccnanngtcnggccannctctcngatcatattttatgtgnncnatgttccnattananaagtnncgcgnccannatctatggnagnatatttcttttctnagccaatgactttgtatgcaccaatatgggatgcatctgattgggctaccgatggaggcaaatacagggttaactacaagtatgcaccctatgttgctgaattctctgaccttgtcctgcacggttgtgcagtggatccaattgagcagcacgtggccacgtgtgacaatgctcaaagctctgaggcaacaattcctccttctggtgttacaccagcacaaagaatcaaaatggagaatttcaggaagaagcacatgacatactcctactgctatgacaaagtcagatacaaagtccctccttcagagtgtgtcatcaattcccaagaagctgagaggctgaggaggtttgatcccgtcacgttcggtggtggccgccgtcaccatggaaaacgacaccgtcgcagcagaggaagccagacagaaacttctgcttcatcattttaagagggttccataacttccattcatccttgatttagtttcactacctggggtttatattttctaattttaactttggtgtatagagaggaggagcatacaattctattcttgaatatgatgatagttttgatatggtggttattgctggtggtggggtatgtgtatagttcatacctgtaggttctcccaggtaatttgtttttgttattcatgtcttatggtttacaaattgaatccgttgatttttgtagttagaccacacctcagtgtttcaataaattatttagcatcagttatctatggaatgttaggtatgaattatttcttttaactgctaatcatcaagtatataaaatgttggtgcaacctaattttttttaattttctctcgtccacaattgtccaatatacacacacctgtctgatagtttatgtggtcatatttgtatgttggacttggacatgacagttatttataatcaatcttaatgagaatccaaggtcaagctgaagaatgaagtgttgctgcaggtcctccacttaattttgaccagtttatgtcttcacttttttttcttccatgtgttttggtacttttgtaacgttctggtgtattatgatggattgaattcggtagttgagattatggaaacattaaggctggtttttgttg

SEQ ID NO: 96098 - DNA, 422 bp, Glycine max
  Clone ID: PAT_MRT3847_57788C.1
gtgtgtgaaatctttttttttttttttggcgaacaaaaaattaggagcttcattagtcggctaacaagaatgttgtaagagggcggctattataaccaccatcaataaacaaacaccatgtcaaaaacaagaggaacacccccctttccttcctccagtaggggatgggggggcacccccgccttcttaaaaaaccaggcgccccaataggagggcaaggggggcgcacccttattggctgttaacactgcagcggccacagctgtctggtgatctttcttctgctgggggaacacactatttttctctttttttgcctcaaaaaaaaagcctcctcccttcttcttcttcttctggggggccttcgcaaagaattagtcgccaaagctgtcgacattaacagcagagatatttactttggt

SEQ ID NO: 96099 - DNA, 336 bp, Glycine max
  Clone ID: PAT_MRT3847_57789C.1
ggggagaactttaatattaaaatgttcataaaaataaataaggttttttatttacatgatcattcctcattttagaaagctctcaatcaagggaaaggtttaattagaaaattccttttccctctttacccccttctccatccgaacttgctatcagacatgattcttctaaagttaagcttctaaaatgagtatgtaagggtgtattggatcttaaaaggttaatagaaaattcttttctcttacccctctcatcgacttgtataaatactcttaagtaacttaaatatattaggtgttggctaaagcttattactctaataattccctctccta

SEQ ID NO: 96100 - DNA, 507 bp, Glycine max
  Clone ID: PAT_MRT3847_5778C.1
tggtttataagagacttatggtatagaacaaacatcaagggggcatccatgttaatggtcatccattataatcactacaatctttgttaatggatccctaacattttacaaattagcaaccccaaatttttacccatttgttacacagagggcaccaagaagtgaaaaaaacacattttcaagggggccccacctgaacctttggactctttctccttactacaagtgaggatgataaaaaaaatttaggtccaattgacaagccatcatttctatgaaaataaaacaaagggattgatactctataatgctttgctggacctgaaggcacggacaacaaagcgttcgtgtaaaattaaaaagcccttaatggaacaaacctaaaaaactttacccaaaaaaaattaatctgaagaacctaaaacctatcttaactatgagaacaaaaaagtggttaaacacaatgaaggctacaaaatctatcaaccaggatgtgcatgatatgct

SEQ ID NO: 96101 - DNA, 406 bp, Glycine max
  Clone ID: PAT_MRT3847_57790C.1
aattcggctcgagctgattgctcacattgttattcacatcgccatccagatctctctctctttgtctcccaaaaaattcctcaacatactcatgattaatttgcacttgaacaagcgatctatcgagaaatggatgatgccatgggcaagtacgaaaaacgagcttaatctcgatgctcctgagtggcaattggtgtgagcctgcaagcgatgagcctgcgaaacgttctattgttagaagctataagacaacttctacagaggctcgcaaagaagagtgcataggcacgggcaacatgaatgctaatggttctgatatcacaagtgatgaccaaaacaaccttgggccacctgcctaagctcagattgcgggaatggcaccggttcgatcatataagaagaatac

SEQ ID NO: 96102 - DNA, 176 bp, Glycine max
  Clone ID: PAT_MRT3847_57791C.1
gactgcacacgcacgcgtgcttaaacttcgaatcgaggtagagcacacctgcgaaggataaccatatggacacctcagtgatctctaacctagctgaacgcattgtcaaacattgccaaagcgctggatggatgatccatacacgggcgtcacggatctgcgtgtgatgctgaaca

SEQ ID NO: 96103 - DNA, 296 bp, Glycine max
  Clone ID: PAT_MRT3847_57792C.1
accgttccggaatcgccggatccacccacccatacgctgtgcgcacacacaacacaaatgcctgctttttatctctaaaacatgggtacggcggtcgttcacattcttagacgtgtgacctctctctacaaatcaaaacgccatacaaatttcacaacagcatacacacaaatcctaaattctgtcgtttcatatgaaagaacccttttttggaatgcttcctgctcatctctctctcttattctttttccctatccgattcaattcgcgcgcagtttcaaaccctagtccccttc

SEQ ID NO: 96104 - DNA, 446 bp, Glycine max
  Clone ID: PAT_MRT3847_57793C.1
attcatgaggttaagatcaatgtttcacctggctcttctttccattgcactgagccagggtggtttagggtgtgctatgccaacatggatgatatggctgtgcaaattgcattgcaaagaattcgaaccttcgtgcttcaaaacaaggaggtcatggttcctaacaagaaacattgctggcacagtaacttgaggttgagcctcaaaaccagaaggtttgatgatatcatgatgtcacctcactcccctatacctcagtcccctttggttaaagccacaatttgagttgccatatttctctgcaccatctcagaagaagtaactgatatacgatgattatttggttctttgatttgttattttggcaaggtacataagtgctggattttgttctttctaacaacaataacagacaactcctgatattgtttttgttaccaacaaca

SEQ ID NO: 96105 - DNA, 397 bp, Glycine max
  Clone ID: PAT_MRT3847_57794C.1
aattattggagtattttatatgattattacaaccatgatcgcatgagtatacaaaatcataataagagaggaataaaaagcaaaatgctagaaaacaagataggactatatatatatataggaacgacgactaataatttttgaattattaacagacaaataaatatcattgtcgacaaaattaaattatgtggctaattattaatccttccgcttttgggcatagagttgtatccctcgtctattcaggggttgtataggtctggcattcttctctgcatgatcgtggacagcctctctaagtaaattgacttgagccctcgacacagttcttatctttttattaatagtccaaatgacaccttctatgcaaggagggacagtgagagagcccatg

SEQ ID NO: 96106 - DNA, 690 bp, Glycine max
  unsure (1)..(690): unsure at all n locations
  Clone ID: PAT_MRT3847_57795C.1
accctcgnaggtcggccgggggccattgataataatagatcttccaatcaaatcaacaagaaagaaaaagaggcattcttcttaatggggagcacaaaaatggagtcgtactttgtcttcatgaactatgatcctgaatacgggagacttcgagctgatcgaaccgagagagggacacatgagcttgatttgtaccttgatagaaaacatgatgaactcttagcaagtgccctagagccaggaacctacaagaagacatcttctttggtcattgttgatgcttttgcagtcgaaattaccgaggatcaagccaatgtgctcagatctgcaaaaggagtgagggttgtggagaaaaatgaagtgccagtctagtgtagcatagaataatatttcaaacaggccaatgttttgaggagaaaatttccatgattttgtttaattaacttttcgttctcgtgaagtttctcatatgtgtaatttgctacgaagatgcgaactcgctaggcaagatgtataatgtattaagggaaaccaaggtagatttgtgttgattatcatgtgttgaacggtgtaactatattatcttgaacatgatgaggctcattatctaattttggtgatgatcatgtatgccagaatactgtcagatcaactttctcttgtgcactgagatgagaacagcttgttgtg

SEQ ID NO: 96107 - DNA, 549 bp, Glycine max
  unsure (1)..(549): unsure at all n locations
  Clone ID: PAT_MRT3847_57796C.1
cggattcccgcggcgacccacgcgtccgctgctatacgtctattccttggattggggctgaaatttccagcttgtcatgcactttcagaaatgtccgatcagtcattctttcagttttttaagtggatttatcaagaacgctactatgttggacgtggtctttatgagaggatgagtgattactgcaggtatgtggccttttggttgggggtacttggcgtgaaattcacttttgcttactttctccagattaaacctcttggtgaacctaccaatatcattattgatcttccatctttgacttactcatggcatgatttgatatcaaagaataataacaatgccttggctattggtagcttgtgggctcctggtgtggctatttatgtgatgggtattgtgattttttgcgctgtggtgtgaggagtggttngggtggngagggggggttgggttggtggtggggggggatggtggggttttggggtggggggtgtggggggggggggtgttggggggggggtgggggggggggtggtgggtgggggg

SEQ ID NO: 96108 - DNA, 348 bp, Glycine max
  Clone ID: PAT_MRT3847_57797C.1
ggggaaccaaaagaaaattcccttcgaagggcataaaaaaatccttaccttatcacctctcccaaaaaatggactccccccagtttgttccccccgatacaattaaaaaaaagcccccgaatcctgttttttacaccagccctgattttgcccaaaaaaacgggaaaaatgggggccccacctgttaggtctaacctaatcgctccccgtgctggggagggggggaattcgcatccccaggaaaactgccttacctattgggggcctgtccagccggggcgtaaccatttttttgataccccccctgagcatatccctgatagcccccacccctcccactccgctggt

SEQ ID NO: 96109 - DNA, 380 bp, Glycine max
  Clone ID: PAT_MRT3847_57798C.1
ggctcgaggaagcaacgaagcagtcgtgtggtgcctggcgaacctggcccgaaccgctgtaggcctgggggcctacccagaacctattgacctgcgacgtgtacaccgctgacggcgggcagtgcagccgaactctacaaccgaatgctgggcatactcgacgagaccgggggcgaggggacccactttctcatacacaggggccagaaaccctacgttgtggacagacgaacccatcccgacacctgctactgccgctgcggaagaagagaccatcggagggacaacctaaccctacgagtactctgcatgtccagacaacgacaagctctaccttaatgaacagaacctgagccttgaggactaccagaaaggactcc

SEQ ID NO: 96110 - DNA, 780 bp, Glycine max
  Clone ID: PAT_MRT3847_57799C.1
aacttccattaaagatctgatttagaattattcaagctattcaacggggacgaatctacacggggttttagaggcaattgttcccattaacttcaaaaaatttctgaacgtagtgtatatatatatatatatatatatatatacaccctattagaggaactgattaatttgaccttaaattcttaaatgagattggttgtctttcttggactctgcaagagatatatattaactttttatataccaaaaaattcgatacaccttatttcagaaacaaattactccgtaatttgacggatttccctaatctatccgactattagtattaacaattaatatcccaactggatcgagagtcacgtttatcttccttttacaaaaaaataggttagagacgtggaagtaattgctaattagtaatagtaattaattaatttgaatatcgcatgctaaaaagagaaagacacacctagataatttataatagtactagtaaagcctaaacagatgtcagctagtgagttccattacaacgattctgacattacgaaaacaaataaattataactattatgtgttgaagaatggttctaaatacttatacaactaattttcttatacttttaaacgcatttatttttttataagatagttggagctagagtttgaaaaaagatgaaatataatgttaccctttttttggatttttttcctctcttagatgacataattaacatttaatatttcaaagttgagggcacaaaatacctgaatttggtc

SEQ ID NO: 96111 - DNA, 550 bp, Glycine max
  Clone ID: PAT_MRT3847_5779C.1
tcggttcagcctctttaacccaaaaccaaagcttgcagtcaatagctaaaatggtcgtcaaggtcggtatcaacggtttcggtcgtattggccgcattgtcatgcgcaatgccatcgagcacggcgacatcgaggtcaccgcggtcaacgaccccttcatcgacctcgactacatggtctacatgttcaagtacgactcgacccacggccgcttcaagggctcggtcgaggtcaaggacggcaagctctacatcaacgacaaggccgtcaccgtctacaacgagcgcgaccctgccgccatccagtggggcgcggccggtgccgagtacattgtcgagtcgaccggtgtcttcaccaccgtcgacaaggcctcggctcacttgaagggcggcgccaagaaggtcatcatctcggccccttcggccgacgcgcccatgtttgtctgcggtgtcaacctcgacgcgtacaagtccgagtaccaggtcgtttccaacgcctcgtgcaccaccaactgtctcgcccccttggccaaggtcatccacgacaacta

SEQ ID NO: 96112 - DNA, 3914 bp, Glycine max
  unsure (1)..(3914): unsure at all n locations
  Clone ID: PAT_MRT3847_577C.1
gcgtccgtatctttttgaccctcaaaacaaagtgaagcatatagtagaaaagaaacgaacacggcaatgcaaacgcgcgcagcgttgacaacaacaacaaaaaccaattaaccgaacatgaattcctattgggacaccggcgccggcggtggcggtggcgcgacgctcatcccgggtctcccaaacgacgtcgcggcgtcgatcctctcgatggtcccctactcccaccacgggaggctcaaagccacatgcaaatcatggaaactgcttctctcctcgaaatttttcttagcctcgctgaacggaaagaaccaccttctctgcatcttcccgcaagatccttcaatcgcttcaccctttctgtttgatccgaacgcgctcgcgtggtgcccgctccctccatgccctcaacccccacgtgtacgggatgccgagtaagaatagccagtgtaggctataattgtccacaacatgtggacagcaggaaaaacgagtgtagagatcacaactacctttcccttttcgtccatcatcccatactgtccgctactctctctctctctttctctctccagtctcaaccatggcttcttccacttcctctatctctctctcccaagccctcctccgccccaccaccacctctctcccctcctcctcctcctcctccctcctcttcttcttctttcttctccaacccccactcctaaccgctcggttttggtgcagtttcatttttttctagctcttagacttccggcttaagccatggcatcctcatccgctctgcctgtcccggacgccctaccggcacgtgcgatctactttcttggcatcgacttcttctgaacgggtctctcgcttcatcccgtccttcccttgcgtcaagccacattctatatcctacgcagtagtggaaccatcaagtataaccctaagaaccctttctggttcaaccgcgatcgcttcgttctctctgctgggcacgggtgcatgcttcagtacgcgcttctgcacctcgctgggttcgatagcgtcaaggaagaggatttgagggaatttcgaccaatgggggagcagaactccgggacaccatgagattttcgagactgcgggaattgtagttacaacaggatcctcttggtcagggcattgaccgtgccgttgttttggcccgacgtagctgtacgctctgctggactttcctacaagcttcacaatgagattttttaacttgcagacgattgcaatgttcggtgacaagaccttaaggaaggccgacaataatgaagcagaactacttgacagccggaggggactggggaacctgatagtattgtatgatgacatccacatgtttattgattggacaatagagattgaattccctgagagtgttgatagtcgttttgagggacttgggtggcatgttatttgggtaaagaatggaaataatggctatgatgatattcgtgctgccattaaggaagcaaaagctgtcaaagacaaacccacattcatcaaggtcacaacaaccattggttatggttctcctaacaaggctaactcctacagtgtgcatggaagtgcactgggtgccaaagaagttgatgccacaaggcagaaccttggatggtcatatgagccattccacgtgcctgaggatgtcaaaaagcattggagtcgccacacccctgagggtgctacacttgaagctgaatggaatgctaagtttgcagagtatgaaaagaaatacaaggaggaagctgcagaattgaaatctattatcaatggtgaattccctgctggttgggagaaagcacttccgacatacactccagaaagccctgcggatgccacaagaaacctgtctcaaacaaacctaaatgcccttgtaaaggttcttcccggtctgcttggtggcagtgcagatcttgcgtcttccaacatgaccttgttgaaaatgttcggggacttccaaaaggatactccggaagagcgcaatgttagattcggtgttagagaacagggaatgggagcaatctgcaatggtattgctcttcaaagccccggactgattccatattgtgccatctttctttgtcttcactgactacatgagaggtgccataaggctttctgcgctgtctgaggctggggttatttatgtcatgacccatgattcaattggacttggagaggatggaccaacccaccagcctattgagcacctagcaagcttccgggcaatgccaaacattttgatgcttcgtccagccgacggtaatgaaacagctggatcatacaaagtggccgtgctcaacaggaagagaccctccattcttgccctatccaggcaaaaactgccccagcttcccggaacttccattgaaggagttgaaaagggtggttacaccatttcggacaactccactggcaacaagcctgatgtcattttgatcggaactggttcggaattggaaatcgctgccaaagctgctgatgacctaaggaaggaagggaaggctgttagagttgtttcccttgtttcttgggaactttttgatgagcaatcagaagcctacaaggagagtgttttccctgctgctgtttcagccagagttagcattgaggcaggatcaacatttgggtgggagaaaattgttggagcaaagggaaaagcaataggcattgatcgttttggagctagtgctccagctggaagaatatacaaagaatttggtatcactaaggaagctgttgttgctgcagctaaagagcttatctagaacttttgatttttttttgccttctggttttggttgagagcattccatgtcatgaataagaaaaaggttaaatatccttcgattgggaatttgggattttaagtgaagaagcaacatagatcaaagaattttgtgaacttgtaataactatttgacaatttagttttgcactgccacatggttaaattcaatgtttgatcatatcaaccatagatgctagtgtatactacttgtataatttgtttcacttgcagattcactcttagcatttgagtgtttggatggtcgtgttttgttcattatgaaatgttgacatggatagtttgttgcagattagattgttcttgcatatgattgtcagaggaaccacttacattgaaggatgagttgaattaatgaagttgtatgaatttgtaacaactatttggcttgctctgtggtgtagttgaattagtgatgctcactctacttttaggaagaattagcccttcatgttttttatgtataaagtagatgtcaagaatctggttaaaaagttttacaaaaaggtaggaatttatgccttaatttaggttttttttcccctaaggcccaagcatgttgccagagtgtagtctatgcaacttcgccgctgtctccgtcgggccccacctctatgtccttggtgggtccctcttcgacacgcgctccttccccatcgatcgcccttcgccgtcctccgccacgttccgcttcagcttccacgacttttcgtgggagccacgcgcctcaatgctgtctccgagggggagcttcgcctgcgcggtggtgccggcccgcgggagcatttatgtggccggtgggggctcgaggcataccatgttcggggcggcggggtcgaggattcggtcggtggagcggtaccaggtggggagggaccggtgggtgcccatggagaatctccccgggtttcgtgccgggtgcctggggtttgtcggagaggaggggagggagttctgggtgatgggagggtatggcgcgtcnaggaccatatcgggggtgtttccggtggatgagtattatagggatgccgtantgatgggagtggagagtggcgcttggaaagaggttggggatatgtggggg

SEQ ID NO: 96113 - DNA, 539 bp, Glycine max
  Clone ID: PAT_MRT3847_57800C.1
taccaaggtcctgtcacaaaacccgggtatatgggcgttaagtgggtatatgcaatgtggtaaggggtaaggtgtgggggtagctattatgtggtgggggtggtacatattggtagtagtgctagattctggactgttaaaaatgatatatataacaaggtgcgggtgggtgcggcagggcagccagttctacagtgaagccgggtatatatgggtggtatgatccagtaggcgtggtggtagtgcccctattttaagactggtggtgaagtcagacgtaaaggggcggccggacaccgccagtagtggtcgtcggcgccgcatgacgcaccacgctaccatgagatggagtgagagacgcgagcaaaaggtgccccccgcaacgtcgggggcccgacggcaaacagcggcaaagttggcatccggcgggccgcaaagcacccagcggagttcccggcagcaatggaggcacccttgctggggtcttcccggtccagccagggatatcgctaacggtccagcttccgccgacataacag

SEQ ID NO: 96114 - DNA, 269 bp, Glycine max
  Clone ID: PAT_MRT3847_57801C.1
gccaagtaaagtttagctcgaattggaaaccgcgtgttatcagcaatgtttcaattgatcttgcaaaaatgaagtatgaatatgtggctcgggatattgattacttcgattttatattggcttctatctgataattttacaggttggttagctggcttgatgtgctaatattttttctctgacacgcaacagatgggtagtagtacatcaattatgctagttggttggtcggcttacactaaattgcattatttttttttcttttctag

SEQ ID NO: 96115 - DNA, 2243 bp, Glycine max
  Clone ID: PAT_MRT3847_57802C.1
ttgcgtgccaatgatgataacaattaccataaccatctttcgggactgaatggcattgtcatgccttgctgttattattctgcaattctgaggccgattagaaagaaaatattttcaataaataaagtcatatgctttcaagaaaataaaagtactacgactatgatcaacattttctaagtgtgtcagtatataaacaccatgccagctccagattttgaacgttgcttaaagaaacatttaacgattttttgtgtttttatatgatatttatttagttagaactggattcttctttgaaaatatgcttcttttcttgggggcaagaaaattagggttttattcttttttcttaattttccttgaaagattaaaatctatgtgttatgtatgaaataatagtattctctaacagcagtttcttttgcctaatgttcgccccttttctcacacatgcacccacctggtctcgtgccccctttccctagtttagctacttacctcaatctttctcatgggaaagtttgccctagccaatatcctcttggtccttctcttgaacttgagcactttgctcaatgttcttgcttgtccctattgcccttacccttctcccaagcctccaaaaaagcctcccgttgtgaaaccaccggttcacaaaccaccaaaaccatgtccaccacccaagtcatctccaaaaccaccccatgtacaccctccctatgttccaaaacctcctcactaccctaaaccaccagttcatccacatccaccccatgtcccaaaacctcatccaaagcctccagtgcatccccatccaccttatgtcccaaaaccaccagttgtgccagttacaccaccatatgttccaaaaccaccaattgtgaaccctccctatgtcccaaaaccgcctgttgtgccagttacaccaccttatatccctaaaccaccagttgtgacaccaccatatgtccctaaaccaccagtggtgccagttacaccaccatatgtccctaaaccaccagtggtgccagttacaccaccttatgtgccaaaaccacccattgtgaaaccaccaattgtttatccaccagttgtgccaaaaccaccaattgttacaccaccttatgtgccaaaaccacccattgtgaaaccaccaattgtttatccaccagttgtgccaaaaccaccaattgttacaccaccttatgtgccaaaaccacccattgtgaaaccaccaattgtttatccaccagttgtgccaacaccacctattgtgtatccacctgttgtaccaactccaccggtggttactccacccgtggttacaccaccaagtcctccaagtgaaacaccatgtccaccaccaccaccaccagtggtgccatacccaccaccagcacaaccaacatgccccatcgacaccctaaaactgggggcatgtgtggatgtgcttggtggcctcatacacattggcataggcagcagtgcccagcagacctgctgtccggtgcttgcagggcttgtggacttggatgctgctgtgtgcctctgcacaaccattagggctaagattcttaacatcaatatcatcatccccattgctcttcagcttctcattgactgtggcaagaccccaccagatggattcaagtgtgcagatagttagttaatatataattaattattatggaattgcataactcatgcatgaataaaaacaagttgagaagatcgatgtagtgaaggaatggtctttcgtttctctttcatcaagttgttgtatacccaaaggccaaggacaacataattgtactatgactctatgagggccaatattggtatacttgttcaaactacataattttctgatctgccttgtatacaaagtcatgcaatattgccatagcatctttttaattattttctctgtttttctttgtctattgcatgtgtggttctgtgtgcatgtcagcctgtgtaagctttcccgtgagtacgttgggaaatgtacaagttagcgaagttttagatttttcttagaaatggataatttgttacgcgttttctcttttatgcattgcctttgtacaaattataatactttatagcccagaaaagatataataggtaggacttacgagatagaagagaaaacatgcaaacgaaaaataaacaccagccaaaacaatagggcccggggcgttcggtttataggattcactttttcgtaccggtgcatg

SEQ ID NO: 96116 - DNA, 547 bp, Glycine max
  unsure (1)..(547): unsure at all n locations
  Clone ID: PAT_MRT3847_57803C.1
ggctcgaggaagaaatggaggaagcaaagggagttgtgaagcacgttttccttgcaaagttcaaggacgacgtcactccagagcggattgaggagctcatcaaggactatgccaatcttgtcaatctcatcccacccatgaagtcattccattggtatcatcttctttatgtcttttcttttctttctcacgcttgcaatgcaattcaacaacccacttagatcagggcaaaaaacatcaacgtctacacaaaacacaaacggggtcagcaaaaagtaaaccccattgaccgtaaaaattgaatttttaataagttcattcaaatgggtttgcccaggttagccaatgaatgagatctaagttctggtgagcagagtgagtggatgtggaatattaattgggttcgatttcaaatttaaaaattggaagcaactatttgttgcttgctttggctttcaacatagaattagaattcattatggaaaaattgaatctaatccaaagacaccatanagagtgtttggcanatntacaattacaatggctc

SEQ ID NO: 96117 - DNA, 1488 bp, Glycine max
  Clone ID: PAT_MRT3847_57804C.1
acggctgcgagaagacgacagaaggggatatattccactttcgctagtttagctacctacccatgggaaagattgccctagccaatgtcctcttggtccttctcttgaacttgagcactttgctcaatgttcttgcttgtccctattgcccttacccatctcccaagcctcctccaaaaaagcctcccattgtgaaaccaccagttcacaaacaaccaaaaccatgtccaccacccaagtcatctccaaaaccaccccatgtacacccaccctatgtcccaaaacctcctcactaccctaaaccaccagttcatccacatccaccccatgtcccaaaacctcaccctaagcctccactgcatccacatccaccttatgtcccaaaaccaccagttgttaaaccaccctatgtcccgaagccaccagttgtgaaccctccctatgtcccaaaaccaccagttgtgccagttacaccaccatatgttccaaaaccaccaattgtgaaccctccttatgtcccaaaaccacctgttgtcccagttagaccaccatatatcccaaaaccaccagttgtgccagttacaccaccttatgtgccaaaaccacccattgtttatccacctgtagtaccaacaccaccaattgtgacaccacctattgtgtatccacctgtagtccctgtgccaccattaccacccattgtgactccaccaaaccctccaagtgaaacaccatgtccaccaccaccaccaccaccagtggtgccatatccaccaccagcacaaccaacatgccccattgacagcctaaaactgggggcatgtgtggatgtgctcggtggcctcatacacattggcataggcagcagtgccaagcagacatgttgtccagtgcttgcagggcttgtggacttggatgctgcagtgtgtctctgcacaaccattagggctaagattctcaacatcaacatcatcatccctattgctcttcagcttctcattgactgtggcaagaccccacctgatggattcaagtgtgcagatagttagttaatatatatttaatcactaaggtccccaaggaccaaggaattgcataactcatgcatgaataaaaacaagttgagaagatcgatgtagtgaaggaattctctttcgtttctctttcatcaagttgttgctgtataccaaaggccaaggacaacataattgtactaagagggacaatgttggtttacttgttcagactggataattttctgacatgccttgtatacaaagtcatgcaatattgccatggcatttatttaattattttctctgttttttttgtctatttcatgtggttctgtgtgcatgtcagcctgtgtaagctcacccgtgagtacgctgggaaaatgtacaagttagtgaagttttagatttttcttagaaatggataatttgttacgcgttttctcttttaaaaaaaaaaaaaaaaaaaaagcac

SEQ ID NO: 96118 - DNA, 294 bp, Glycine max
  Clone ID: PAT_MRT3847_57805C.1
gtacaaacaatttgctttcttgagtgtcattctccatcaaagattagaatttcactttggtaactagcacagatcttaaatgccaacctttattgggtaagttaatgagatgaaactttaatcagagaattatttttaaggaactgcacttaaggtttgtccaaaatccaaataccgcagcaccgtgcctctgcatttgttattttgaataaaaggttttaattgcgataataaattccccccccccctgggggggggggagggattttaatcacattgcatataccttttcct

SEQ ID NO: 96119 - DNA, 291 bp, Glycine max
  unsure (1)..(291): unsure at all n locations
  Clone ID: PAT_MRT3847_57806C.1
acatttaccgaanacaaccccatcatgactcatcttttgttttgtcttcacaaatctctctttaaaagtcattacagcagagggaagagaactcttgtgtattgccataactcttccaaaactcttttttctttttgttattgttagtcattgttcttaaaactcctactcgatatgagctttgcaaatttgcctttgaagaaacaaggccctttgcctttgaagagacaaggcactttgctttttaatggcctaatgtgattattctatcactcttttgtctgtttgaat

SEQ ID NO: 96120 - DNA, 366 bp, Glycine max
  Clone ID: PAT_MRT3847_57807C.1
aaatgaatggactacatatgtgcctataaaattctgcgcacattgatcttataacaaataaaacccaatttaaatagtcctcataaaccacccctagaaaactgccttaactgtatttatgccgaacagcccagagaaaacaagactggattcctcagcctttacctagtgttgaaaagcaggcaaacgcaatctacatcatcttgcgtaaacgtgtaatgatctaaacacaactcgtttatagaacctccgggtcccgaagaataatgccataccgaccaaaaactcaagaaaagcaacacgctgcgatgaaaaaaaatgacggcgtgaaacagaggatgccaaagcacgaatgatcttctttat

SEQ ID NO: 96121 - DNA, 551 bp, Glycine max
  Clone ID: PAT_MRT3847_57808C.1
cccacgcgtccgtacggctgcgagaagacgacagaagggggtgttggattggtttccattcccaattcccaatcgtgttgggtggccatggattctctactggcgaactatgcctcttcagatgaagaagaagatcaacagccatccccaccaaaaacgacgacgttttcctcccttcctcaacccaaactttctctgtttcaatcccttcctcaacccaaatcttctctgtttcaatcccttcctccacccaaacaaccttccaccgaaagctcttccctccctaaccctaaccctaaccctgaccctaaaccccaaatcgaaaagacacaacccaaacgcgtcgtgcaattcaggcccccaatcatccctctcccacacccttcacaacacgacgatgacgacgatgacgacgacgacgacgaagaagaagaacgaaacagaagaaagaaaaagttagagtcctccacgcaaacctcatcggtcaagtccttcctcgccagcattccagcacccaggaacaccgacactctcggtgtcaagcaagttcc

SEQ ID NO: 96122 - DNA, 781 bp, Glycine max
  Clone ID: PAT_MRT3847_57809C.1
ttcttgattcaggaataaatcttgtaaaataatattgtagctggcttgctgctggtcctgtccctattcgcagtaagttctactttgcaaggaccggatggctagccattgcacttgttccaaccccagttgcgttcatattgcttgctgtatcagacagtgccgctgcgcttaaaacaggcactgcattgattggtttgagttctggcttcatattcgcggctgctgtggcagttacatcggagctatttggacccaacagtgtgagtgtcaatcacaacattctcataacaaatatccccattgggtcgcttctgtatggttttctggctgcgttgatttataattcggctcgagacaatgtcccgggagagttaatggctgacacactggtgtgcatgggaagaaagtgctacttctggacatttgtctggtggggaggaatgtctgtcctaggacttacttctagtgtgttgttgttcttgagaaccaaacacgcgtatgatcgcttcgagagacatcggatttcagcgcaatcagttgtgtcttagactttagcacaggtcatagaattgttgatagttcaaggtggattgtataggagctatgattttttaggcagagctgaagcaagggagagtgaggattttgtttctctctctggcaatgcaccaaacaggaaaacaattaaaaacaaagcatgtaaataaggatggaacgttgaagctttggaagcatgaggtttgaagaaatatgcaacaatgaaaccttgagtgaggtc

SEQ ID NO: 96123 - DNA, 310 bp, Glycine max
  Clone ID: PAT_MRT3847_5780C.1
tatgacgtctgatgcacacagtctcggaactcggctctagcttcaagcgctctgactatttgtcgctaaatattatattctgtgtctgggactctgtcataggcgcccgtttccctctcataatatgcaaactagatcgaaacttgaactcgacaagagtttaaagtaagcacttcgcgaccagcgctctacaaaccctaaataccaagtcactgcttaataattgccagctatatgacaataacgctccacgtgcattcaaaatttccatcccttacctagatatgttatgcatcatgagtacattcat

SEQ ID NO: 96124 - DNA, 4033 bp, Glycine max
  Clone ID: PAT_MRT3847_57810C.1
gatgaaagccaatatttcttttactaattcaactttttatatggagttgaacttaatgatactagaatacttttgttttacattttatttcctaaaaaacaatgtacaacatacatatgattttgttgtacattgtgcaacaaaatcacattttcattgtacattctttattgacacccacttgcataataaaattgtaatttcgttttgcacttttttcacaaatccagttacacaacaaaaacacacctctgctacactggcgggatgtgaaaaaatgtacaatggaatcaggatttcattgcataatgttttttgcatctttactagtgcaacaaaatcataatttcattgtgcattatgggaaaggatgtttttggaattttaaatgttgataggggccaatagcaaatgattggggccaatagcaaccctaagctaagttcagaggttgggccaggccagccagttcacttggcacaacataattattggatatattgctatggcagagaagacagacacacgcgtccggcaaaacactgaatgaggatgaggatgagaatcaaacgccattgaaacaacaccttttactcagacagagccgttaaccaaatgccacaatggcaacggcgccgttaactctccatctctgttgccttggccgaagcttatgcaaaacgctctttcttactccctcccccgccgctcttgggagctctcctcacgtcactttccgaggcaagttccgccgccgaatctctttgtcccggcgcttctccgccggctccacctcccgagaagtggaatatgaattgggctttggaggaggagtggatgagaagtatgatgtgattgtagttggaggagggcacgcagggtgcgaagccgctcttgcctctgcacgtttgggagcaaggactcttcttcttactctcaacattgaccgaattgcgtggcagccttgcaatccagctgttggtgggcccgcaaagtcccaacttgttcatgaagtggatgcacttggtggtcaaatagggaagattgctgatagatgttacttacagaagcgtgtactcaatgtctcaagaggtcctgcagttcgtgcattacgtgctcagaccgataaaagggactatgccattcaaatgaaaagtgtagtagaaagcactccaaacctttctattcgagaggctatggtcacagatattttactagggaagaatgataacgtggaaggtgtttgtacattctttggaatgaaattctatgctccgtctgttattctcaccacagggacttttatgagtggtaaaatttgggtcggtagaacttctatgcctgcaggaagagctggcgagtctgcttcacttggattaacagaaaacttacaacgacttggttttgaaactgatcggttgaaaactggaacccctgcccgagtggacattcgcactgtcaatttctcaggattagaaccacagcatggagatgaagaggttggctggtttagttttgatcctgaggtccatattgaaagagagcagatgtgctgctacctaactcgtactacaagtacaactcatcagataatacgagagaacttacatgagactcccacttatgggggatgggttgaagccaaaggacctagatactgtccttcaatagaagataagattgtaagattccaagataaagagtctcatcaaatatttcttgaacctgagggtcgaagtgtgcctgagctctatgtgcaggggttctcaacaggtttgccagagagactacaattacctttgctgagaactttacctgggcttgagaactgttcaatgttaaggcctgcatatgctgtggaatatgattatttacctgctcatcaatgcggtaggtctctaatgacaaagaaaatacaaggattgttcttctccggtcagataaatggaactacaggctatgaagaagctgcagcacagggtatcatttctggtatcaatgctgctagacatgcagacagtaagccagttattgttcttgagagggagagcagttatataggaacattaattgatgatctagtaactaaggacctgcgagagccttaccgcatgttaaccagccgctcagagcatcggttactttttgagatctgacaatgctgatagccgtctcacacctttaggtcgtgaaattggattgattgatgatagacgctggaaactgtaccaggataagcaagctcggatttctgaggaaaagaagcgactgaaaagtgtcaggatatcaggaggggatttggctgctgaagtcactaatctgtctggtcagccagtgaaggacttttcaacattagaaagtcttcttaagaaaccacacatacaatatgaaattctagacaagcatgatttcggtgacaaaagcttatcaagaatggagaaagaatgtgttgagattgatataaagtatgaaggtttcatcttgcgtcagcaaagccaacttcaacagctggttgcaaaacaacatagaccacttcctgaagacttggattactatgcaatgacaacattgtctcttgaagctcgcgaaaaacttcccaaggttaggcctcaaaccattggccaggcaagcagagtaggtggggtgagccctgctgatatcactgctctagtccttgtgctcgaagccagacggaggaaagctcaagaactgaggaagtacaaaatgatgaatgccgttcgagcaaatacccaagatgacgtgcctgaagtttctttgactgaaaaagtcagctctggataaagcttccatgtcactttgatacctgaccattctatcaatttttggtatttagtgtgccacattatgtatatgtggtgtaaaggctacaaaatcttagtgtcatagataaatagattattagaaaggattggagggaaacgaatagaaactaacttttttttccttcatttgacaattttatcaaattgatgataaaaattaaataaattgtaaggttttaaatagagcagttatataggaacattaattgatgatctagtaactaaggacctgcgagagccttaccgcatgttaaccagccgctcagagcatcggttacttttgagatctgacaatgctgatagccgtctcacacctttaggtcgtgaaattgggttgatcgatgataggcgctggaaactgtaccaggataagcaagctcggatttctgagaaaagaagcgattgaaaagtgtcaggatttcaggaggggatttggctgctgaagtcactaatctttctcgtcagccagtgaaggacttttaaacattagtaagtcttcttaagaaaccacacatacaatatgaaattcttgacaagcatggtttcggcgacaaaagcttatcaagaatggagaaagaatgtgtcgagattgatataaagtatgaaggtttcatcttgcgtcagcaaagccaacttcaacaggtggttgctcaacaacatagaccacttcctgaagacttagattactatgcaatgacaacattgtctcttgaagctcgcgaaaaactttccaaggttaggcctcaaaccattggtcaggcaagcagagtagggggggtgagccccgctgatatcactgctctactcatcgtgatcgaagccagacggaggaaagctcaagaactaaggaggtacaaaatgatgaatgccattcgagcaaattcccaagatgaggtgcctgaagtttctttgactgagaaagtcagctctggatgaagcttccatgtcactttgatgcccgactattctatcaattttggtatttagtgtgtcatattatgtatactagagagtcgtccgtaccatgctcatactaatatttgaaatttcataaatataaattattactacatatacatacttaaataattttgtttatttaaataataataatgtttaaatattgacagaaaaaaaaacattaaagtaaagtatgaaatttgaagattggaggaggggaggggaagggg

SEQ ID NO: 96125 - DNA, 225 bp, Glycine max
  Clone ID: PAT_MRT3847_57811C.1
gtttcggagcagctgctgactgctggcgtgggcactgaacatggtgaactgagagctgcaactgctggtggtttaactgaagcctaggtcacagggagcaacgttgtgttcccagcggtggacaaactcatgagaatgctcattctaatgaggaaaatgttgccagggaaccatcaagctgtgaacggagaatggacagttgctggccttgcacagagggctgat

SEQ ID NO: 96126 - DNA, 610 bp, Glycine max
  Clone ID: PAT_MRT3847_57812C.1
gctactcaagggacaaatattgaattgttttctacaaatgcattacgagttcacgtaattacacattattgtacaaatattgaattgaaaaataaaaaagaaacaagaactgttacagaaatcaaacacagttggctttgaatagtaaaagcagtttttgcatcacacaaattcgtactataaataacacattaacacttatcgtaattaagccccaccagaaccatacttctttcccaggacaagtacctgaagtttgtcataaccagaaagcacaccagcaccagcaactgcacgaaggatgtttgctcccgcgcccttgaacaaagattttgaaccttcattcttcacaatttgcgagaatgcattgaaagagctcttgtacttgacagcttcaccagatgtcatcatcattcttctgcgaaccgtatctaaggggtacgaggcaatgctagcaccaatagtaaccatccaccccagagcaaagctagccaagaaactatcctgcaaagttcctaccaagagtactggtttcagagaatcatacattccaaagtacaaaccacggtagacaatgattccaacacaagaaacgttgaagccacggtag

SEQ ID NO: 96127 - DNA, 354 bp, Glycine max
  Clone ID: PAT_MRT3847_57813C.1
cccactcctccttttctagatctcaagcggtcgacacttgtcatacacatttcataataagaataattctaacattgagggggcattaaaagagaaatacatgatgcataacgatgtccatgttactggtatactccggtacagcgtaacatgccactcacttagaacctgatgattaattaaacaactattttgagtaaggaatccaaggacacaccttataagctgacacaaagtgtatttaatttaatattataatatgatgtcctacaatgtttgttaatgaacgatgtgaggcttatcgaaatcctctagactgttcgatctaaaccatgacttatcctacaactcatc

SEQ ID NO: 96128 - DNA, 738 bp, Glycine max
  unsure (1)..(738): unsure at all n locations
  Clone ID: PAT_MRT3847_57814C.1
ggtatgacagaagattcatctcatggcaagtaaagtagcacccatattgaagtacatgagaaattagacaaacgaaggtgaatgcttggcacaattcaatgaaaaaaaaaagacttcttaagtgaataaaatggccgtatctaagaaaattccagataaatagtttgtatcactctaaagcgtaaaaacagcctgttcccaaccgagttaccatgtctctaggtatgcaaaagcatagaaacaaccattcctaagccaaggggctgctctttccagtcatcattcaaaaagcaaatgaagcatgtaaataaaaatgaagccaagacaagttggctacattgcccatgtcacttggaatttctcttcatcttttgaagccttaggatgtgttccctttgacttgagaaattgttacatagggcagaaaaaaaattaaagaaagatcacgatccaattagatcaggtgtttctgcctcaatggacaacaatgcagtgtgaacttttccggtccaactgtctagtcgatcccgtaaggatttgatctgttgaatacccagaactcttggctgcacccaagaaacgtggactgtgccctcaacttgatcaattataccctcaattagatgaacagataggctcttcatgaggagatgctccacattctctatagaaagctttgtacgctctgcaattacactcaagggataganttccgatctttccgaaggccgactgaat

SEQ ID NO: 96129 - DNA, 407 bp, Glycine max
  unsure (1)..(407): unsure at all n locations
  Clone ID: PAT_MRT3847_57815C.1
ggaaagaaaaagaaggacaatgaaagcctgatcaccatccgaagaggttagaaaacgtgagctctctaggggagaacacaaaacataacccccatgcgaaagaaaccaccggcaccaaaaaaaactacataggaacagaggttacaaaaacacaaaggaaagttacccactggcagaactgtgaaccaagccagctaggcacagccaacaaaggactcaaaacgcagcaaacactctgaaggacctccaaggacccaccaagataccgttctgaccggaacggattatcctatacaaaccagacccaccccacaaccagtcaagaacaataagtccgagcctgaggctgcgatccaaataaccgaactggcactgcccaggccatgctaaacttgncaccctcaaaa

SEQ ID NO: 96130 - DNA, 1639 bp, Glycine max
  Clone ID: PAT_MRT3847_57816C.1
gcgtggtttcttaaacccctaaaatcactatgcaaaattccaaagtagctagagtcggagcttcgatcgttaaacagctctgcacaaggaattgtacatccttgtgtggagtaggatatattcgaagcgcaagatatcattacaagcaacctctgtttctacatcattcatttactaagttatacaagggagccatgatagaaaagcatattttcctttcaacaatgtctagctaaacaacactaccaagtcaaaggagtgaacaagaacaagcgatatctgtaacttatattgataaggatggtgaggagaagcatatcaatgttcctgttatgatgacattgttagtaccggtacatcaaaaaatcatcacattgtacggaggttgtgaaggaattattttactttatttttgtaaggagctagtataggagagagaaaattccattcaataagaacttctaacaaaattagcaaagtttgatgtcaacatctagcactaacactcattccatcgtcaggtctggattgccaggagatagatatccaagtccctgttggaatgtctatgttagaagctgctcatgaaaatgacattgaactagtaggtgcgtgggagcgctcgcttacgacatcgatttagaaggagctagttaaggacggagaacaatacaataaattcaaagatcaaacagataagtgaaacgacatgttgaatcgggcgatccggcttacggagacaacacctttgggttgccaggtgattggttaaccggaacatgatgcaagtcgttcagctatttgcgatgccactacgaaattggctgtgtttagttatgtctcgtacccctcctgacttatttgtttaggtttattgcaaaaaacgtcgttttgtcatttttttcggttcaaatcaaaaaaaaccgctttcagtttagtatcttaaccgatttatttaaattagcatttattgatatcataggcattatttttgtattttccgtgttcacggagcacctctatatatatatatatatatatatatatatatatatatattttatgaaggagaagtcaaaagaagaaatttcaagtgctttgaaggaaaattgatgcagaaactacaagaaaaagccttaaaaaaaagttggagatttggacagctcgcttagcgcacaagatcggcccaacgcggttgcttgcttagcggtcagctcacacttagcgcgaagaaggctgacgagaaagtccaaggttgtgcttagcacaaactccgcattatgcgcatgattacattgtcactcccgctaagcccaagaatgcgcacttagtgcgaagtcagtgtagaaagtaaattaccttaggtctatgagtaggaagtagaagagaaagacacaccgagtctcagagctctttattgaatatattcaaagtttgagcatctcttataggagaaactctcattctctagtcattcttccctttccttattttagccatccaatcccttctttcatccacgttaaagtgtaaagcctcttatggctatgagaggttaaaccttcattgttaggagtgtggtagaccaactcttgtaatgtaattctttcttattattaatttaatgtaatcttgtttc

SEQ ID NO: 96131 - DNA, 387 bp, Glycine max
  Clone ID: PAT_MRT3847_57817C.1
ggaacccggggggcccgcccaacccccggacgcccacgccccggtggacccaccacccggaacaaccggcggggccagagcaagaaacacgcggactaacacccgcaatgctacgccacggaggcacgacaagccaaagaagcaaccgcatactgccagaaggccacaaccgcccgaaaggcacgacaacaccgacacacagacgaagcaaagagccgcccagacccgacacccgccccagaggcagcccaggaccaaccagcaggccccaaagcagagcccaacaactcaatgcgggataaacaaccagagaccgaaacgctcaaaggcctaccaagcgagccggaaaagaagccagaagaaccgcaacaggcgagacccgaaccc

SEQ ID NO: 96132 - DNA, 1110 bp, Glycine max
  unsure (1)..(1110): unsure at all n locations
  Clone ID: PAT_MRT3847_57818C.1
taagccattgaaacaaaagtgacacacttgcccttccaataactgatatcaaagaagtttccagctctagtagtcatctttcaattcattcgaatatacaatatgttcaaccagagtcaaaaagcgatacgggttcctaatcggtttctggaatataacactagcgaacaagatgaatgtgcagaagagataaatgagctccgggcagaatttgaaattgagttgcagcgcttgcagttgtatttggatggagaagctggatttgatgatgcacaacaagagggagtcaaggtaactcttgaggattctagttcaaaaagccatagttcaagttttggtgaaataataatggaacctcaaggagcaacttatgatgtatcttttggagttcctccaattgaattggagagaaggttgcatgaactgcttgaagcaagactggaagaacggatatcagagctggagtctgcattagaatgtaagacgcaaaagcttattaagaaagagatagaggttacttggtggaaagacactgcacaacttatctcacaacatgttccagaaacttctcggttcacttttccacttgatcctgatatttctttgaagttgagtcaacttgtaggatagtttttatgaaagagtgatgttgattaagccatcaaaatattgttatcagcagtacagtttcatgacctgttgcttcattttcttttttcttcaaaattttggtttagtcctctggagtaaatagtggtttggaggatgattttcaatgagagaacagaaattgaagggggtcaaaattgttttccattgtagagcactacacaagatgtgtgaaaactgaaaatgttggagccttttgagatttcttcttatgttaagattggagttgggtgactgtagtaagctactgcagtgaaatttgttggatgcaacaaaactcaagcttttgactccccgcagctattggtagacaatcgcatctatagtagtttgtaagatccttatcttgttcaaagacagtataattttctttctctaccgagacttgatttcattatgtgcaccataagcaaatattnnngaactcagttgtaaatnnnc

SEQ ID NO: 96133 - DNA, 342 bp, Glycine max
  Clone ID: PAT_MRT3847_57819C.1
ctagtacagcggcctccctttttttttttttttctgaatttttttttcctctgtacatcttgtattccagaaggagaggtttcttttcaactatcaatccaggcccaattgccatacaacgccataatgcaaggggcatcccaactataacgcattgctgcaccgtacatgctagcacctcttggcttaaatctgctcattacagaatcacacattttacgacgtctcatctcaatcgctggatctctcgaaggctctagcacctatgtactcacctatagcggcagagctcagcactgttgattcatcagactacacctaaccacatggtataattggttc

SEQ ID NO: 96134 - DNA, 423 bp, Glycine max
  unsure (1)..(423): unsure at all n locations
  Clone ID: PAT_MRT3847_5781C.1
cgaattcatagaccagaagaggtgctggtaaattgggtgttaagaaaaatataatcttatgaacaaaattcacccatagcttttatctgttttaaaaatgtttcttaaaattaggaagcttgagtatgtcttacatttttgttgtttatttgaatcgattattttctcttcactttttagtctcatagaaaaacaattgatttggggttttagtaaacttgtataagaccaaattggggaatcttgtttctgttgtaatatactcctttgcattctcttagccagatgtaataattacagatagatttcttccatgtttggtttccatattgctgaatagatgcattgtcacccngtctgtaatgtgggctttggtccctacangagcatgatgttcatgaattacaatttacagtgacccac

SEQ ID NO: 96135 - DNA, 609 bp, Glycine max
  Clone ID: PAT_MRT3847_57820C.1
ccacgcgtccgggcattttccaacatttttccttttgttttgctttgatcatacccaatgacaactcgtgaacgacgtactcctcacacacacacgagaaccctcccagcctcacttctcagaggggaaatctggaaccttttgcactaccctttattcgatttgtgtttgttgatcagaaaggcaaagaaaccatggaagaggcaccatcaatggaaatggatactgattcacaggaggatcagaacattgctcctgatgttctaccatttgctagaagctatcagcttgaagctttgtacaaagctatccatgagaataccatagtgtacttggagactggttcaggcaagactttgatagctatcatgcttcttcgcagctatgctcatcaactgcgaaagccttctccttacattgcagtgttcttggatccccaagttgtgttggtctctcaacaagcggaagccgtgaaaagaattactgatttgaaagtgggaatgtactgaagagatatgggagttgacttctgggatgctgctacctggaaacaagaaatggaaaaacatgaggtgcttgtcatgactcctgcaatattgctgagctgct

SEQ ID NO: 96136 - DNA, 219 bp, Glycine max
  Clone ID: PAT_MRT3847_57821C.1
cgtgcgctcattaaataacagaacttgagtctgtgtgtctcttgggctgaccaagccagagagagaaatggaagaagcatgatggggatgcttagctgagatactgatacttgctgtaacattggcatgcagggggctgaactgggtatggctaacgccacagaggccaaagaggctgctaacacagggagggcttgcaggacatgggctacggggtgg

SEQ ID NO: 96137 - DNA, 412 bp, Glycine max
  Clone ID: PAT_MRT3847_57822C.1
atttaaccctgttttaataataatcctcgccactctaccgtatagatgcacctgatcgacatttctcacacccctctacatcatcagaacctcaaacttgcaaacacaaacaccttactaacctgcaatcaacgagcgctactgcttttcaaatggagagcacacattttcgatatactccactgacaaacctcatatgcatagcactcatactaatcctcgaactgatattcacatctctggatacgattatacattccgtgtatgacactttcaaagctttttatacgtgcctactagcacaaacaaactctgcatccaacaagtgttccatacataaacttcttacacaatctcatatacatccatctcttgtgctactactaatcattacctatctcatactctttaa

SEQ ID NO: 96138 - DNA, 129 bp, Glycine max
  unsure (1)..(129): unsure at all n locations
  Clone ID: PAT_MRT3847_57823C.1
cngaaaccataganccatgcagtctgtgaggtccatcnnagcaagtnttgtggttctncnatnatcaatttcaangcaccgcttcactnccaattgaagnagctntcnaccatggttctcacacaacac

SEQ ID NO: 96139 - DNA, 1015 bp, Glycine max
  Clone ID: PAT_MRT3847_57824C.1
caactacctaaaatcacataattctaaaccccctcaaaatagggctggatcgaaaggcactgcgagaagacgacagaagggggatcgaaaggcgaggcggaccttcgggcgttgctcgctctcgacaccagcactctctctgtgagaaggaacacaaggaatcaacaaccatggattcacagggccagacaacttcattgcagagacttcagaatgtagaaaagagaattgtgaaggttttggagcttgcaggaggagtcatggatgagcttgcaagccctgttggtcctaggaaggatgtggtccaaaaccactgccttgagttcatgcaattaatcaaggacattcaggttgcattgcgggatgaaatcaaaagtgcttgtgaatatcgtccatttgagaaatgtgactatggttcaagaatcgccaatgagatttgtcacaagaaagtggaatttattatgtcacagttagatgcaatgaaacaaactatagatgagtatcatgcagcagtttgaaaatgtagcttagttccctgtagaagcctgggttaccacccggtaattgacttatttgggattgcttattactagttagcgtgttgttttggatgggggtaacaattacctttgtagagataggaaatcagtgtatttatttggatgattatatagtagaatatccaatgagtgtggattattttgttccccctatcttattacgggtaacacatttggatgattatatagaagaataactcagtttcttgctaaaaaaaaaaaaaaaaaaaaaaaaaaaaaaaaaaaaaaaaaaaaaaaaaaaaaaaaaaaaaaaaaaaaaaaaaaaaaaaaaaaaaaaaaaaaaaaaaaaaaaaaaaaaaaaaaaaaaaaaaaaaaaaaaaaggggggggcctttttaaagaaccaaatttaacaacccggggatggaaaaaaaaaatttttttttaagggaccccaaattaaattccagggccgggggtttaacaaggggggaa

SEQ ID NO: 96140 - DNA, 971 bp, Glycine max
  Clone ID: PAT_MRT3847_57825C.1
ctcacgcgtccgacggctggaagacgacagaagggggtgtgtgtgaaaagaagaaactttgtaagctcaatttgtttccaaggttgctctgggaatccgaggttctaaactctgcaactaactttaatggcaactgggcaagtcattaataaacctccttcacttcctccgtaccctgagatgattcgggaggcaattgaagcactgaatgaagagaatggttcgaataaatcatcaatttcgaagtacatcgaatccacctatggtggattgcctcaggcccacaaggttttgctcaatgtgcacctcgcgaaaatgagggaaagtggagtgctagtgttttggaagaacaactacaccaagcgtgacccaaatgcgccgccacggcggggccgtggcaggccacccaagcccaaggagcctctgccaccgggcactgtcttatcaccgcccaggcccaggggccgtccttcgaaggacccaaatgacctgcagaagcctcttaaggcttcggtggtgggtagtggtaggcctcgaggccggcccagaaaaatggcctggcccactggaggccttggtgaagtatcgcaggcctctaaggcgaagcctgtcactagtaatgggaggcctagaggtaggcctcccaaagtgaaggccgtattcactgaaattagtgtttgactataaaggcttatagggcttgcatggaatagggaagtgttgtttctacaaaaagttggactgagtaacggttttgtgtgtttactagattcttctcttatgtgttacacttagctgaaatgctgaattgttgtgtacaatcgtgtagtgtagtgtagtgtagttagttgctgaggctttgttcgtttgtaaattgtaactgtgaaaataggacaatgggtggagctaatggacgcaatctctcaaattcttgatgccggggtgtttggggtaataaataaaaagtggga

SEQ ID NO: 96141 - DNA, 1028 bp, Glycine max
  Clone ID: PAT_MRT3847_57826C.1
actacggctgcgagaagacgacagaaggggtggctctgaccgggaaaagaaaaaccagctttcttcaagcacctagatttcctctctctctaaatggcgttctcttcttttctcggcagagtcctcttcgcctccgttttcatcctctccgcttaccaagaatttaattcttatggagttgatgggggacccgcagcaaaagcactcagaccgaagtttgatgcctttgcacatcaagtacattctaaagttggctttcaacttccagatattgatatgaaatttttagtggctggggctattgctctcaagggccttggagggattcttttcatactcagcagctcttttggagctttccttttgcttttgcatcaagtgatcactactccaatactgtatgatttctacaattatcacagtgaggacaaagaatttatccaacttttcatcaaatttactcagaatatggctctcttcggggcattgttgtttttcattgggatgaaaaactctattcctagaaggcaacccaagaagaaggctgccaaaacaaaaacatattagttgaaaggacttctcggattgttcctggttgctcattatacccattttccatttctccaggattttggctttggtctctgtctggttcagaacgaatgtaccttctgtccgatggattatgtataatttataattattaatatatgtatgctaattttccgtttgcttgacattagaaactgtctttcgattactaaacttgtatacgaagagggggaaaaatgatcatagcctgttcattcagactgggtgtcaatttcgttctgtccaacggatttgatcgaaaggtgaagtctggcacttgcagttgctattgaactaagcttgatcttcacgttgtcacatggatttgtgtttcctattttttattcatttggttctttacttggtatggtaatggaaatgtatgctcgagtttttcacctgattatggttaaacataaaaaagaccttcaacactc

SEQ ID NO: 96142 - DNA, 678 bp, Glycine max
  Clone ID: PAT_MRT3847_57827C.1
ccacgcgtccgcaccaagaaacaccataaaaactccaactctagagaggaaaaagtccaagagttttaaggaaaggtcatatgatgctttaggcctttctgcctccacagaggcatcattaagttactcttccaatttgatcactgaatcccctgggagcatagctgcagtgaggagagaacagatggcactgcagcatgcgcagagaaaaatgaagattgctcattatggaagatcaaagtctgcaaagtttgaaagagttgttcctcttgatccttcatccaatcttacttcaaagacaagtgaggaggagaagagatgcagctttatcacagccaattcaggttatctgagagttcaaatttgtatacaaattttgactcctacttttttatactttgtgcaatgtgctaatcttaatgtcttttttggctatatagatcccatctatattgcttatcatgatgaagaatggggagttccagttcatgatgacaagtaagccatgactttctcttttccatggcagacaaatacaattaagatttaagaccctgcataaacttctcaagaagtacttgcagaaaaaaaaataaaagttaaaatgaattaaacttcttcctttaaggtaaaattatcttatgcttaagagaaaataaacatttagagaagttaaat

SEQ ID NO: 96143 - DNA, 630 bp, Glycine max
  Clone ID: PAT_MRT3847_57828C.1
cccacgcgtccgacggctgcgagaagacgacagaagggattctaaagctggctttcaacttccagatattgatatgaaaattttagttgctggggctattgctctcaagggcctcggagggattcttttcatacttggcagctcttttggagctttccttttgcttttacatcaaatgattgctactccaatactgtatgatttctactattatgacagcgaggacaaagaatttatccaacttttcatcaaatttactcagaatatggctctcttcggggcattgttgtttttcattgggatgaaaaactctattcctagaaggcaacccaagaagaaggttcccaaaacaaaaacctattagttgcaaggacttctcggattgttgccggttgctcattatactcattttccaattctcgaggatttgactttaggtgtctgtctggttcagaacgaatgtacctcgtaagagagtatttaggtgtaccttctgtctcatggattatgtataatttataattagttatatatgtatgctattttttcgtttgcctgacattatgaactatctttcgattactaaacttgtatacgaagagggaaaaaatgatcagagccattttcgtt

SEQ ID NO: 96144 - DNA, 537 bp, Glycine max
  Clone ID: PAT_MRT3847_57829C.1
caagtgatcactactccaatactgtatgatttctacaattatcacagcgaggacaaagaatttatccaacttttcatcaaatttactcagaatatggctctcttcggggcattgttgtttttcattgggatgaaaaactctattcctagaaggcaacccaagaagaaggctgccaaaacaaaaacatattagttgaaaggacttctcggattgttcctggagaaatggaaaatgggtataatgagcaaccaggattttggctttggtctctgtctggttcagaacgaatgtaccttctgtccgatggattatgtataatttataattatttatatatgtatgctatttttttgtttgcttgacattagaaactgtctttcgattactaaacttgtatacgaagagggggaaaaatgatcatagcctgttcattcagactgggtgtcaatttcgttctgtccaacggatttgatcgaaaggtgaagtctggcacttgcagttgctattgaactaagcttgatcttcacgttgtcaaaa

SEQ ID NO: 96145 - DNA, 1005 bp, Glycine max
  Clone ID: PAT_MRT3847_5782C.1
ccacgcgtccgtacggctggaggaagcccggaagttacgagggttttagaagccagcagcagtaggcaaaaatgtcgagttccatgatgacgctctcaaggaggctctattgctctctgcttcgaacccccaatgcatatcgccacttctccaccgatcaccttttcgactcggacgaggccgactcagcacccgacccacccgcacccgacgccgttcaagaagaagaaaagttcgtcatcgatcgccccctcgagaatggcctcgacgttggcatctacagggctattctggtagggaaggcggggcaggctcctttgcagaagaagcttaagagtggcacctccgtcactcttctctccgtcggcaccggagggattcacaacaaccgcaggcctcgcgtcgacgagaaccctaaggactatgccaatcgctctgccattcagtggcatcgtgtctccgtttatcctcagaaattgggagaccttgtcaccaaacacgttgttcccggttcaatgctgtacgtggaggggaacctcgagaccaaatgcttcaccgatccgataaccggcattgcccgccgaattcgagaaattgctgttcgacgaaatggtcgcattgtatttttaggtgaaggcggtgatgctgagctgcagacactgccaaaagacctgagagctgttggctattactaacgttagatgcttgaaatgggaacattgcatttagttcataatggagatttttctattttgtaattatactctgattttttaccgcaaatttggaattatttcgcagacatttgtcatgagggaaactctaggtttgagcgatcttgtagtttctacgtgtaattcataatcagggaatatagagctcaaccttcctgattttgtatgttggtaaacttgtggtagggcaagtatttcaattttctctttggttttaaattggaggaatgattgctttatgctcaaaaaaaaaaaaaaaaaaaaccaaaaa

SEQ ID NO: 96146 - DNA, 428 bp, Glycine max
  Clone ID: PAT_MRT3847_57830C.1
gaaaaaaaaaaggggggttttaatatttagtcttgggttttgacccccaaatccccatccttcccacctgggttgaagagaaaaagaatgggggaatttcaattgcccaaagggttaaaaaagaaattttcaaagccagaaaggggcctcatgcccatcattggtgccttggaaggcccgatgcttgaaaaaaccctcattttccttttccctcgggtgcaaatggcattttttcaacccatcaaggggggcgggttatcttaagatttaacctttggggccctaatgggcccacctttggggaacttttctgggaaggcaacattctttgtccccaatttccttagtgggggaaaagctttttttaaccatgggtttgccccgcccttgaaatgggtgacccccgccctcttaggattagcaaaact

SEQ ID NO: 96147 - DNA, 261 bp, Glycine max
  Clone ID: PAT_MRT3847_57831C.1
catgctctggtttaaaggttgtctttcattaatttatatagagacctttgaatgtgaaactagttttaaaatatttgaaggaaaatgtaacccacccagagggaatcgaaaaacaacaaacaaagagaatcgactttctccaaaaattccttctccctccgtcaacagtggttgccctctggtttgtgttgaatgtaaaattcagtattcagtattcagtggtgtgtttctggatatctcatactcctcaccatctgtgat

SEQ ID NO: 96148 - DNA, 146 bp, Glycine max
  Clone ID: PAT_MRT3847_57832C.1
gcgtcctcacccggcaatcacccaacttaaattctgactgtaatgaacgggtttcaaaacatgactagcgtactcgatgaacggaggggacatcgaactttatatcccctgcaaaccgtggcttttgatttatacccctaggatgc

SEQ ID NO: 96149 - DNA, 266 bp, Glycine max
  Clone ID: PAT_MRT3847_57833C.1
gccacgcgtccgggagcttactaagtgcctaaccgatcaaaggaatgcttgcaaagaggcccgagacaacattgaagatgcttataaccttatcatgaaactggtcactgaaagagagattttaggtacaaaaggtctgaattttcaagaggaattggcttctgccaagggtgagatatcgcgcttgaagagtcgaatcaatgcttcagaagttgctgctaacaatgaccacagtgcagacagatggatgtgaaaacaaggtcaat

SEQ ID NO: 96150 - DNA, 286 bp, Glycine max
  unsure (1)..(286): unsure at all n locations
  Clone ID: PAT_MRT3847_57834C.1
ttacctaaaaaacaacttttcactttttcaaagcattggtatatgcaattaacgtcaccgtgttacttattctacaacgagaaattatatcaaagccatngagtttggcagttgtttattttaccaaaaaacacagctcttatcaatgcttagtttgaattgatgacatcatgatttcttgggtttgagccataaagagccactatatgcttgcataggcatgttttccaactccccccaaataaagttcttttaaactacaaagcaccctccatcaccttaacct

SEQ ID NO: 96151 - DNA, 343 bp, Glycine max
  unsure (1)..(343): unsure at all n locations
  Clone ID: PAT_MRT3847_57835C.1
gaggaatggaggacttaataaaaagagncgtgagcaggggaaggtgattcgatgatgcaactgcggtaagtgctgacaaagggaaaagggtatagagaggaatgtggtgaggaacattgttgaatagggtagagtcaaagatggacgggaggattgagtctatggaaaatattttttttttaaagtttatgggaaaaggcaggagagggtgtgttgagctatgcaatctcatgtggtgaggagttgataaagaaaaggaagggataaaagtgagactccagagagaatgatcaaaagcaaggatgatgcagggaggcatgtaaagaatggtcaggaggaacgt

SEQ ID NO: 96152 - DNA, 689 bp, Glycine max
  unsure (1)..(689): unsure at all n locations
  Clone ID: PAT_MRT3847_57836C.1
cacgcgtccgtgcgtcgttgtttgttgtttcccttcatctattttttcttcgcccccttttgtgtttctttttttggttgtttgttctttcttctcgttcgtcgctttgtgatctctctctgctacaaaaatgtgattggtgcacgaaggaaccatgtccgccgagaaagagagagagacccaggtttacttggccaagcttgccgagcaggccgagagatacgaagaaatggttgagtgtatgaagaaagtagcaaaacttgatcttgatctaactgtggaagaaaggaacctcctctcagtgggagcctcttggcgcatcatgtcctcaattgagcagaaggaagagtctaagggaaatgagcacaatgttaaactgatcaagagttactgccaaaaagttgaggaggaactctccaaaatttgtggggacattctgactattatagaccagcatttgattccttcttccgcatcagcagaagcttaggttttctactataagatgaaaggtgattattnttcggtatcttgctgagttccagactgaccaagaaaggaaagaggcagctgaacagtcactgaaagatacgaggctgcttcagccactgcaaacacagatcttccatcaaccacatccatccggtcttggacttgcactcaatttctctggcttttattaagagaaa

SEQ ID NO: 96153 - DNA, 249 bp, Glycine max
  Clone ID: PAT_MRT3847_57837C.1
tagagcgggtcctgagcctatgtcgagcgattgcgattgagtgatacaggaagaaatcccattggtaataatcccagatggagctttcgactccaaattcttactcgaaacacttgtccatcacaccgggttctaaagctttgagaagccctatctccgacgaacagatctggaagcgcctccgaaaacactggctgcgccctatgaaaggatctaagctcaaagacccagcttcgctaattgattaca

SEQ ID NO: 96154 - DNA, 362 bp, Glycine max
  Clone ID: PAT_MRT3847_57839C.1
gtgtcaaaacaggtaataacattagcagcaatgactcaatctccaaacccattggattcccctttggcatactcaggttccacccatttgttcacagtatccaagagcaactccatcagcatcaatcctcagcatcatgaaagatatcaagctcaagactagtgctatatattttgagttgaggcttggaaattgatttgatttttgtatatatggaagttaattaattctgagaggcttatacttttctttggtgggggtggagacggttacatataatttggataattggtattttatccttgtttgattctctctctgtacataccttcttttactgcttttatccatggtgaaatcag

SEQ ID NO: 96155 - DNA, 678 bp, Glycine max
  unsure (1)..(678): unsure at all n locations
  Clone ID: PAT_MRT3847_5783C.1
gcaagcctacagcaaactgcattttctttacaattacaatcgtaaaagtaactgattccaactccatccctacttccaaatacaattaaacaaacaccaaagacaaaacaggaaaattctatccatttaaaaagaatagcaaactaatatttatgaatttattattctaaagcgaaacttcacaaatgtttattatatcattagtaaaatgttgtcttcaaacctgcaaaacataatccagcgtcattgcaagctagagcagtcatcatcatgtgtgaactatccaatgaatgtacaaagtttggaggaaatgcacttctctgcttcttgacagatactgcgcttccctccctctgcaaagccaaaagctgaagagatgttcttatctgataacgttcagttttacagtatggttgtacaacaggaagaccaagaggagtggtccagcgaacagcctggttttcacaagcaatcacctttgcacaatccccaagccaacccatgatgccacgtgcagcttcaaaaacttctccaagggcagccaatgtcaccttagctgcatagcaagatgcagcatataaaagtctatcatcagtaatgagacctttctcccctaatcttctcttaatttgnctccgtgccccattataagtaacaccataaacagaagtcatttac

SEQ ID NO: 96156 - DNA, 210 bp, Glycine max
  Clone ID: PAT_MRT3847_57840C.1
ggaagaaatgaaatttgaactttttagggattacttacactagaactattacttgtgggctaacggcgtttgaaacccgttatcatgactggacgagttacacattcaaacttaaataaaataaagaaggagagtaatagtaaacaccctagttaatacttacaactgtacctgccacatacaaccctaagtcagcttaacatttaactt

SEQ ID NO: 96157 - DNA, 138 bp, Glycine max
  Clone ID: PAT_MRT3847_57841C.1
tcgacaaaagtttatgtttgacacggataaacattcttacaggtaagaagtgattgaaaagcaatctaaatcttaagtcattcctactttgagccacagtcatagatttgtaactaaatagcattattcaaacccatt

SEQ ID NO: 96158 - DNA, 1770 bp, Glycine max
  Clone ID: PAT_MRT3847_57842C.1
gattcgcacatgaattattaattgaaatgcgctccacttcatttgttgagatcagaaagatcagttactaaggtcccaggccggacaataattgatcatggcaccaactaaactaccccacgaccctgacccgcacccgtgcaaattagtagagctagaaagtagtcaactcttgactttttggctagaattgttggatgtggccttaagataagaacaaagacaaacatcaagctaaacaatccttattggagcaccaaatcaaacattagcatgccctcaggttccaacccaaaaaatcaatggtttaaatctccaaaaaatcatctcccctcccttccatcctcattcagatgctgaaatcatcacgcgtgctccgcaactaacccacatttcataaaaatcatagtttggcacataaaatattatgcttttttgtgtgtgtgtgtgtgtgggggggggggaagggggttgttgatagtattaaataagtaaacataaaaccatacggatttttatgttggggagtaaaattgtaaaggaatcaaccgggtttttaggactatgcggcatcactctcccacaaaaaagcctttttacaaggaactttggcacgaacattacgggtcaccactcaccagtgccttccctgaccagtgccgcctttgttttttccaaggaaggcattcttgggttttggtaactcatggagatccatcacttgaatcgttctttgctttttggcatttgcagcatctttgtagttctcttgaagccgttttctggctgaagcaaatctatccgggtcaaaattgctttctctctgtctgttttgagtaggaggagcaggagtagtgactgatggcgatggttttgaaggagcttctttgcgaggaattgcttttggttttcgttctgcttcaatattgttgcgctctgacccaaaactcccatagtgtggatttggtgagtatgcaaaatcaggaatctgacgatgcccattttgtaggattctctgctgaggcgagtcctcatcagccatgacagcagtacccggttctcccggggccttcaacttcacccattcatctacaatttccttccacttcctgacgagtaacttgaccaatctcttaacatcattagacgaatgcttccgcaaccgattcacatgcctcccaatgtcagtctcttctaacgcttgaaatgtaatatccatgtctgctagattctgcaacaactccaccaacgaatcttcggactggtgagggtcttcgagttgctctttaatgtcgagaatcttccgttgctcgtcgtcgaacaagcctccgtagggatccttttcctcctccgcggagggactgctctgcgtcctgatttctcccccgtcgccggcgtcgcagttccgacacagcggcggcggtgaactggccgcgtaaaggcgctcaacgattccatctctccggcgcttcaactcgtgagcgtggtcggcggaggccaccgcgatggccgcgtccatgagggcccaaacgtccacgcccgcgctctccagaatggatcggaaatcctccgaatccatatccaaaccggaaaaacgaaatcgacctaaccaatgccgaactggtgtgagaacgcggatccaccacagaaacaaacaaaaccaaatatctattctctttttcgggttttcggggttcttcgtggcgaggaattgcttcgggcaaccgaccagcaccaaacaggaggcgcggagaagacccagccgcccga

SEQ ID NO: 96159 - DNA, 379 bp, Glycine max
  Clone ID: PAT_MRT3847_57843C.1
ctcgagccgttccattcctcgacatataatatttatgtttgttttacctcttttttaacgggattgtaaaatttgttctaattaaaaatggcgttaagcaaccctaacccatcttatttctgcaattaatacgtggaatcaatcataataccataatacgtaagccaattgcaccaatcacataagataggttatgtaatctcattttcagttagaataaattagataacttctttttaaaatatttgcggcactctaggacagagattttgctcttttaaaaaataatagaatatcttttttaatgtcattttttttcaaaattaatacaacatggcatctttaaaactactagtattttttaatacaccatttcatg

SEQ ID NO: 96160 - DNA, 402 bp, Glycine max
  unsure (1)..(402): unsure at all n locations
  Clone ID: PAT_MRT3847_57844C.1
ttgaatacaagatttgttgttttgtaaaaaaaanacatctccttggggaaaagatgacaaataacatgaactagaagcacatttttatccaccaaaatattttgtctcagactaaccaaacctcatcaaatcaaggactcaccacttatataactatggaatctcacaaaacaatctatgctaacaaaagaacactggctctacttgatggataaggatgtaatttaaccactttttgattttggttcatcttcataactgcccttaagcctgtgaaatgcaatcctagtgataacagcacttcgcctgggatgattcgcatctttttgatgatggatgacaacgaaactctggaaaggactttatttttcttttcgaattgaaaattattggagctaaact

SEQ ID NO: 96161 - DNA, 195 bp, Glycine max
  Clone ID: PAT_MRT3847_57845C.1
caccgctccggttaattttggaacaccgcttgcacaaaaacaatgggtatgggatgtaatccaagccgcgtgatctgatcacatggcgacaaggcacagctgaagcggacacggatgtaatgtgggctaacttgagcaactggagggcctgccacttcaatgcaggatgttcaggttacaattgattgggcactt

SEQ ID NO: 96162 - DNA, 204 bp, Glycine max
  Clone ID: PAT_MRT3847_57846C.1
gagggggagaaaaaagaactgaaaatcttatatgaatagatcccaaacattttaatttttatagggacaaaaaatatattttaacccttaaaaattgatttaagggagaattcttctttaaagggaacctacttaagcgaacacactttttatgaattaggactcataaagattctctattagagaaagcttcctaccttgttt

SEQ ID NO: 96163 - DNA, 213 bp, Glycine max
  unsure (1)..(213): unsure at all n locations
  Clone ID: PAT_MRT3847_57847C.1
ttcgggttgcaacacatatactatacggtggtctatctttctgantaacgaaaaggtatattcatccatattctcgtattaataatatttcggaccttcttactcagtacttgtgatctttgctcagaaatattattcgatacgagtttttcgaattggttgaaactatacaaatattacaaatatgtggcgtgtcgcctgactagtagtagt

SEQ ID NO: 96164 - DNA, 510 bp, Glycine max
  Clone ID: PAT_MRT3847_57848C.1
ccaaggataggtttcccgtcatcactgtatgacgtcctccgttctttggggggagggggagggggggggcgtatgtagacagagagaatatcgaggacaagatgagcgtattagcgaacgagcgaagctggcactgcgggtattgccgtaacggacaaagaatgggagaccaatgaaagccaaagagggaatatgatttgtaaccctagagtgatacgttaacgttaagggtagctaataaaaaaaagagagggagagaaaaaaaaaacacacacacaccaaaaaccgatgataaacgagtcggggttgttgatggtgcacaaatggtccgcaagtccgtttaaatcgggaaatcatgtatcgcatcgtgattacgcattccgtgtcgaggtttgatcttatgatcgaagtgaagtgaaaagcgggttggcgtggaattcgtcttacgcgtacggctatatgtgggcagggcgttgcgaatatccatgtaattatcgtcggggtgcaggt

SEQ ID NO: 96165 - DNA, 458 bp, Glycine max
  Clone ID: PAT_MRT3847_57849C.1
gaaggtttcccgtcatcactgtatgacgatcctcctgtctttggggggggggggggtgggggggggggggggtgggggaatcaaaccgcgtaggtccaagcaagaccttgggagttatcagggggggtaaaaaacgaaaaggccgtgtgcggttaagccaatataggttgaatagagcgtataccgggaataggtaccccctggccctgagagttataccggtaaagccgttataacaagcggtggatagcaccagcaagagaataagagcccggataatatcgggaggacataacctccaaccaacagtagtggttagggggtaacgtgcgcatcgtagagtcccacagtagttaagcaaacggttcccctgcggtactagtggtaagggctcaagagaggcgcgtaccagtagtcagatggcatcaccttgagaagaatggtttgtggtaatggat

SEQ ID NO: 96166 - DNA, 271 bp, Glycine max
  unsure (1)..(271): unsure at all n locations
  Clone ID: PAT_MRT3847_5784C.1
ggatgcctttccatatgtatattttgatttcatatgtcaaattggtttgattcacacttccttttggtttttgcatgatgatcttaatcctaaccatctattgggagaggctttaaaaatagattgaattttgttaaatctgattgtaacataacctaacccgagcctgtagttggggataatcaagcattataatatgaaagagtcattttagtgcnnannaaaaaaaaaaaaaaaaaaaaaaaaaaaaaaaaaaaaaaaaaaaaaaaaa

SEQ ID NO: 96167 - DNA, 528 bp, Glycine max
  Clone ID: PAT_MRT3847_57850C.1
gcttccctggctctgccataccttcacatactcaatacactatggatttgtgaaaagatagcaaacactggactgatcagcgtccaacaccctacaatcatggacaaagtcagctggtcacctgcatctacgttctgagactccatgtgaccttagaagctatgatggagcctaccgtcacccagctatgtaccaaagacactgtttgagaaataactcgatcactgcattgcatcctcctgcgatgcccacatgcaaagctaccactggatttgcctgctgatagaacatctgcctcacccgtctttgttagtgctccatcagataaaggacactgtgtttgagactttctcatagaaagagtttgagcagctgtctccaaaactgctagtgctcccattgaacagtgtcaagcccgggacccacaaccaggacgagatgatcaatactgagaggctttataagccctacaaatgtattggtgatcggttcaagagaacaatggcagatgagggtgctatttctcta

SEQ ID NO: 96168 - DNA, 1045 bp, Glycine max
  Clone ID: PAT_MRT3847_57851C.1
gtgactaaggagggtgactgtgtgagtggagtgttcatacttgtattgtattggcaacaaaacaacacttgtgcacagtgagcaaccctcttgttcttcatcaacaatgctccaaacaacctgcattatactcttctctgttgtggccatatttttgcctcatggaacagcaatgctcaacctcactctcccaggacaacacccagaccctgaagccgttgctcgagaagttcataggaaagtgaatgcttcaatggcaagaagggaaatgctgggagtgtcagagaaagaggtggcatcatgtctaacagggaatcccatagatgattgttggaaatgtgacccagattgggccaacaacaggcagaggctagcagattgtgcaatagggttcgggcagaacgcaaagggaggaaaaggtggccaattttacatagtcactgattcctcagatgaggaccctgtgaacccaaaacctggaacacttagatatgcagtgatacagaacgagccactgtggatagtgttccccagtaacatgatgattaagctgtctcaagaactcatttttaatagctacaagaccattgatgggcgtggagctgacgtgcacattgtgggtggaggctgcattactcttcagtatattagcaatgtcattattcacaacattcacatccaccattgccatccctctggcaacgctaacgtgcggtcgagccccgaacattatgggtaccgcacggagtcggacggcgacgggatctccatcttcggctcgcgtgacatttggatcgaccactgcaccctctcccggtgcaaggacggcctgatcgatgcagtgatgggttccagcgctatcacgatctccaacaaccacttctcccaccacaatgacgtgatgctcctgtgccacagcgaccactacctcccagactccagcatgcaggtgaccattggcttcaaccactttcgggagggcctcgtccagcgcatgccgcgttgccgacgaggttacattcacgtggagaacaatgacttcaca

SEQ ID NO: 96169 - DNA, 362 bp, Glycine max
  Clone ID: PAT_MRT3847_57852C.1
caaaaaaaaaaaaaaaaaattgttgcttgcttgcccccccagtgttttttttcaacgcggggggttaatattagtaataatagggcccttttttttttttattctccccctttgtttttttaacacaaaaatttacatttggggatggtaaacaatgccccccttgagggggaggcatttgcccttaaacgggaacagtttggtttttttttcagggaggggcttttcgcccccgggagactttttaaaagcctccccccttgcttttttgtccaaaaggacaaagctaaacctttaccaagcttccaccaggttttggttccccaccaactccaaagcttcttttttttttttaaaaatgt

SEQ ID NO: 96170 - DNA, 249 bp, Glycine max
  Clone ID: PAT_MRT3847_57853C.1
gggggagagataaacgaattatttatataacttatttatataaactcggccttggatttttacctttataagaatacatactggtctaaaagaatggtttttttttcctaattagaggggaaaatcttattgatgaatttgccaatgaaactcatcaaattttcacatttattttgggggcatttacccaatagagacctaaaagggggactcaggggggagttcttcttctaggaaaaaagaaaacat

SEQ ID NO: 96171 - DNA, 488 bp, Glycine max
  Clone ID: PAT_MRT3847_57854C.1
aactccattctccatttcaattaagggatttaaattcataatttattatctcccatgaaacaggaagtttcaacaaggttaatgtgtaaaatataaggtatgaaaataattcatatacacataaagagagattttaattaaattataattaaataaaatatatgtttatataacaaaatatctaaataatagtatattcatatttttaaacctaacattctatatttttttggaatattagttggataaaagtgtcggtaaaatattatttttgaatcaaatactcaataaaaaatatcaggcaagtattaaacaagtgtctaaatgtgttgattttaaaaatatgtttgacacaacgacacttcaaacaaaaaaatattcatatttcgtagagtcatctctcttattgctatatttattttaagtcacacaagagatgactcttgattaaaattattagtcatataagataaaattatactcgaatc

SEQ ID NO: 96172 - DNA, 1267 bp, Glycine max
  Clone ID: PAT_MRT3847_57855C.1
cccacgcgtccccccacgcgtccgtacggctctcagaactcgacacctggggaaggagagatgtaaagaagagaaaggcaacaacagcagatgggttggggcagaagagataggaggacaagttggtaatttggttggggttgcggttgcggttgggcgcggtgcgtggccacccttgtttaatttttttcaaaatccctaatctgaatcccaatgccattgatgtgaattggtgcaaagcaatgatttcgaatccggaattgatccactacgcctgcatcgctcgatcggagactatcctggggcagcaccagagcgagaaggagcccaacatggaggccttggcggcccaatgcgtggcccaaacacctcccaaccactccctattctcccacaccgtcaaccaccgcacatacaccttcctcatcgaccctcccttcgtcttcttctccatctcccaccactccctcctcaaatcccaaaccctccccttcctccaccgcatcagatcctccttccgtcaaaccctaccccccaccaacaatcaccactttgcccctctctccttccaatcccaattccacaccatcttccaaaacgcgcttcacgacaacaacagatcgcagcaacaacaacaaccctctcctcctctcaaccctccagctcagggcttgaagaaaaagaaaaggcccaatgacgcgcccgccacgctcgacgtctccgacgacgccgtttcgctcaagccccagctccacaaccacagcaacaaggccaagcacgtttggaagaaacacgtgtgggtcctcctcctcctcgatttgttcgtctgcgctgtcctctttgtcatctggttgtgggtctgcagcggcttcaagtgcatggcctattgaatcatccaatccaaatttctaaacactctacttttttttttcttctctccctaaattgaaaaaaaaaaaaaataagttcacgttttttcgggttcgtttttgtcccttcttctttctctggaggtagggatttttagcttcttgttttttttttaaaaaaaaatattttattcacacttgataactgtgaaagttgcagactgcagagagaacatacgcatacctgttatgtatatgtaatatgtaattggggggtttcggttttcttcttcttccttctttttttatctcccatttccattggaaatttccttctttttcttaatgggaattgcatatccaaccatcaaggatccatcttgcccaaaaaaaaaaaa

SEQ ID NO: 96173 - DNA, 844 bp, Glycine max
  unsure (1)..(844): unsure at all n locations
  Clone ID: PAT_MRT3847_57856C.1
ccacgcgtccgcggacgcgtgggcggacgcgtgggcggacgcgtgggttccaatcccaattccacaccatcttccaaaacgcgcttcacgacaacaacagatcgcagcaacaacaacaanccctctcctcctctcaaccctccagctcagggcttgaagaaaaagaaaaggcccaatgacgcgcccgccacgctcgacgtctccgacgacgccgtttcgctcaagccccagctccacaaccacagcaacaaggccaagcacgtttggaagaaacacgtgtgggtcctcctcctcctcgatttgttcgtctgcgctgtcctctttgtcatctggttgtgggtctgcagcggcttcaagtgcatggcctattgaatcatccaatccaaatttctcaacactctacttttttttttcttctctctcaaaattgaataaaaaaccaaaaaaagttcacgtttttttcgttttcggtttcgtttttgtcccttcttctttctctggaaggacgtgggattttttagcttcttgtttttattttatccacacttgataactgtgaaagttgcagactgcagagagagcttaagcataagcatacctgttatgtatatgtaatatgtaattggggggttttggtttgcttcttcttccttcttcttttcttttctttttgtttccaatttccattggaaatttccttctttttttcttaatgggaattgcatatccaactatcaaggatccatcttgttaacttgtcatgttcaattgtgcaaaattacagactccatatgttcactatcataaaaaaaaaaaaaaaaaaaaatgcttgctcggccgctct

SEQ ID NO: 96174 - DNA, 531 bp, Glycine max
  Clone ID: PAT_MRT3847_57857C.1
agcccggaattcggctcgagtagatgcatagaatttcctacatatatttttgttttatcttagctaatttgtagtgacaggcagaggaaataatactcgcataggtattttagctgcttggagaaaccattatttgttgtgtacataattcattcccgtgctctcttaggtcgtgctgcctctgattactatcaatttacaccaattgctagcggactggaaaaaaataaaaaaaaaaaattcaaagggcggccgccctttttttttttttttttaattcaaacacagctattatcattcaaatttgcgagatttggtttgtgattttagtccatgtgcatcaagaaatgcattatgtaatcctggcccaaaaacagggattcatgatgcaaaattgcaattaaaacaatgaatcaagaattttatctggctgcacttgacatcaagtatgagctcgtgcgtttgggcaacttaagattaggaacctaagttcctaaaaagcttcatgctttttcttttgcaatgcacaac

SEQ ID NO: 96175 - DNA, 257 bp, Glycine max
  unsure (1)..(257): unsure at all n locations
  Clone ID: PAT_MRT3847_57858C.1
actagtagtatcaacaatgtggatgctagaaggtgtttttctatgggttcttttgcttatgttatggatganagttcttcattgcaagtacctanaagaactccaatcaagaagcaatcaagtaagaagaagtctggtttgccttgacaccagggcacaggcctgcaatgtcagaatgtgactgtgaatccagaagggatttcaagtttgcagggtttgatgcaacaacttatanttgangatgatgctgctagtac

SEQ ID NO: 96176 - DNA, 156 bp, Glycine max
  unsure (1)..(156): unsure at all n locations
  Clone ID: PAT_MRT3847_57859C.1
gaaaacccaaagtgcttntctccnctgtctttctctctctnnttgctatccttttggctagtgngcantgctgcaagtgcaantccaggaagcgcagtgncaanccaccatgtttcancattcaacagaagcngtttcnttccacttgnntctcng

SEQ ID NO: 96177 - DNA, 379 bp, Glycine max
  Clone ID: PAT_MRT3847_5785C.1
attcaggtggaaattaaatcttttccaatttccctaagtgttaattactcccctccttgcacccataggaattcggtttggggattaaaaataaaatttttaaaccgtttcccattaaaaaaaccaaatttttggtggtattttatttaccattattatgccaaaatgtttcctattattttcaaagaacctgattgactttttttttgaaacttaaacaaaggaaagcttttttttagtttaaagccggttacctattattttccctgaattgataccaattgacctttacaaaccacttatcacactgcactctcaaaaattcataataagttttcaacccaacccaacttcatttcttttacccaacccttaaaaa

SEQ ID NO: 96178 - DNA, 377 bp, Glycine max
  Clone ID: PAT_MRT3847_57860C.1
ctgggtatcaccattggatggtttccacttgcgttacaccaaatgggggccattgggttcccggccaatctatccttgatgttactttgaaggccctcctttgaaaaaaaaaaaaaaaacgttttttttgtctcacaaactgcatatagagtctctccatttagttttcccgggtggattacacaattttttatattttttttgataatctgaaattttttcaaaatttagaagtatttttagataatcttaaaccttatatagattttttggacacactcccggaaacctctttggagagacctttttttcctttcaatacaaaaaaaaatggggcttttttctttctcaaggggggccctccaaaaaaataatgg

SEQ ID NO: 96179 - DNA, 128 bp, Glycine max
  unsure (1)..(128): unsure at all n locations
  Clone ID: PAT_MRT3847_57861C.1
ggctnagactagtcgngagaananaaggccgntggagaggtctganaacagnatntacangcccaccctcagagtgngctctccattcccagcctcagtccaggagncagacccnacacatatngcat

SEQ ID NO: 96180 - DNA, 256 bp, Glycine max
  Clone ID: PAT_MRT3847_57862C.1
cctctctctttttttttttttatttaacaagaataaaacgacgctaagcaatttaccaaatctagatcaaagcagacataacagcagaaggagaataacggtgaagctcaaacaaagcctccattctgatacaaaggcagaggacaaaaagtagaaaaatgcatttcatatatcttagagacggagctgtttttttttttttaagaaccagaaaaagaaacttcaacaccatacaaaaggccattgagataggaag

SEQ ID NO: 96181 - DNA, 471 bp, Glycine max
  unsure (1)..(471): unsure at all n locations
  Clone ID: PAT_MRT3847_57863C.1
cactgagcatcgtctagctatctcgatcgaactgtccaaggtcctgtcacttcaacaacagtctggaattcgactaacactatcaaaaaggcactcgggtggagtataattggggggtcgactacaacgggggattccggtctgtccccaaagagcggcacgtgagtacaaataaggnacacccgggaaaggccaggtgggtgccacaaggacagccgtggttgcaatacgttggggagggccgaccgaagagtcagcaagtgatgcgtcaacgtgatcaatggacaaacgcacagtaagggcaacaaagcatgggaaagtgggcgcgatgcatttttaagtcaaggcgggcccaggctcaacgcaaccaaagtaggggagtgatgaagagtccataaaggccacgaggattaaagtaggtcttgaggcttatacttcgacagagaccgaggggcacaagatcgtggtgga

SEQ ID NO: 96182 - DNA, 198 bp, Glycine max
  Clone ID: PAT_MRT3847_57864C.1
aaaaggggtaaaacccccaaataaagggccctttagggcttttttgggggccaaaaattccccccaggggggaaaacccaaaagggttttcccaaaatttttggccgttaaagggacccaaacaatccgaaagcaacttcgggggcccgggtggtccctaaaattgggcaaagaaaggtttttttcccagggccccaa

SEQ ID NO: 96183 - DNA, 196 bp, Glycine max
  Clone ID: PAT_MRT3847_57865C.1
ggagcacaggctgcaagagagcgtgattgtggaatccttaaaggaacagattcgggcactgagcaaacttgccaaatctagttcaaggaaaaccatttcttctgaagatagtccttttcacttgagaagccgctacctcctcttctgttacaagtcttgcatattattttatatcatactagaaaataactcccaa

SEQ ID NO: 96184 - DNA, 510 bp, Glycine max
  Clone ID: PAT_MRT3847_57866C.1
acgaagctcgaattcggctgacacgtgacgttcattctgtctgttggaactgttggccttttagggttagggtttcggtttgtggatctattgttgcctctgcgatggatcgcaagaggggaaggcctgaagctgccttcaatttcaatggcggcgccaagaaatcgaggcctgcacctccggctgtccatttggtgaaggatgccacttcctgcattatgttcctggtggctttaaagctgtctctcaactgatcaatgttggtagcaatcctgttactcctcaagttgggagaaaccctgttccaccatccttccccgatggatcttctcctccagttgttaaaacccgattgtgcaacaagtttaatacagctgaaggttgcaaatttggtgacaaatgtcactttgcccatggtgagtgggagcttggcaggcctacagccccatcatatgaagatccccgtgttttgggacaaatgccaagcagcagggtaggtgggcgagttga

SEQ ID NO: 96185 - DNA, 1459 bp, Glycine max
  Clone ID: PAT_MRT3847_57867C.1
attaatggcgaagctgagccaagattcccattaattattagttatcatgtagcaaattagaagctgtttgataaaaatttgaaaaactaataattaatggcgagtcttggcagcttctgcacaattcaaacctcgttaaaaaaaaattataacactgacccacgggtccgtcccacacatatataacgcgctggctgggttccgtgatacgatatgatgtccatagatctaaccttgcgaaggtcggtcccttcccacacatatataacatactgactggatgaggtaagaccagataacatgcggtccgacacgtgacgttcattctgtctgttggaactgttggccttttagggttagggtttcggtttgtggatctattgttgcctctgcgatggatcgcaagaggggaaggcctgaagctgccttcaatttcaatggcggcgccaagaaatcgaggcctgaaacggactcctttccaactggtttaggaagcaaatcgaagccatgcacaaagtttttcagcacctccggctgtccatttggtgaaggatgccacttcctgcattatgttcctggtggctttaaagctgtctctcaactgatcaatgttggtagcaatcctgttactcctcaagttgggagaaaccctgttccaccatccttccccgatggatcttctcctccagttgttaaaacccgattgtgcaacaagtttaatacagctgaaggttgcaaatttggtgacaaatgtcactttgcccatggtgagtgggagcttggcaggcctacagccccatcatatgaagatccccgtgttttgggacaaatgccaagcagcagggtaggtgggcgagttgagcccccacatccagctcatggagctgctgccagctttggagcctcggctactgcaaaaatcagtatcaatgcttccttagctggagctgtcattggaaaaaatggtgtcaactcgaagcaaatatgtcgtgtaacaggagctaaactttccataagggatcatgacacggatcctaaccttagaaacatcgagcttgaaggcagttttgatcagatcaaacaagccagtgccatggttcacgaagttattctaaatgttagttctgcctctgggcctccaatgaaaagctttacttcgcagacttctgcccctacaagcaacttcaagactaagctgtgtgaaaactttgccaaaggttcctgcacttttggggaaaggtgtcacttcgcacatggaaatgatgaattgcgcaagtctggaatgtgatagcgttataatttttttttagcgaggtttgaattgtgcagaattttctagtttttcaatttttttatcaaacagcttctaatttgctacatgataactgaactaatggtgagtcttagctcagcttctaaaattcaacgcacattcaaatttgaaatttcctattgtcaa

SEQ ID NO: 96186 - DNA, 484 bp, Glycine max
  Clone ID: PAT_MRT3847_57868C.1
ccggcgggtcgctcaagagagtataaggtactactccggttaccgatcaactgcattaaacgcaaggcctaccttgaaatctaatcgatcctttccgtgactctctctttttcctgtctctttagcatccatgcaataatagaaaccactactccatctctggcatccaacactcctacacccagcacccacgtgaacccaatatgggcttcctcatgagcatggaccccgtagatcgctcttttccacttgtgtacactatctgcaccatgattacactttactactagctcttatttgttcaaagcgattatcaagttagatttgtccataacaaatgtctgtttgttgtatatatatcaattggtaaaaaaaaatttgtttgactatttagtaaatatttttttttattaattactaatatatatttttaaacgcttaaaataataacttttaactgtttatattttctttcacttttatg

SEQ ID NO: 96187 - DNA, 361 bp, Glycine max
  Clone ID: PAT_MRT3847_57869C.1
ctctctcttttttcatattaaaaaactttttttcattgctaccatgaatgatgatgaatcgtttttgttactacacggaaaggaaaaactaagttcatgctccaagccaccaataacagtctttgtcttgtgttattcggcagttgcgcgaaccgaggacatgattataagcataaaaatcgaggggattgaatgagtaaactaatgcgtttggccgtaagctccggattcaacacgatgaggcctaggtggggacaaggctcttctgtgacagaggtttaactcttcccgcggctgtgcaataagaagaagcgctcttgcatctccaccaccggttggaggtgccaacaaagggataatg

SEQ ID NO: 96188 - DNA, 679 bp, Glycine max
  unsure (1)..(679): unsure at all n locations
  Clone ID: PAT_MRT3847_5786C.1
tattctttttgttgcttttatctccttgatctgttttgggttctgtctccttatttattgttacttctggtcttcaatcttttagacatgtcatcattcactgtcactgttacatctgtgtacaattttgaaatttgaatccttaatctttacaaaaattatgtatacaactttgaataactattgatgctagacttttaagattttcatgtgttaaataagtactattagccttgctttattgttatgtatgttgaaactcctgaaataatatttatcatctcgtgtttcccaaaaaacatgaatattacaagttttgtaggataatttgaattatctatagcttagttgtagaatctaccattattggaatgtgatcctagtagtggacgtatccatgtggtgacatatgaagaacagaaaactcactgttctaataaaagctacctctgaattaatcttaccaattactatatcaaatattattatactaatatgtgcatgtattagtaagaaatacagctgtttcctttaacaagcattagcttttgctctcaatttctaggagccttctttttgtctgcttcaatcattctgctcaatacaacttaanttttctgaaaatattcagcttgtttttggttagtttctcaactattttttatatcaaccctgaata

SEQ ID NO: 96189 - DNA, 224 bp, Glycine max
  Clone ID: PAT_MRT3847_57870C.1
acattatagcagcccaagggcaggagatttaaacctgatgtagcgacgacacaacgaagatcacagatcattgtttctgaatgaaatgtgtgagacccttatcagctaccaaatgtgttatgaaaactactctgtcattcattccccatccttgaacatctttactcgggtcagaccaaagcacatcacatagcacacctgtatcaggaacatctgtgtgccgc

SEQ ID NO: 96190 - DNA, 508 bp, Glycine max
  Clone ID: PAT_MRT3847_57871C.1
gggaggacaatgaaacttatatataggggggttttggtaagaaaaaattataaacagtaggcattaaacacttaataataaaacactccacattttaatattactcatcccattcttagaggaagctcatagtatatgccaacattggtaaagaccaagaatgtttaaaattcacaagaaaaatgttaagatataaatatctaacccctaattgtaaatgaaagctcagttattagagtcaaacttgcaaagcctaaattagggtggagagaaaacattgcttctgagagatggcgcctgagtcagaacatcaagggcgagggttgttttctacgctccagacttcggctaaattctccgactaacaaggtaccctgtgatccacggggacagatcctcgttgacctcgatcatgtagaacaaaatgatacgatggatccctattttgctaaagataacacccaagtttatccactataatctgacgacataaattattaacatattt

SEQ ID NO: 96191 - DNA, 505 bp, Glycine max
  Clone ID: PAT_MRT3847_57872C.1
ggagaagtcgatgccgtctatgctgaggaatatcttcaatttttttcctgaacacagagagtgagagaagtggatggcattgtaagagttgcaggcagcatgagaaagcataatagataccataggtatgcagcgggattataggaagatgggtcgaaagggatcaataaacctcaccacatcctgctcatccatccaactatgccttttcaccactcggaaggatttcaaaagcccaattgctcccagagacaccaccatttctgtacattcccaaacctacaaaacacaatccaaattaataattcaatacatgtagttttgcacggtaaaactgtcgattgaagcacgcacctctcagccgtggatgcatttggcgggaaaaggaacgacgagttggacgccacgaccatctcggcggtgtgactgtgagtgtcgtcgcagccatcatcgccatcacttgataatggtcaaatcaacactcaaaagtcaaaacgcagcgttt

SEQ ID NO: 96192 - DNA, 369 bp, Glycine max
  Clone ID: PAT_MRT3847_57873C.1
ccagaggagacgcttagatcatgctgggaaagatggaggtctaaataacctacggggctgcgctgggggtctatcaccagtgtggttcccttctgataccaccaggttcactccaggcagagtggggcggaaggctgctgaggatatgggtcagttacagcagccctcacctcaaagggctggcctgcttctcagcctacattcatttgcaagcttcaatctctggaccatctggtgttcacaggtgttagagggttaggggttaggggctagttttggatttgattcataggtaggagggcttagattttaaggcacttctgaaagtcaatccctggacaaggcagtcatcacataagaacagctacc

SEQ ID NO: 96193 - DNA, 407 bp, Glycine max
  Clone ID: PAT_MRT3847_57874C.1
gttttgttttttgtttcttattttttttgacttgtcgggaaagacaaattatttaaaataaatttgtttcacaaatgttatttgacaactgctacacactggggttcaaaaagggggcacagccatttttaagttaaccccacccccgggttaatttatacattccccatttttcactacatcacttaggtaagctgaaaaataaaccctgcatatgttttccaagatatataaaggtaaaagtgggatatctatgtttgggggtaacaacggggggaacaaaataatccgcacccctttttttccaaaacccctttacaaactgccagatccaaacttaacatgaaatggatttaaaagttgtcgcaaaatttggttagaaaaaagggagtccataaatctgacaa

SEQ ID NO: 96194 - DNA, 308 bp, Glycine max
  unsure (1)..(308): unsure at all n locations
  Clone ID: PAT_MRT3847_57875C.1
gtaaattaacgcaagaanggcacnccgnngcggggngaggtcccgnacnggacccgacacncccggacnngcgagagaaagccangccagagacgaagaannccggcangcagacnggccaaacacncccancccaagancaangcgagagcnncnaaagcccggccccgcaaggggngaaancgangaccacccgangcaaacggaagaaacacagnacccgaaaaccnncnncnanaaagaagaccgccacccaggcaaaacaaggaaagnacaanncagcaagccncncnnnccacaaccaaggg

SEQ ID NO: 96195 - DNA, 559 bp, Glycine max
  Clone ID: PAT_MRT3847_57876C.1
cggccgccctgcttttttttgtttgtgtgcgagatggcgtaactgctaaaatcgatacggcatacggcttaaaattatggccgatttattgactgtgattaatagaaccgccattctattttactgcgttgaatgagtagcacctttagttccacatcccaatatttcctatttacactcacactttttgaaccaaacaaatcctccatctgtatgagaagcaatatctaatctttatgtatcgggaaaaaaagggactctccgtatgaacttattgacctattcactttgtgggggccactagacttcagtgtgcaacctttgagcgcgcatagccacttagaaggggaaacaaatttttgaggaaatcatcatttcgtgcgtgctgaaatttccagcaatgcatatgatgccaaagccccctctagcctcttggcttaataattgatccccacttgacccatggcactactatattgggccaattgtgctctgcagcatgcatggtatattatacttgctgcgctaaactggcaggaatggatgatacggtgggttc

SEQ ID NO: 96196 - DNA, 483 bp, Glycine max
  unsure (1)..(483): unsure at all n locations
  Clone ID: PAT_MRT3847_57877C.1
ggggggggaagattaaaaaagggggggagaacaaaagaattttaacaggcggggaagaaaaaaaaaaaaatttgcgcttgccttgggaccttgaagaaaaaattgtttttaaaaacccgtaaccttttcctccgggggggggaaaaatgggggaggaaaaggggcggcgctttttttctccccggggggggtaaaagggacactttttttgaggccgttttaaccccccggggaataacaaaccggggcccttccccttttgggcccagacacaaatgccgacattgccccgggggggctttccattttgttcccccaccctgtttgctctttgttttccccaaaacttttttttttttttcccccattgggggggccgtcgttacccccaaatcccnnggttttggtttccgtttgccgttgcccccacaacccccctccgttttttttatggggttttttttggggtttcccccccccccc

SEQ ID NO: 96197 - DNA, 467 bp, Glycine max
  Clone ID: PAT_MRT3847_57878C.1
ggagccatgaaactttaatgacctcatttttgacaaaaaacccccagggtggtctaactaatcattttccactgggcaaaagaaaaaagaaataaaggttcaaaatcttctttttaggtgggtcaacaacatttggggggcatcatccatgttttcactggcaacagcatcatcagttttatcagttatatcaatcttgcttggcaattcaccattggcaaggggacaatcgggggggccaatggtagatgcataaactttaattttactaaattttggccgccccagcagcccaattaaaacctcagcactttccatgtgattttgctcctgacaaagctcaaggaatgcaaacaagtttgggggctttggtctccaactttttgaaccaccggcaaccataaatgcttttttcaaggaggacagggcttaagaaatccttttatctgcaatggggcccttaaaaa

SEQ ID NO: 96198 - DNA, 328 bp, Glycine max
  Clone ID: PAT_MRT3847_57879C.1
gcacactacacggcgacagaaacagacccatgccgaacagatgtagccttgtcatgtcaagcttcaacagtgtggagcatctccggcgcactcatattatgaccactcacgcaccactgtgctcctcacgcttatgggtaaagctattttatctagtcaagctgtcacgctttcacatgaagctggtggttctgtatgaacaggattgcttcgtcgcctcatgaatcttgcatggtttcgaagcagggtgcttccggtcaccggagaccgctctcgcgcatgaacgcttcgcaagcgccggaatttggctcacccatgctgagcttga

SEQ ID NO: 96199 - DNA, 198 bp, Glycine max
  Clone ID: PAT_MRT3847_5787C.1
ggatcgagccaagaaggaggaatttgtctttttttgtgctaagtcggcacaactagtaatacgtgggactggtgcaggcatgactacatatggactggggagtgggacccgaaagaggcgctgctgaactataggctgaggagaaaaacgctgagaacacattttttgacgctattattgagaagatcgatactttcg

SEQ ID NO: 96200 - DNA, 803 bp, Glycine max
  Clone ID: PAT_MRT3847_57880C.1
gagagagagagagagagaactagtctcgagtttttttttttttttttttaaacccaaaaaaagttgacctattcttgttgcacagagacaaaaatgaatctcaacaatggggtttaataagtttaaatttccaaagtcattgggaaaacaaacaaaaaatgttacaacatacaatcaagggcagaaaggttgctctctctttttttgggaaatctttcaaacaaagtaaaatttgacagggaatcacttcattttgaacttgcataaaaaaatacccatggaaacgaatgatcatagctgctgcagtgcactcacagttgattgaactaaccatgatgcaaattgccaatagatcaaaactgcactttgaaaaaaacaaattacagggttttgaattgcagtcatagtcgcgatttcgttgcaatccttgatgttggggaagttgcagacaaatgtggctgatgtggctgcaattgtagtcacggaatctccaaaaccttgatgttgtggccacaattgcgattgtggacagttttttaaaaccttgataaattagaaactcacaacacaaaggagaaaagtaaaatagaatggtaattggtaagtgtaattctcaaggcacagttgcacaacatatgcagctgctgaagaaggaagaccgaggctttcgcttctcttttcttttatgtgaagtagatgacactgcattctttgtgccaacatggttatgttgtatctgtggcatgtttagaagatgagcttcttcctcttctttcaagagtccaatgaatggagctcgagcc

SEQ ID NO: 96201 - DNA, 169 bp, Glycine max
  Clone ID: PAT_MRT3847_57881C.1
aggagcccccccttggcctggccttagcaccactccccttaattgcccttgcggccaaactttcgccattaaaagccgccacggctttatttttttttgtcttacaaaacattgggacaaaaccaatgccccgtgatcgacctgccttccttttaattactacccgggc

SEQ ID NO: 96202 - DNA, 338 bp, Glycine max
  Clone ID: PAT_MRT3847_57882C.1
ggataatgaaccatctttttcagattttttctgttagagccaccattccgggtgaggttttttaaaaatcgactagggatcctctgttccctcgtaaatggggtttccctccgtgaactattattcataaaatgcagggttacttcaactaatccgtccttaccgctcttatcaaaaaaagtcgcctgaattctcttgaaaaaaccccttttccttttgcgtttcaacccaagcttttttctcttcattctgctacttacccgactcgctttcatagtcccttaccgctactttttccctgtctccggcgccttacgtaaatgcacttcaaacaactc

SEQ ID NO: 96203 - DNA, 413 bp, Glycine max
  Clone ID: PAT_MRT3847_57883C.1
ctatcgtaatcgatcatactaaccaccggctcttatttaaatgtgcgggagcatgaccgctttgaaatcatttccaacgaccatgggaacagaaccacgccgtcttacgtctgattcactgtcaccgagcgtcttatcagtgatgcagcctagaatcaagtctacatgaaccccatcaacaccatcttctatgccaataggatgattggtcgtagattcagtgattcctctgatcatagtgatatcaaattgtagcctttcaaggtcattcctgttgctgctgacaatccaatgatcgtggataactacaatgatgtaaagaagctatttgtcgcagaagaaatctctttcatgctgctcatcaagattcgtgagattgcttaagcttacctatgcttcacaattaagaatgc

SEQ ID NO: 96204 - DNA, 227 bp, Glycine max
  Clone ID: PAT_MRT3847_57884C.1
agcgacggaccacaaaaaaataccaacaataccaaaccgaacaaaaaaccacgcaccaccccaaaaaggtgccgtggtctcacacgacttaagtccatcaatctccgtacgtaatcctacactctcctcacagcgctattcaaacctaacctatcgcttgcccccccataatcaccacatccgcaaaatttccatgccatttaatcccaactcctccctaatatacc

SEQ ID NO: 96205 - DNA, 2528 bp, Glycine max
  Clone ID: PAT_MRT3847_57885C.1
acgtctcagcaataatatcttgaacactttaaatggtcccataccgactactttgggcaaacttgcaaaactacgtttcctgcgtctcaataataatagcttgacaggaggcatacccatatctttgacaaatgtttcttcactgcaagttcttgatctctcaaataaccatctaaaaggggaaatcccagtgaatggttcattttcattatttacccccatcagttatcaaaacaatcttggcttgatacaaccaaaatacactccatctccagtttctccaacaccaccaccagcttcttcaggtaacagtaatactggagctattgctggaggagttgctgctggtgctgctctgttgtttgcagcccctgcaattgcacttgcttattggcgaagaaggaaacctcaggatcatttctttgatgttcctgctgaggaggatcctgaagttcaccttggtcagcttaaaaggttttctctgcgtgagttgcaagttgcaacagataactttagtaacaaacacattctgggtagaggtggatttggaaaggtttataaaggacgcttagctgacggatctcttgtagcagtaaaaagacttaaagaggaacgcacgcagggtggagagctgcaatttcaaactgaagtggaaatgatcagcatggctgtgcatcgtaatttgcttcggcttcgtggtttttgtatgacacctactgagcggtggcttgtgtatccttacatggctttcggatgtgtagcatcatgtttacgagaacgtcaacaatcccaaccgccacttggctggccagaacggaagcgtattgcactgggatctgcaagggggcttgcttatttgcatgatcattgtgaccctaagattattcaccgtgatgtcaaagcagcaaatatattgttggacgaggaatttgaagcagttgttggagattttggtttagctaaacttatggattataaagatactcatgtcactactgctgtacgtggaacaattggacatatagcaccagagtacctctcaactggaaagtcttcagagaagactgatgtttttggatatggtgtgatgcttcttgaactaataactggacaaagggcttttgatctagctcgacttgccaatgatgatgatgtcatgttgctcgattgggttaaaggacttctcaaagacaggaaattggaaacactggtagatgcagatttacagggcagctataatgatgaggaggtagagcagttaatccaagtggccttactatgcacacaaggatctcctgtggaaagacctaagatgtctgaggtggtcagaatgctagaaggtgatggtttggctgagaaatgggagcaatggcagaaagacgaaacattccggcaagacttcaataacaacatacatcaccctaatgcaaattggatagtagattcaacttcccatatccaggcagatgaactatcaggtcctagatgatccctttaacattctatggacaagagtgaatacacgatcttgcctgacaaggctttctgttggaaagagatatacttctgattttgattttgtgcatataattttcgtcccctctaccttttctcttgttttcatccttttgaaattatcttctgtgctcagattacgtgcccattggtcaggttgtgattattaaagaaagaagattgtaatttctattgggctgtcaagttacaggatgaagtgtatgttacaagcaacttttgtcatagtacgtatgaggaattagtatagagcttttatggaaataaatgcaattctattggcgattacagtttattattatatcttttgtagttatttctggaggtttggaaatcaatactatttgagtcatgcctttttaaatactgagacgtttagcaaaaagagaaacgctttgttgaaactaatcgcttctctcacagctgaaaaatgttggtttggtgcaccttataagttagtgagccattattcagtggtgaataagtcttgtgtcttaacatttccaagtctttgatcactgttgcttcagtgcatgttcaacaagtgtttgtcctacattttgaataggtttttcatgaactgtagattctgggttatagtagtctcatatttttttacgtgtaacctggcacaggtaaatggtaattaagggttgtggaatatagacatagtgatttatttatgaaactaacagttaaaaggaaacaaaaaaaaaaaaaaaaaaaaaaaaaaaaaaaaaaaaaaaaaaaaaaaaaaaaaaaaaaaaaaaaaaaaaaaaaaaaaaaaaaaaaaaaaaaaaggggggggcctttttaaagaatccaattttacttacccgggcttgcaaggtaaaagtttttttatagggcccccaaaattaattcccttgcccgcgttttaaaaacgctggaaatgggaaaaaccttggggtaaccaaattaaatccctttgaaaaaaatccccttttcccaagttggggaaaaaccaaaaaggc

SEQ ID NO: 96206 - DNA, 810 bp, Glycine max
  Clone ID: PAT_MRT3847_57886C.1
gccacctccgcctggtggtgtggactgtgttataatacgagaaaacggataacagcatccgataggtagagaagcaagcaaaccattaaccacaacacatggcgctatgttcctcactctcacttgtctctcccatcaaactcacttccaagtccttcttatctccaacaccagtcagttggcatggcatcttgataaagaataacacctcaacaagattcttgctgaaagctggttttaatgagattgaacctgacctcagtgaagatcctagagaccaatttgccaccaatggcgttgacgctgatgattttgtgtatggaatatatgatgaccaccacacttaccatgaaggagaacagaaaggaacattttggggctcaattaaagaagagatggcagaagcagaaccccccacaggattccaggggcttatttcatggctcttcccaccagccattgctcttggggtgtacttcaatgttccgggggagtacttatacattggagcaggcatatttacaatcatattttgcattattgagatggataaacctgataaaccccatcactttgaacctcacatatacaatatggaaaggggagctcgagacaagttgataaatgactataatacaatgagcatatgggaattcaatgaaaaatatggggacctatgggatactactattcctatcaagaaggatgacattatgaagagataattgtataaagttcatgacttttatatgacaattcttaaatatagtgatttgaatttgtaaaaaaaaaaaaaaaaaactcgctcgt

SEQ ID NO: 96207 - DNA, 482 bp, Glycine max
  Clone ID: PAT_MRT3847_57887C.1
tttttttttttttttttttttttttttttttttttttttttttttttttttttttttttttttttttttttttttttttttttaaaaaaccaaaatttatataaaaacccaaaacccccacccccccaaaaaaggggaaagccttgaaagatataaaaaattaattggttttttaacaaacaccccggggggattggaaaaaaagcttttacaaactggaaaacaaaccctacccttaaaggaaaacggccccaattaaaatttcacattccaaaaaaggccttttttgccccggtagaggacccagggggaaacactttaaaaaaattgaaccccactgttttaaaaaatggcccgctttggccaaaaaaaaaaagatccccttttttaacacggaaacaaggggaggtatgggcaggaatattggaatggcgcttttaaaatctcggggatttttaaaaaaaagaaaaaaatccccccct

SEQ ID NO: 96208 - DNA, 150 bp, Glycine max
  unsure (1)..(150): unsure at all n locations
  Clone ID: PAT_MRT3847_57888C.1
gcatnacacgcgtacgtaagctcggaattnggctcgaggagcccctggcttgctaagctcccctctgcnagggtgggtccaacctatcttgttacctctggcagtgcntgataattgcntctctntctntgtcangntcnntctcncant

SEQ ID NO: 96209 - DNA, 1148 bp, Glycine max
  Clone ID: PAT_MRT3847_57889C.1
cttggggtcagtcggctgtgcctgcgattgccaccgcgtctggcgacccctgatgctgatcttatggtcccatttcagctggctgcattaaaaactattggtgaagaagacaaatatttctctaaagtgtccttgcggatgccatcttttggaatcacagttaaaccttccctattagatttaccaaagccaacctcttctgtagatggtagctctggtgcttcactttcaaatgctttgtcagaaatgtcagtagatggttgggatggtattgctcttgagtattctgttgattggcctttgcatttgttctttactcaagaagtcctctcggtgttccggcgtgtatgcctctgcttactaccgctcgcacgaacacaaatggagttggagaaattatgggcatctgtaatgcaccaatatcatagtgattttcccaaacaccgaaatgatcaagaaaagtgctcagaagcacagcagaaacgacagcggtttcgaccgatgtggcgtgttagagaacatatggcattcttggtcagaaatctccaattttatattcaggttgatgtgatagagtctcaatggaatattttgcaatctcatattcaagagtctcatgattttacagaacttgtgggctttcatcaagagtatctgtcagccttaatttcacaaactttcttggacattggttctgtgtcaaggatactggatagtatcatgaagctttgcctgcaattttgctggaatattgagaaccaagataactgttcaaatacttctgaactggagcatatagctgaggaattcaacaagaaatcaaattccttgtacactatactgcgcagcagcaggcttgctggaagtcagcgggcaccctttttgagacgttttctcttgcggttaaatctgaattccttctttgaggcaactgctgcaaggggggttctgaatgttgttaggccacgccctacacttcctgtttaactttagatcattagatttgctggttcagccttcacttgggatctgaaatttctactttttttttttggttaaatctggttctttttgttttctatcctcttcattgtctaaaaaatcaattttggttgtgattaaaattcaattttgtttttgtaaaaacc

SEQ ID NO: 96210 - DNA, 1588 bp, Glycine max
  Clone ID: PAT_MRT3847_5788C.1
attcttcaacaggatctcagcatcttcttcatggcatacagatgtaataagtgccattatgagctgctctagactctcagctgcaggaaatacagaaatgacatcctcacttaaatgttctgcactatccataaagggtttcagtctgtggccataaagtttgtgaactaatgatgcagatacaacagttgcttgaggatgcctctgagataaaataggcaagaaagatgctgattccttttttaggaacttcttgagttcttctgcaagcaatgccaagggatgctcatgtgacatatctactctgtcaacaacttgcactgtccttgaaaatgcattcttaattgatgatgatatatatatctctatctgatcacgatcactaatcggcaaggactgtgtgctagtttctggttcttccagtagaagcctcctggtaatcattgcaactgctacaatcttttccatagttgctgaaccctcattgaaatgcagatggtaatctccaagctgcttgtcagtccatctctgaattggtgttaagaaagactgtaagaaagacatatctcgttcgccttcaaccttagaacgcaagcttttcaagtgcaacctctcttgttggcctctttgttccatcagtggtattttatttaattgctcaagtgcatgcagcaaaaccctgtgctcccttgtgataacatactgacgaaacaaaacccatgcatagcaggtgtgatggattgtctccgtgattcctaaaactctccaagtcgacttcaaaagttccagaatttcttctacttcctctgtcagctttccttcatctagcatgtcaaatacacttaaaagcaatttctcatatagtctaacatttaagtggtaaccatctgcccaatggcatatttcaccagttaagtcaccccgagctggcctctcagcaagtggaatggcaatctcccttagggatctcaagcattctgtcctttgaagttcaccagttgaagatgggagaaactctgccggacgcgtgggtcgaaaccgggaattcaactcatttgtcttgcgtccagattcaccaaatccaacggcagggtgattaacaagcccctcctctaaaacttttaactgcctcttttgccaacgtataaaagccttcttatcagaaaattctgaacgtgaaatacagcaaagcaactccaaaggaatcaatagagtatccatccttttccccacctttcccaccagagcatttagcaagccttgtcttgttctgatatccattgactcagatatctccatttgaacacgcatggtttctaacaagccaactaatccaggagcattctgagactgggatacaacacttccacttttgctgcgcccaagcttcctgatcaagctggattttttatccttctttttttcttttgatgggacaatcagaccccctgtagctccagcacaacccaagatgatctcatatgctgtttcacgaagatcatcatctgagatgcctgtggagaaagaaggcaatttcactgcaagatcagaagcatcattaagagtccttttagaactgaagccgaaa

SEQ ID NO: 96211 - DNA, 401 bp, Glycine max
  Clone ID: PAT_MRT3847_57890C.1
ccctctccatccactctttcgcccactcttacttttattggcacaaatcactgacttgcccaacgtacatctggatcaagaatacctgcttggccccatacccatcgctaccctcaatgacgggggatacggccccaaattaccctaattctataccccaaacttccatagataaaattttattctaaaattttaaactactctgacatcactttgctaataggcggaccgcttgcaaacatacaacactacctcatggtcgattgtattttttaaactgaacaagaaaccctgcttaaagctctacgaaacaccataacctgtatctgtttccatccaatcgcccaactagaagggtaccctagctctcaaaatgacacaaccttatcatgctgtttacc

SEQ ID NO: 96212 - DNA, 2533 bp, Glycine max
  Clone ID: PAT_MRT3847_57891C.1
tttgtacttgaactatcgggtcttcttcttggctctctctgtttagggtacgcaacctctgtctccttttcctccatactctctttttcttaattgtttttctttcaacttcatatcataattgtgttcatatgctaacttttcatactttttcgtcacttttctatagtttatttggtcaaattaatgggaatatccttatatgctcttgttttgaattttgttgtgcaaactgtgtctgagttttttatttcttggaggactaggagcacttgttcgtctacactctacatctaaatttctcttttcattatttctgattgcataattatactgtcttgtatgtgaattttctttacaatctgcatctgcttaatatattttttaatcaatggctagttaaagattttgttgacagatcgatatggattgaagactcggcatttcggtttggtttttttagggttccatcccatctattcgactctattcagccttgaacttgaactatcgtgtcttcttggctttctctgttcaggatcaacatggatattgtatcacgagctttgctatttccattggcaatacttgtgatgatattaggcacaccatactctagtgcttctggaaagagtgaaagtaatgtgaaaacagctgtttttctgtctcctaagtttgaacttggaccgggatcggttgcaaataaatatgattatgatattgattttccaagaggtcatatagcacttaagagtttcaatgcagaggtagttgatgaagcagggaaccctgtgcctcttcatgaaacttatctccaccactgggttgttggaagatactatcaacctaaatatgtgacgacacacacaaactatgatggacataggatacttcacaactctgaccatatatttgtgaggaacagcggcttatgccagagagatactcttggacaatactatggccttggatctgagacacgaggaacagctacggatgttcctgatccttttgtggatagctgtaggtgatcctgcagaaattccagaaggatatgaggagaagtggatggttaatatccacgccattgataccctgcggtgtggtggataggacggggttcactgagtggtgtgagtatcctttacagtgttataaaagaagcacatggtgagcctctaagttcagtactataaaggaggttattattgattgctatgatcaaacccagtgcaggttgagggaaggctttgatggcccaaagaggagcctctacctaagatacatagtggaatggattgaatggaacaagtacattcagcctgtaaagatttatatacttgatgtcactgatactttaaaaatatcagatgattctagtggaatgatccctgagcatgattgcaagaccgagtatgaagttgaatcttgcagcactggccaaaagaatggtaatggctgtcttgatgtgaagagaacaagcctcccaatgcaaaagggtggttatgtcatatatggtgttgctcatcagcattcaggtgccactggatcaactctctatgcacaggatggaagggttatatgttcttcaataccaaggtatggaaagggaaaggaaggcaggaaatgaagtagactacattgtaggaatgagcacatgttatcctcaaccaggttctgtaaagataattgatggtgaaactataactctagagtctaactacagcagcagccgtggccacactggagtaatggggcttttctacctattggtggcagaacagcttccacaccaacacttcagatattcttctcgttcttcattttttatgaatataaatagtataattcattgatagataagttgtgagatgcaaatataagttgagtgtcatatcgatggtatcacagtatgtatcacggttaaaagaaatacagaaatacatatcgatggaacatatacttctcatattcggcagcaataggacaacacacgcaagaaccggcaaagagcatattttcaagtttaaggattgtagtaatgtgattatcaattatttgtattggtgagggtttgtaatgtttgtcttaaaccagtcttgcttattatggttgtgtgatatgtaatactatatatatcatgtttgttgtaaataaagtggtcttatatgataatatggatatgtgatatgtaatatgattgttgtacataaaatagtctttgccttggagactgtttggcaatgaatattactgaaataaattaagagtttatttccataagactgtcaataaaatttagtgaaatgaattagaaaaatcttatatataagattataagctactactttacagtaatcttcataataatgtgaatgtcaaatagatactattgagaaggggtcccatgttctttaaatgcatttcttattgggccatgtgttatgtaatatgtttgttgtacataaagtaattttatatctttgaagttccttttttatatcatagggatgatttgattcataattctcct

SEQ ID NO: 96213 - DNA, 2065 bp, Glycine max
  Clone ID: PAT_MRT3847_57892C.1
aattcggctcggctcgaactcagcacaacacaagcacatgccacagcatgctttacttcctgtgctaaacaaccttatttttatgagacttgaggttgcgtgcattgtgctctaattccgttcctgttttgtgttcttgggttggttggtttggccaaggggaatctctctggtttttatcaccactctgtctctctcttttttttttttttttcctctctcctttaaaagaggaaagacagagagaaagagaaagagagcaggagaacccactaagcgtgcaaataaaagacttaaagcaaagctaagattacaatcccatgctattatagctccctccacctttgctttgccttgcttttcggtgcccaaaaccttaaaaaccttttaagttttccattctggctgttcgctcggactctcacacttgtcgcaaagaagcccttgtttctcacaattacaagatgtggtattttgcggatttaagctgcgactagacctgtaacttgggggttctagagtttgtttctgtttcttgcatatatatatatatatatatatatatatatatttggtgagtgatatttgagctaggaggaatcttccttttgagtgtggtgtgaacaaaagatgaatgaaaggtcaagagacgaggcatctcctcagctgttagatttgatctcaaacgagagagagtggcagatgaacaagagaaacgaaggaaagtcctcagaagaaagaaaactcgaactcaggcttggtccacctggtgaagactggtctctgggtggtaaaatgaagaacaacaacacagaaagagaagatcaatctcttctctctcttggttgcttctctcctaacattaacagtaatgcgttccaaagcaaggcctctcatccatggccaaactaccaccaccatggccagggtaacaacaaaaaagcctcttcttcatcatttcttcagttcccatcatcaacccaacctgtgatgatgggaaaagatgcttcttgccctaaggtggtggtagagttgcagcagaatggtggtgatggcaaagtgttctctccctcttctgcaaatacagctgtgtcccagcctaacacctctcagaaaagaactgctcctgctccagtggtggggtggcccccaattcgttcattcaggaagaacctttcaagcagcagcagtgcttctaagccaccaccacctcctgagtctcaggctgagcagcagcacaacaaggttgctggtaaaaaacctgttgacaactatgctaataataaaggtttgtttgtcaagatcaacatggatggtgttccaatagggagaaaagtggacctcaatgcttacgacagctatgaaaacctctcttctgctgtggacgagctattcagaggtcttcttgctgctcaaagagattcctctgctggtggagttcacaacaagcaggaggaagagaaagcaattacggggttattggatggaagtggagagtatactcttgtttatgaggataatgaaggagacaggatgcttgttggggatgtgccatggcacatgtttgtatcaacagtgaagaggctacgagtgttgaagagttctgagctttctgcttttacccttgggagtaagcaagacaagataccccttgactcagcaatgaaatgaacagcggtttgaggttttgatcacctgctgaaaacttgaagactcttcctaatttgacgttttggttctattgtctgatgaaaagaacatggaatgaagctagttgcgtacattacaactaagtaatgtgatgaatgtgtcttttttttttttttttctaaatgaagatttgaaatgtttatgggttttgtataaatagggaagggaaacttcacggatgtgtgtacttatgatttactgttgagtagccattaacttgttttggtttgtattttgaagtcccttttgtaggtggggtttttcagggtcttaataattttcacatcgtcatggcaaagagcgaaatttgggacctgtaaaaatatggctttacttgctggaatatttttctccc

SEQ ID NO: 96214 - DNA, 1747 bp, Glycine max
  unsure (1)..(1747): unsure at all n locations
  Clone ID: PAT_MRT3847_57893C.1
ggactggtgatccgtgtgtttcttaaagttataactcataagactcataaccatgactaatttttagttgcataataagtgataggtacagggattcatgtgaggatacactgttatacacaagtgatagtggaaaatgagacttagaagattgtaaaactgtatatagtttaggaatagtggtgtccaaatttgataattatgcagtagggtaagatgcaatcatagctatgtcacagagtccttcctcagattttacagctgctttacttcctgttctaaacaacctaacggaatttttatgagaacccacgcgtccggcattgtgctctaattccgttcctgttttgtgttcttgggttggttggccaaggggaatctctctggtttttatcacacctctgtctcttttttttttaacctctctccttaaaaagaggaaagacatagatagagagagatagagagagaaagagagcaggagaacccactaagcgtgcaaataaaagacttaaagcaaagctaagattacaatcccatgctattatagctccctccacctttgctttgcttttcgggtgtgtttttattttttattttctcttcctttctctcttggtggggtttccattgagctgtgataatacttgtgtgttcctccttctgctacctcagtctatccaacgttttgcagtggccaaaaccttaaaacccttttatttttaaggtttcctctgtaggtccttcttgctgttcgctcagactctcgcacttgttgcaaggaagcccttgtttctcacaactacaagatgtggtatttatcggatttaagctgcggttagactttgggggattctagagtttgtttttgtttcttgcatacatatatttggtgagtgatatttcagcaaggaggaatcttcctttggagcgtggtgtgaacagaagatggatgaaaggtcaagaaacgaggcatctcctcagctgttagatttgatctcaaacgagagagagtggcagatgaacaagagaaacgaaggaaaatcctcagaagaaagaaagcttgaactgaggcttggtccacctggtgaagactggtctctgggcggtaaaatgaagaacacagaaagagaagaatctcttctctctcttggttgcttctctcctaacaatgggttccagagcaaggcttctccatggccaaactaccaccaccaccaccagggtaacaacaacaaagcctcttcttcatcatttcttcagtgccctaaggttgtggtagagttgcagaatggtggtgatggcaaagtattctctccctcttctgcaaatacagctgtgtcccagcccaacacctctcagaaaagaactgctcctgctccagtggtggggtggcccccaattcgttccttcaggaagaaccttgcaagcagcagcagtgcttctaagccacctcctgagtctcaggctgagcagcacaacaaggttgctggtaaaaaacctgttgacaactatgctaataataaaggtttgtttgtcaagatcaacatggatggtgttcctatagggagaaaagtggacctcaatgcctatgacagctatgaaaatctctcttccgccgtggacgagctattcagaggtcttcttgctgctcaaagagattcctctgctggtggagttcacaacaagcangaggaagagaaagcaattacggngttattggatggaagtggagagtatactcttg

SEQ ID NO: 96215 - DNA, 1119 bp, Glycine max
  Clone ID: PAT_MRT3847_57894C.1
ccacgcgtccgcagcactcagcacaacacaagcacaagccacagcatgctttacttcctgtgctaaacaaccttatttttatgagacttgaggttgcgtgcattgtgctctaattccgttcctgttttgtgttcttgggttggttggtttggccaaggggaatctctctggtttttatcaccactctgtctctctcttttttttttttttttcctctctcctttaaaagaggaaagacagagagaaagagaaagagagcaggagaacccactaagcgtgcaaataaaagacttaaagcaaagctaagattacaatcccatgctattatagctccctccacctttgctttgccttgcttttcgggtgtgtatttctcttccttccttcctttctctcttggtggggtttacgttgagctgtgataatacttgcgcgttcctccttctgctaccaacgttttgcagtgcccaaaaccttaaaaaccttttaagttttccattctggctgttcgctcggactctcacacttgtcgcaaagaagcccttgtttctcacaattacaagatgtggtattttgcggatttaagctgcgactagacctgtaacttgggggttctagagtttgtttctgtttcttgcatatatatatatatatatatatatatatatatttggtgagtgatatttgagctaggaggaatcttccttttgagtgtggtgtgaacaaaagatgaatgaaaggtcaagagacgaggcatctcctcagctgttagatttgatctcaaacgagagagagtggcagatgaacaagagaaacgaaggaaagtcctcagaagaaagaaaactcgaactcaggcttggtccacctggtgaagactggtctctgggtggtaaaatgaagaacaacaacacagaaagagaagatcaatctcttctctctcttggttgcttctctcctaacattaacagtaatgcgttccaaagcaaggcctctcatccatggccaaactaccaccaccatggccagggtaacaacaaaaaagccctcttcttcatcatttcttcagttcccatcatcaacccaacctgtgatgatggggaaaagatgcttcttgcccta

SEQ ID NO: 96216 - DNA, 513 bp, Glycine max
  Clone ID: PAT_MRT3847_57895C.1
ttcctcgcgtccgggacaagataccacttgactcagcaatgaaatgaacatgtgccatggcacatgtttgtatcaacagtgaagaggctacgagtgttgaagagttctgagctttctgcttttacccttggcagtaagcaggacaagataccacttgactcagcaatgaaacggacgcgtgggcggggcggtttgaggttttgatcacctgctgaaaacttgaagactcttcctaatttgacgttttggttctattgtctgatgaaaagaacatggaatgaagctagttgcgtacattacaactaagtaatgtgatgaatgtgtcttttttttttttttttttctaaatgaagatttgaaatgcctgtagacagatgcaaaggacctgaaaatttctgtcaactttttacttaagttgcttgattcgcactttccctctcaactctcggtgatatgaatctaaatttcattaaccaaaaaacttaccaccacactaacaaaaaaaaggggggg

SEQ ID NO: 96217 - DNA, 275 bp, Glycine max
  unsure (1)..(275): unsure at all n locations
  Clone ID: PAT_MRT3847_57896C.1
ctattattatgtgcaaggtgttgatgtgattattgtatngtntgtgcttttcatgcttgtggctacgttgtgcttttcatacttttatatatgaatgattaatattataagttggtgatcagatgactactgtgtatatttntctttcaatatattcaccattaaaatgtgatttaatagtctatatntatagtttttatttatnataataatacgtattctccaccggagccctctctatatgtacatatcnaataagaactttttttaatgtg

SEQ ID NO: 96218 - DNA, 358 bp, Glycine max
  Clone ID: PAT_MRT3847_57897C.1
ctcgagccgcttctctccccagggaaatgaagatgggacaggaaagaatcgaggctgacataagactggtaacccttccttttcccccaatccctacttgcgtacaatttgtcctctggtaatgtgccaataacgctgtcatcagagaatcagattacgaatgaatgctatgctgctaatctccatgtgccagccttacatcaaatactgcaagctcgtcacactgagtccaatattggagaatgcaacatgccttccaatggttatccccttactaaattggcatttagaccatggcgaacttctacgacactggactatcagcctaaacttatggctactgtcatactatcttctg

SEQ ID NO: 96219 - DNA, 271 bp, Glycine max
  Clone ID: PAT_MRT3847_57898C.1
cggctgcgagaagacgacagaaggggatgaggtttatacacaagttactttgcttcctcaagctgagttggaagggatgtatttagagggcaaagaacttgaggaattgggagcagaagaggagggggatgatagatcaccaactaaatcaacccctcacatgttctgcaaaacactaactgcctctgataccagcacacatgggggcttttctgttcctcgccgagctgctgaagactgttttcctcctttggattataagcagcagagg

SEQ ID NO: 96220 - DNA, 354 bp, Glycine max
  Clone ID: PAT_MRT3847_57899C.1
aattcggctcgagagctaaggagtgcgccggacaggaaaatgaacactagctcaagctgtgtatagtgaatggataatcggtgagaagaccaggggttggtgactggtaagatatgtggaggaaacctaatactaacaactattaaaacgcctacaagaaaagctctttttaaaaatactcctggcgaggaacatcagctgaacgtgttaagcacacggaattgcaatcatagagcctaggctcacggtaaagaagatactcttgatactagatgatggctacaaacgcgagccatcacaagcaattgctggaagacctggatggcctgactcctgctgcagaatgatcatcac

SEQ ID NO: 96221 - DNA, 500 bp, Glycine max
  Clone ID: PAT_MRT3847_5789C.1
gtggaagccaataattctgggcgtataatacctcgtgaaggagttgacacagagtatgactcagcctgtaaggcggttaaagagattgagtccagtttattgaagcatcttaaggaacaaatgaaactacttggaagcacatcaattacttatgtcaatgttggaaaggatacatacctattggaagttccagaaaatttgtctaagaatattcctcgagattatgaactgcgctcatccagaaaaggcttctttagatactggtctccagatattaaagttttcttaagagagctctcccatgctgaatctgaaaaggagtccttgttgaaaagtacattgcagagattaattgggcgtttttgtgaacatcacgctaagtggaagcagttggtgtctacaactgcagaactggatgtcttgatcagtttagcaattgctggtgactactatgaaggaccaacatgtagacctatttttgtaggcacattatgtacaaa

SEQ ID NO: 96222 - DNA, 393 bp, Glycine max
  Clone ID: PAT_MRT3847_578C.1
ggacgttatatctgccagttgcctagatgacactctcacgtctcatctgcggcgctctactgtctatgatttccgtccactaatggtagtatagacctctacttctcgacagtatattcataatgactcagcaatctttctcattgtctctgttcatctaccttcagaatccttgtcaagttcgtctcattctgtctaaactcccatatattgtccctatcttgtcttcaaaagtgcagctgagctgcattggatatcgtgttcgcataaaaagttgtagtcataattgaacaattagacccggtatagaatagatcaagagcacaaaatctcgtgtcaatgatactgtgtttcatgccaacttcaagtgtcttgctgatcaaataaacctga

SEQ ID NO: 96223 - DNA, 596 bp, Glycine max
  Clone ID: PAT_MRT3847_57900C.1
ctcggaattcggctcgagcacatggtttcttcttccttagcagaattttgattttgttttatattttttcttttggatcatcttgtgaaatttcttagcttacctaagcctgaaacttctgcttcctgagttgtatatataacctgtgcttctgatagtgtgtaataacttcaaaggtctaggcctagcatggaaaacaaccttaaccgtgaaacagaagggcatggcttgcctaaaattccatcactagttcaacatatatcatcaaatgatgaaggaaactttgacaatggtgacttgaaaaatctaagctcatctttcaaagagaatgaaacaatcttagcaggaagccaaggtgatgaacatgcagccattaatcatcggaataagcattcggtatctatcaacataccattctcttgtgttgagttttagctgcataacaccgtttttgttctctaaagtggcttttttgatttctcttctctttcaactactacagacttttcgccaccattaccaggacaatcaatgccaaatggcagtctgcactcagagccagcatgcggtgtccattttaacaatcaagacagcgt

SEQ ID NO: 96224 - DNA, 370 bp, Glycine max
  unsure (1)..(370): unsure at all n locations
  Clone ID: PAT_MRT3847_57901C.1
acgagctgaaaccaccgtcttgcaggttccattctcatacccattaaaccatttcaacgatttttctggaaactcaagtttgtggttgaagaaatgttgattggtcacgcagatcacatatcggagtcaagatcattgaaggatcagatacttgcctactctgggtctgaattaagtgatgacgaacaggaaggttgcttggaacagatactgtactcagcatcctttgaagagcatgcaagaaattgtgttaaatatgacacggtcatatggcttgctatatcattacttctggttttagcttggggaattggccttcttatgttgctttacctgcccatcaggagatatgtgcttcaaaaggatttgn

SEQ ID NO: 96225 - DNA, 393 bp, Glycine max
  Clone ID: PAT_MRT3847_57902C.1
actaacgacaatgccatattataacagatattagaagcggaagcatcaatccaatacaatgtgtaactacgagccattaatacatgatcagtttcatgtaggcaaaacatgcgcttcaggccaaaatagagacctgtgatccacaagacctactgcttcatgttatacaccatgcgaacagaactaggaccttatttaatactacagttgcacttatctttaatcatgaggcatgaatactggactcagcaaatcccaattgactctgaaggacggcatggtagtagtcggcaacgaccatacggtgatgcgaattacgccgcactgggatgcgatgcacgtgcagcaacagctcacgggaggttacccaatccatctaaaggccgccatttt

SEQ ID NO: 96226 - DNA, 264 bp, Glycine max
  Clone ID: PAT_MRT3847_57903C.1
cgctcccgtggatctcggctctgaactggaatctcttgctactgaggcacactattctaaatccgccagcttattatggatagcctgggttgccattggacgttagcgatacataaattaagtgctattctcctcactgtctaatgtccggtagggaaacaaggcagcgccctttacttaattgaatgatccactgacgcggggagaggtgaattacttgttggccgcctgggtatcacacttgttcagcacaggcatgggcaa

SEQ ID NO: 96227 - DNA, 309 bp, Glycine max
  Clone ID: PAT_MRT3847_57904C.1
aatagggcaaaacgggtcgcaaaaaccttttaatcaacctaaacccaacaacaaaaaccctaaaaaaaaacacaagggatcactggcaattttttttttaaaagggtatccgaaacaaaacaacccaattaaaaaacgggttttaaacccaagcggggaaaaaaacagcgccaccggcttccttaatttttttttgggggatctgggaaaaaagctgggccttaacaacaaaagggtgatttgggggcaaaacaccttttccgaggaccttgaagaacccgggcggggggacgccaattaaaggggcag

SEQ ID NO: 96228 - DNA, 177 bp, Glycine max
  Clone ID: PAT_MRT3847_57905C.1
ctatacagggtgggaaaattaggaaaggacccgtttgatccccccctaaggacatccattcccagttctatattgaaattagaaattttgcttcaacgccatgaaatcattggaaaaaagagcctcccttccccatttaacctttaggggatggcacaaccccctaaaacgccaaaa

SEQ ID NO: 96229 - DNA, 508 bp, Glycine max
  Clone ID: PAT_MRT3847_57906C.1
cgccgccgcggcgcgggacccttagcgggcgcgtttttttttttttttttttttttttttttgtggatgacaaacaggcgcaaattgtaagaaacaaccgctacaagacattaataacaattgcgccatccagaagcaaacgactttcagcccccggacgcattatgtcaaccacgaaatcagggtccggaggtatagctccaactagcatcatgaacctgacgatagcctgaacctgaattatcaccgacccgaagatcgagctgccacatgatccataagaacttgttgaactgcatcgacaaagattgatatattctgtgcgaacaggggtatctaaagaattggccaatttttcaactgtgcaatgaaaacctaaggaaggtctattcacagcatctgatccctttatgcatatcagctgcaatggcgaaccaaataggggccaaccatgtgacaactttatgtacgcataaattcctccacccttttgagccacaatagtctt

SEQ ID NO: 96230 - DNA, 1642 bp, Glycine max
  Clone ID: PAT_MRT3847_57907C.1
tttttcttgaatgaggcaaatcctgagttcgtcgtgagtcagagctagctaccttcacttcactcactctttcactttgtgtttcagattcagcagcaactctgcccgcatgcgtgcgtgaggtaagatgaaaactacttcaaatcaaggttgttgtacacacatatgtaaaatatcttgaattcgaagtgtgaaggatttgctgagtttcccaaagacatgtggtcagcctgttttcggcagaaatgaagaactcccagagcacacaagaattacagtccccggctcaagcatctcgtgaatcacagagtgaacaaccaaaaaatcacactactgatgctcctgttactgattcggtttcagcatctgcttcaagcaatgatagcaaaaaaatttcacggcaggatatagatcttgtacaaaatttaatagaaaggtgcctacaattatatatgaataaagatgaagtggtcaaaacactcttcgctcgggcaaagatagatcctggatttacaactctgtatggcagaagctggaagaggagaacactgatttctttagggcctactatatcaggctaaaattaaaaaggcaaatacttttgttcaatcatttgcttgagcatcagtatcatatgatgaagtatcccttgcctacaaagattccactggctcccatacagaatggagtccatccaatgcctgtcaacaacctacctatgggataccctgtgctacagaagtcttccattcctgcagctggtcaaccacatcttgactccatgggtagtggtatatcaagttgtcatgtagttaatggagtcctggcatcaagcaactcccatcccattagaatttccgggaatggtatggtgatggaccacagtgctcctgttattccaccaaatagtgcgatgtcatccttgtcagaaatgccagtgagtccgacatcagtagcatccaatggtcatttccccttcactccatcagaaatatcaggaatgggcaccgatacatctatccttgatacggcattcacatctgatgtggcaagctccgtaggacttcaacttgcaccggacaatggcacggggatttccagatccctggatcaaattcagtggaattttagtctatctgacttaacagcagatttgtcaaacttgggagatctaggagctctaggaaactatcctggttcaccatttatgcagtctgattcagatattttgcttgaatcatcggatcaaaaggacatagtggatgacttctttgctaatacagagcccccaggttctccgtcagacgaggagaaatcttaagtgaagttgtagcaagttatgtttcagattaaaatggttaggttgggtaagattaggattaataaatgtgtcgtccagattgctcggcgtacgagccgacaaatgtagctagcctgatgtataaaatcagggcgaagatggaaaacgtcaattgttagctgaagtagtaatcttgagttttatttttcagagaaagtgctatttggaaatgttaggtggtatggtaagaatgtgtaattgatgcatttggatatatattggttggttcacattacactactaatgagaactattcttcatgcagaataaaaaaaaaaaaaa

SEQ ID NO: 96231 - DNA, 962 bp, Glycine max
  Clone ID: PAT_MRT3847_57908C.1
gcgcgagaagacgacagaagggcactctttgaagaaatggaagcaagcagcatcaagctagatactattgcctgtgcagctctaatgagatcttttaataaaggtggccaaccaggaagggttcttagtcttgcagaaagtatgagagaaaaagaaattcctttcagtgataccatattttttgaaatggtatctgcctgtagcatattacaagattggaggacagctgttgatatgatcaagtacatagagccctcacttcctgtaatttcatccggatgtttgaatcagttcctgcattctttaggaaaaagtggaaagattgaaactatgttgaagttattcttcaaaatgttggcatcaggtgccgatgttaacttaaacacttactctatattattgaagaaccttttatcatctggaaattggaggaagtatttagaggtattgcaatggatggaggatgccggaattcatccatcaaaagaaatgtaccatgatatatcctccttttcacaaaaatgctgtggcaatgaaaatgctgctgtcataagagaaagacttgaatccttgaaaagagaattcggggatcaaatttctacaagccagccctgtgaatctcttgtcatggaatcacattcttttgcttagctgtgacacgttgttccaactgctgtgggagttctgcctgtgagatttttttaaagattgaagttgaaactcaacttaatttattggatcatacgctactcctgtatatagattatttttcatattatgcctgcaatttgtaattcatctcatctttccttcctgtgtatatactagtacgttcggactgtactgtaaaatgtaaagtccaagtggggttacactaaagaatgtgtataaaccttatcagttcatgctatcaatatagttgctgttgatggctcgctccccaaaaaaaaaaaaaaaacacc

SEQ ID NO: 96232 - DNA, 1162 bp, Glycine max
  Clone ID: PAT_MRT3847_57909C.1
catcaacacaaatcccttcattgactcatgaaccacaaaaaacaaacagcaaaaaaaaatctgttgaaattaaaacttaagaagtcaattgattacatattaacatatgcacatggaatagataaaactggtaagagaaatcaaaagatagtatctaatgatattatacaactaaaaccaaaatataataaactacataaccccacttccttacccaataataaacacatttctcaatgtttatatttatattgcctttgttctgctgtttggctttttcctcccccatctgacattgcttgataaattgtcatgggtattgatggggattctgcaaaattgtttggacatctacaatttctattcaaaatatgaattttcttccgagcttccattgacaaaagaaacagcagttccaatttgaaaagaaaaagaaaacgggaaaagagtcccaacctaaaatccaaccaagagaccatatcaccgtactagttagttaagactaatatgcatagattcaaccaagttatagtgatctttcacgggatgtttacaagctttgcacgtctggttctctgatcaacttccactcggagaccaagtgaagtaatttcaggcacatcagcagatccttgaatctccaattcagcaactaccttttggttctcatcgttgccctccaacatattccttacagaccatatgccccattctctcaggaaaggattatcttcatcagtaacacactgccgcaatagaagtagaattccattcctgtgtcggatttcatcttgtgcatgcttccttctatacacacagttgccaataagtgcaactatgtctcgcctgaagcccttataagggcatggtttgaaggaacaactagcaccatcttgattctcacattgtttgagtcctttcctgattattgctggaggttcaagggcttcaagcaaatacaaaagcaactctatgaggccatatgacaatagcgcatcaacaacatcatttgaatcctctgtattacctctcacaccatcttgagcacaaatgtccctcagtatggtaagagagtagccaagaacatcaaccccaacaaagccactaggaagaccagacttccctctcgttgcatgttcaagaaccccaatagaattcttga

SEQ ID NO: 96233 - DNA, 1003 bp, Glycine max
  Clone ID: PAT_MRT3847_5790C.1
tgccgctgtggcgacagtaacggagtatatggttaatggttctctaagaaatgccttgcagaagaatgggaggaatcttgacaagcgcaagcgtcttttgattgcaatggatgtggcctttggtatggagtacctgcatggaaaaaatatagttcactttgacttgaaaagtgacaacttgcttgtgaatctccgggatccgcaccgcccaatatgcaaggttggtgacttgggcctgtccaaagtgaaatgccagactttgatatctggtggtgttagaggaactctaccttggatggccccagaactgctgaacgggagcagtagccttgtttcagagaaggttgacgtgttttcgtttggcattgtcatgtgggaactcttcacgggagaagagccatatgccgattctcgagccgaatcggctcgaggtggtattgtaaacaacactttacgacctccagttccagaattttgtgatccagaatggagattgctgatggagaggtgctggtcatcagaaccatccgaaagaccttccttcactgagattgctaatggattacgttccatggcaaccaagatctctcccaaaggacaaaatcaacagcagcaacctgctgtaccacaaagtcaagtgcagaaatgagttccaacgactgcaggatgcttaatccctgttttggatctggtttgtctttttcctccattcaatggatcaacccttttttgttcaatatataccctaggaaagatttgtaagtgttggcgcaaggtcagtagttgtcgggccttttagcactgttgcatattattgtattacaccaaaacctcagtgaatattatgtgtccttttcagttaaacagaaaaggaaaagaaaagatcttcatattttaaaatttttttagtgcttgtaaaaatggatattctaaagagtcacttacagtgatgttggtatggtatggtgactgttattctcataatcccatgttttcattttgg

SEQ ID NO: 96234 - DNA, 313 bp, Glycine max
  Clone ID: PAT_MRT3847_57910C.1
ttccaaaatgcgtagggaaagggaactgatcacagtgagtgagtgagacagccacgtacaatatatgttgaaataaggcggaactcgacctacacaatactggacactgctttgaagatccaaaatgcttgagtagcaggataatgagtataacgatgagtttggtaaggggaacgtatgccaacatatgatctatgtcatgtgttgacaaattttgttctttcaagatattttatgatgttattttgcgtatttctgatacctctagcatttatacgatggaggtattttaaaattgcaaaatactttacag

SEQ ID NO: 96235 - DNA, 310 bp, Glycine max
  Clone ID: PAT_MRT3847_57911C.1
tcgttgttctcgtgggcgcaaaggagcaccattttttgaaggatcttgtgaagaatgtgaggaaccgaccctctcagggggggaattgttttcctgctggacctaccgaactctcaaatcaaagtacagcatcaggagatgatgaccgtgcagatcaactggtacttgttgacaatcaaaatatcttaaaattgggaccttctaaaccatcaacgaagcgcactgtaaacatgggtgtttaccatagtaacacccagggagatttatattctatcgaaccaactaggcaacgaatgatatctggtacgat

SEQ ID NO: 96236 - DNA, 486 bp, Glycine max
  unsure (1)..(486): unsure at all n locations
  Clone ID: PAT_MRT3847_57912C.1
ggttgttgctcccctcccccacccacgtccgaatcctcccttccatgccccaccttcgtgttccagacgggcctgtaagtgccccgggtttcgcgaatctgtatttcatagcgtggctttgggcaagggctgaccccgaggggctggggcgaaggttccggcttcagggtgccactagggctgctcgctcacggccccccaggattgggattggagggagccgccaggccgccgcggggtggggcgggttagctcggcaggcctcccagcacctgcatttccctacggcaactgtcgggaggcagcccccgacgcagaggtttaaggggcccggcttttcagaacggcctcaggacgcggtcgtgtctggatccctccgcggaaaagaaggcgaaaccgcttctctgagccctgaccgttaggccccttcccacctccgtctagaacagattcggcttcttggctcagtccttccncaactagccc

SEQ ID NO: 96237 - DNA, 518 bp, Glycine max
  Clone ID: PAT_MRT3847_57913C.1
gaagcgccgcgccctcatggcgcgctccttgatcctccccgtcgagaatttccgcgccaccgtgttccccgtcgtatactccgtcaaggccgtggcctccggtggcgtcgaggtcattagaaaactctccaaggcttcctctacctctgcatccaatgcggatgctgaggttgattcccacgcggagaagctggtgggggtttctgatgtgctcactcacctggctccgttccttgtttcgtcgttggagccggcgttgatctacgaggttgggatcaatatgttgtatctggctgatgtgcctggagggaagcctgaatgggcctcacaatcgatcattgctattctgacgctgtgggataggcaggagtttgcttctgccagagagagcattgttagggctgttgtcaccaatttgcatctccttgatcttcacatgcaggtatcactgttcaagaggttacttttaatggtgaaaaacctaagagcagaatcagatcgaatgtatgctctagcat

SEQ ID NO: 96238 - DNA, 525 bp, Glycine max
  Clone ID: PAT_MRT3847_57914C.1
agctatgtcgatcgaactgtccaaggtcctgtcactcctgtcactacacgggactgcgggatacataatacggcctagcatagcgtgacggcagagacagttgctagggtaaaagtaaaagccgagaaagagccagaggtagggggccgccctgcaggtgtgcaagccgtagacgtgaaatagtaagtgaaaaaggatgccaaccaaggcattaagttcgcatatggggaaagtcgtaattgctagatgcacatcgagacgtttgccaaaagggtgcgatcggactaaatagacgaatattaaaataaggggccggaaacacacgcaaaaatcccgcgacgaaagcgtaagcgactgtgacaatggcggcacgatgcaagccaacgcaatggcgaccgagactggttacgtgacaatggagacccaaggcaagggactcgaaagcaagcagaatatgagaaagcatagcaacgaggggctccatttggcacgggagagtagtgaggggggcgcaaaacagaaagc

SEQ ID NO: 96239 - DNA, 1775 bp, Glycine max
  Clone ID: PAT_MRT3847_57915C.1
tcattcttcttacataataggggaaggagaagaaaaaaaatgaaataagaaaaactcaactttgtaattcgtggagggaatacttttccattacgcacgcactttaattacagacgagaaaattataattaatagtaatacagacagcagcatgcgcccaccggttattctcaaaactaccacctctcttttggattcttcttcttcttcaccaccctgtgatcgcagactcaacactctcgctagacacttccttccgcaaatggcttctcacgacagcatctccgcttctccaacctccgcttctgattccgtcttcaatcacctcgttcgtgctcccgaagatcctatcctcggggtaactgtcgcttataacaaagatccaagtccagttaagctcaacttgggagttggtgcttaccgaactgaggaaggaaaacctcttgttttgaatgtagtgaggcgagttgaacagcaactcataaatgacgtgtcacgcaacaaggaatatattccgatcgttgggcttgctgattttaataaattgagtgctaagcttatttttggggctgacagccctgctattcaagacaacagggttaccactgttcaatgcttgtctggaactggttctttaagagttgggggtgaatttttggctaaacactatcaccaacggactatatacttgccaacaccaacttggggcaatcacccgaaggttttcaacttagcaggcttgtctgtcaaaacataccgctactatgctccagcaacacgaggacttgactttcaaggacttctggaagaccttggttctgctccatctggatctattgttttgctacatgcatgcgcacataaccccactggtgtggatccaacccttgagcaatgggagcagattaggcagctaataagatcaaaagctttgttacctttctttgacagtgcttatcagggttttgctagtggaagtctagatgcagatgcccaacctgttcgtttgtttgttgctgatggaggcgaattgctggtagcacaaagctatgcaaagaatctgggtctttatggggaacgtgttggcgccttaagcattgtctgcaagtcagctgatgttgcaagcagggttgagagccagctgaagctagtgattaggcccatgtactcaagtcctcccattcatggtgcatccattgtggctgccattctcaaggaccggaatttgttcaatgactggactattgagttgaaggcaatggctgatcgcatcatcagtatgcgccaagaacttttcgatgctttatgttccagaggcacacctggcgattggagtcacattatcaaacagattggaatgtttactttcactggattgaatgcggaacaagtttccttcatgactaaagagttccatatatacatgacatctgatgggaggattagcatggctggtctgagttccaaaactgtcccacttctggcggatgcgatacatgcagctgtaacccgagttgtctaaaacatgttgttgaccgcagttttcaacatgctccctagtccctataggagaacttccattatttttgtttaataactgtcaacatcaccaatgaaaccttttatttgatgtgagatttttaaaggaaacttttctgcctaccgggctccatccagagatttagcattataacatttttattccgtttcctccaaaaaaaaaaaaaaaaaaaaaaaaaaaaaaaaaaaaaaaaaaaaaaaaaaaaaaaaaagaa

SEQ ID NO: 96240 - DNA, 400 bp, Glycine max
  Clone ID: PAT_MRT3847_57916C.1
gattcaaaacacaccaaagactttatggaccatataacctggactatcctcataaacatctctacaccagtataggtattgagtaagatgaatctctacatgacataccacaagagacccctccctggggttcactccataccacaactgcacctgaggaacataatggacctaatgtagagcaagtcccaacacattgagccttgaatgaactgtttagtataaacacggagccgccgtcctcttaggtaaatgacccaaaagagcacagaccacgtcacagcagcttatgccggaaccaacccaatataaatcacttggctgtctctctgctcaccagggccatcattgatgatgatgtctgaaaatattttctgaaccagagtgcaatgctgtctgc

SEQ ID NO: 96241 - DNA, 159 bp, Glycine max
  Clone ID: PAT_MRT3847_57917C.1
ggaatctataccattgaatatgttggtcgtctaaattttactagaggtatgcatccaagcaaggcatgacaagatcctcttcagacataataactgacaagaattattgaagttggaacatgctcgcaatttgatctctacgtttagtatacatatttc

SEQ ID NO: 96242 - DNA, 220 bp, Glycine max
  Clone ID: PAT_MRT3847_57918C.1
aaaaaatgtgtactgctcctaagttgtagcttgctgacgtgtaaagacaacgttgagggtttactgctttgcgtgacgctaatcacgctagattggctgatagttatggtcgtagtgaacagtaaaaacgatgtgctgacgacatagatgatgacagatgtgtacaaagaaaatgatggatctggtgctacggacctgttctacttcaaagagatgcata

SEQ ID NO: 96243 - DNA, 512 bp, Glycine max
  Clone ID: PAT_MRT3847_57919C.1
tttttaaaaggctgaaaaaaataatatccataattgtctggacaacatatatgcccttttatgaaaaattcgagacaggttcacaacagtctattaagatgttctttagaaagcacgaccataaaacctggctgttgctgtataattccttatatacataggaaatggggggaattaaaaggttttaaaataaacaataaccactacgtgactttatataattcatataaatggattgcatacatccaagatgtttgcagattttatttaaattttttattactgggaccacataatcaatcaaatccgatacaacatactgtgttgaggctacttattgcaatgagtgtaagtacgtgtcaggttaagttagtattttttaaaatgataacttctaaggtaacgggggaaatacataaaaatgtatcctccacattgctattatgagctctatctgcaacacatttgtggttgcttcttgactatccattcatatagattgctgctggact

SEQ ID NO: 96244 - DNA, 370 bp, Glycine max
  Clone ID: PAT_MRT3847_5791C.1
aaataaaatttttttaaaaaaaaaaaataaaagcccaattacaataaaataaaaaattaaacattaaaaaaaaactccctttgggtgaaaccccccaaggaaaaaaaaatcccccccacattcccaaaaaaaaacaagtgggttttcccaatattaccaaaacaacccccggcttttccaaaaaggaaaaaaaaaaaaagggggggccccacaccccttaaggggaatttggaccaaatttcccaaaacccttacagggtataaaagggagaaggtttaaccaggaggggggaccttcccaaaagccaaaaaaattttgggggcagggggcccaaaattgtggggggggaaaacccacaactaaaagggg

SEQ ID NO: 96245 - DNA, 366 bp, Glycine max
  Clone ID: PAT_MRT3847_57920C.1
acaggtatccagttggagagattttatgaagggtggaaagaagaataagaaaggggaaattcgtccaccgaagcttaagacagaagatcccaacaaatcctacgttcaaaggcctgtaaaaagaggttaggggttctgccgtcgagttagaagatcacagcaatcaattgaaacaggagtccgagagaacttatttatgcaggctatcttttgtatcagttagatacttttaaacagatttattactggggtcatttgaggcatgttaatggaatgtagacctccaacgaatgactatcccattttgggatgctaggacgttacaccccaatactgataaataggaattactggttgaggcattga

SEQ ID NO: 96246 - DNA, 273 bp, Glycine max
  unsure (1)..(273): unsure at all n locations
  Clone ID: PAT_MRT3847_57921C.1
aagacgacagaagggggagttaatttcctttgacatatactgtgcagattttgagttttgtcattcttacaaagacaattctgaggctttgaaactggtattcctaattcctaacaatatacaatatatgngntgcgtgtcagtaccttctaatgcaataaaagcaccaaggaagatccgtagacggataacaaaacctcgtctaaagttctcaaatttctntcctggtgagatcatcaagaagaggaatagcaatgcaggggcacgtgtaac

SEQ ID NO: 96247 - DNA, 416 bp, Glycine max
  unsure (1)..(416): unsure at all n locations
  Clone ID: PAT_MRT3847_57922C.1
tcgtctcgtcccactgccgtccgactttgcattagtactattgacttaagacaagcgtattgtcattgatcttgctagcgtgccaacatatgggttctagcgagattattcattcattttagtacccttgtgcttgtgaaccttttcatttccatgatcattgactcaagggttgcagagnngcacgtaccctgcnncaaaatcagccttattggccttccaaagnnttgatatacctactgttgttccttcttccactttggtggcaccactttgccataatttgcctgttactttctccctccagtggcctganaactacctgcaagtaccctaaaagtactcanattccttgggaagtaaatagttaaataaacgtctcaaaataaatccccttagaggtaacctaatgatct

SEQ ID NO: 96248 - DNA, 421 bp, Glycine max
  Clone ID: PAT_MRT3847_57923C.1
caaaatcctcttttatttatttatttttttctctgcttcgcgtcgttttgtcctcgataatgtcgtcgtcgacgccggattcagacaaaacgacgacgtcgtcgaagaagagcgcgttcgacgcgttagcggcgtcgcggctcgtgacggagctcaggggaaacttcgcttcgggcaaaacgcgtagttatgagtggagattgttgcagctcaacgcgattgcgaaactcgtcgtcgatcacgagcaggagatcgtcgacgcgctccgaaacgacctcggcaagccgccactcgaaaccgtcgcatacgaggtctcgtcgtttacactgttactcgtttgcgttttggtttatatatatatatagttggtttgactatggtagtggaaaaggaatattccaaaaaattgaaaacaggtggt

SEQ ID NO: 96249 - DNA, 645 bp, Glycine max
  unsure (1)..(645): unsure at all n locations
  Clone ID: PAT_MRT3847_57924C.1
atccgcacaattccaagcatctattattggtttgaacaagttttgggcttttggtggtaatgtggtggctatggataatgactcgtgtggagtggggttcatggcggaactgtccaacgaaagtagctgcaaaacggtgattgatgttttggagatgctggtgcgcatggacccttcggacattggtattaggcttttggagccactcaaggcggagttccctattttgagctatgccgatttctacccggtgatgatttttttgtctttggtgtttgtgcgcttaatgttgtatttgtgttgacgcaattggttggcgttgttgccgttgaggtcacgggtggacctgaagttccattccaccctggaagagaggttaatatataataccttggtagagttgtgttcaacacaaatgacgggaactgattcacacacaactatgattgatggcctgngtgttgcttgatggggagttttgccccaaaaagtttcaattttttagaacaagcacattcatagttggctggcgttgntgccgttgaggtcacgggcggacctgaagttccattccaccctgnaagagagtcaacccaaataggaaatcaaatcaacataacaacaatgggagaaggtacatgtttc

SEQ ID NO: 96250 - DNA, 590 bp, Glycine max
  Clone ID: PAT_MRT3847_57925C.1
aattcggctcgagctggacgagtaagtaggttgtaagctagaaactcggcgtctcggtactccaacgaagccaaggataagtatgtagtttgcgcgggataaaaagaagaatgaaaacctacagatatcaatggcggagtccaatcctcacttctccgacgacacgccctcacctgcttcttccgtcgactccccatccccgccgccgactttcaacggcatcgtcatggtgtcgcagccggacacccaggacgttttccacacgccgccggaggactcatcgcttcactcctccgacaacggaggcgtcgaacgttgtgccgttaatctcgccgtcgacgtagatgccgtgagtcaggggttcgtcaatttctgcgatggatcgaagttcgttgattcggggaaggattcgggttttctaggattttcgggagttcaaccggcggcgggagagaacgtgggagagagttttttggggagttcccgggggcgcgctggggtctggggtggccgctttttccgtggggaacttctgttcggggggcggggccgtgccccggcggctggggtttggggcagctctccgggac

SEQ ID NO: 96251 - DNA, 388 bp, Glycine max
  unsure (1)..(388): unsure at all n locations
  Clone ID: PAT_MRT3847_57926C.1
aaaggggagggtggctgattggacaattgggaaggtaatgataggggaattctctgagcttgggaatgactattacaagaaggggttgacctaaaatcagagtgggaggagaaacccaagattggattatggattcaagggaggtgaaattgcaatgggatcttattgctctgaagtgcaatacttggagaattttttgaagaggcaagtgcaaagcggggagcaacaaaactaagatgtgaactctctaggggtgaatgtgtgagggaagacnaatgaggatatggagatcctgaagatgatgtaatacactttgcgtattgcaatttggcaaggcattgagttgaggaattgggaggaaaagtatgaaaatagtgagaagaaagtt

SEQ ID NO: 96252 - DNA, 461 bp, Glycine max
  Clone ID: PAT_MRT3847_57927C.1
actgctgtctgatcgaactgtccaaggtcctgtcaccaaccggctaaagttatgtactaggacatggcgggcccaaatggcttgtactcacgggaaagtttggcccaactggctaacacctgtagggggtgctagcgaattgtacgccagggaacacgaaggcggtgggtagtaccaacagggtgctaaagaactatgttacacgggttgccaaacactgtgcaacgccgcgagagcgtagtgtagcttacgtggcaaacatacatggggttaagcacaacacaaccaactacaatgctggcttaccgaacgacgcagcagccgacgtgcctgcaacgtggggtgcacgtattttcagcgaacacgttatggggtaattttgagacaaggtgcgaaggggaccagggagtagaggggggggttaaatgcggtgaggagggtttggaggttatcgcaaaaag

SEQ ID NO: 96253 - DNA, 196 bp, Glycine max
  unsure (1)..(196): unsure at all n locations
  Clone ID: PAT_MRT3847_57928C.1
ncgcatgcacgcgtacgtaagctcggaattcggctcgaggtggaatcatcagtgaacccctcaacaagagcctgcgtcgctcncgcccactctctcactactcctcctttggtagcagtggtggcgccggaagcatgatgggangggagtctgctgacaaggctgccgcagccgcagcctccctattggccancgg

SEQ ID NO: 96254 - DNA, 611 bp, Glycine max
  Clone ID: PAT_MRT3847_57929C.1
ggaaattccacctttgcttgaaggagatgggaagatagaggtatggcgaatcaatggaaatgccaagaatgcattgccgaaggaggagattggtaaattttatagtggagattgctacattgtactgtacacctaccactctggtgagcggaaagaagactacttcttgtgctgttggtttggcaaagacagtgttgaggtaatttatgttctttctgatttgagatctatagatatatatgcacattacattcactttttggttccaacactattaggactgatctagaattttcgtgtataggcattaaaattccttataatttttttatcccccagattccttataattttcttttgtcttaataacttccttcttttcttaaaaaatcataaaaacaacccacaattttggtgagaaaaataactagcttatataattaggaattatggattacaagtagggtaaaatattttccttttatccctttcacatggctgtgtgcatcaaccagggcaaaaaaagtaaaacataggagaaagcaaataggttcattaatcaatgtcatcttccattctattttgcatatctttcgaactgatatttctag

SEQ ID NO: 96255 - DNA, 239 bp, Glycine max
  Clone ID: PAT_MRT3847_5792C.1
cccccctataaaatccaactactaccaacaaaaaccccgcggttttctaaaaaaatgtgttccctacaactacataacctattaaccttttttcatacccaatttccttataaacatttttttatcttacaccaaatcacataacttcatcaaccaactccacaaataaatcccattatattcctcccttataacatttaaccctattactctaccctacatcactccttatcccatat

SEQ ID NO: 96256 - DNA, 343 bp, Glycine max
  Clone ID: PAT_MRT3847_57930C.1
cattgtcagtgatccatatcaacaagttgggcattcatctcgttctcaggctcccaactatgagaaaccaaagcgagacaagccagcacaagttgcagtgtcttctgtccaaaattcacacagatacgagagacctgggtcttctagttcttcaagatctcatcatgagtcatcagggaactcttcttccacttgttccagcaacatttctagtaagattgtggatcgttacattgatggagagcagcatccagaggaaagtagacccaagaacaattcacaaagaagtaatagtagacatgggaattatggtgtgaagcgtcctccaaaagtacagcttaca

SEQ ID NO: 96257 - DNA, 256 bp, Glycine max
  unsure (1)..(256): unsure at all n locations
  Clone ID: PAT_MRT3847_57931C.1
ggaagattggaggctgtgaaattggggatggcgttgcaggtctgtgccgtgaggngtnggctttgagagtgatttgtatgtctccaatgctgtgatagacatgtactgtaaatgcggtgacccacttgaggcccatcgcgtgtttagtcacatggtttatagcgatgtagtttcttggagtaccttgattgctggctactcacaaaactgcctataccaagagagttataaactgtatattggaatgataaatgtg

SEQ ID NO: 96258 - DNA, 1895 bp, Glycine max
  Clone ID: PAT_MRT3847_57932C.1
ttcacacttcttcctccgatccaataaatggcggaaccgtcgtccaccgccgccaccgctgccaccgacgaaatcgctgaaacggcggccaccgccgccaccgcttccaccgcctccaccgcttccaccgctgatcctccggcgccagtgactaaaagctgggccgacgaagcagacgaagaaaacaactacactcgcaacgaatcagcaggccccttttcaatgaatccacatggcagaaccgtcgtcgatcgccgccaccatcgctaccgctgatcctccggttccagcgaccaaaagctgggccgacgaagcggacgaagaaaccaacgcctccaccgccgaggcagaaacctcctccgttaacctggaagcgttaaccatcgacgacaaagaaaagaactcttcaaaactcttggacgaccccgacgtttctagtagttaagcggttacttctgccaatacgccgtacccgcagatagccaggttcgaggacctaagcctctcgccatagcttttgaaggggctctatgtggagatgaagattgagaagcccagcaagatccaggctatcagtttgccgatgatccttagcccgcccaatcgggcgttttgggcgcaagggggctgtatttaacctgatatgtggtgaattggatgaaaggctcatgtcgagaaagatatagaaaaagagaattctaagtgtcaggttcttttgttttctgctacatttaatgacaccgtcaagaatttcgtttcaaggacagtcaggatggatcataataaactctttgtaaagaaagaagaactatctttagatgcagtgaagcaatataaagtgtattgtcctgatgaacttgctaagattgatgtggtaaaagattacatatttgaaataggagagaatgtggggcaaacaattatatttatgcgctcaaaaattagtgcaagattattacatgaagcacttgttaatttgggctatgaggttacatctatacaaggttctcttagtaatgaagagagagacaaagttgtcaaggagttcaaagatggtttgactcaagttcttatatcaacagatattcttgctcgtggctttgatcagcaacaggttaatttggtcatcaattataatcttccaaataaacacagtttacgggatgaaccagattatgaagtgtatctgcacagggttggcagagctgggcgttttgggcgcaagggggctgtatttaacctgatatgtgatgaaaatgatgaaaggctcatgtcgaagattgagaaccattttggcacttgtgtaactgaggtgcgagctcaaagtgttgaagaatataaagccgctctcaaggaagccggtttactgcaatgatgtcgtcctctttttactttttgttcgtagtagggattctttccttttctttttccccccttttcacaaattctttgcggcggattgaaaactgaaacaattaattgaaagtatgactttacaaatgtgaagttgcggttttgaagagaacatacacaagttaaaggatgatggatttagagatgattccccgaggataatgaaagatatagaaaaagctaggtgtcaggtttgttggattctctctcgcatagtgatgcttgcatgcatcatgatgtctccatctgcccaagaaatccttataaagacttggtcttcacactgacatgacattatttttcgtggtgtgtggagttaattttcgtagtaaaccaaatggaccctaaacaactgcatgaaaggatcccgaacctacacttcaaatattatcgcagaacagaacagaatgggatatgatgagatagaatgcaacagaaacaaagacaagggaaaaatgagttatttactcttcttaacggtc

SEQ ID NO: 96259 - DNA, 234 bp, Glycine max
  Clone ID: PAT_MRT3847_57933C.1
ctcgagccgattctgctcagggttatttattcatttagaaagaccattgcggttacccatagtcttatagtgtcatactgctacacaaaacaatggggtcccttatggcaggattggactctacccacatcgatcctcaatcagccatacttaaaaggaaccgctcactcaccaaggcttaaattgatgcttactggaaatcaaagatgaagatagaggaagcacaccttagag

SEQ ID NO: 96260 - DNA, 1637 bp, Glycine max
  Clone ID: PAT_MRT3847_57934C.1
attaaatcagttttcaatccgccacaaagaatttgtgaaaagggggaaaaaaaaagagtccctgctatgaacaaaaagttatgatcttggagaaaagaagaaaaaaaaaaaaaacagatgtgtaacaaacttataaaacaaaaactgggccaccatcgcagcaaaacgcgtgttcgcagcaacaaagaatcacatcgcaacgaatcagaggcccctttcaacgaatcacatggcagaaccgtcgtccaccgccgccaccatcgctaccgctgatcctccggttccagcgaccaaaagctgggccgacgaagcggacgaagaaaccaacgcctccaccgccgaggcagaaacctcctccgttaacctggaagcgttaaccatcgacgacaaagaaaagaactcttcaaaactcttggacgaccccgacgattctaatattcaagcggttacttctggcgatacgccgtacacgtcggcagcgaggttcgaggacctaagcctctcgccagagcttttgaaggggctctatgtggagatgaagtttgagaagccgagcaagatccaggctatcagtttgccgatgatccttagcccgcccaatcgggacctgattgcgcaggcacacaatggctctggcaagacgacttgcttcgtgcttgggatgcttagccgtgtcgatccaaaggtgcaggctccacaggcgctctgcatctgccccacccgggagctggccattcagaacatcgaggtgctccgcaggatggggaagtacacggggattgcatccgagtgccttgtgccattggaccgggatgcggttcatgtatcgaaaagggcacctattatggcacaggtggtgattgggaccccagggacagtcaagaagtttattagcttcaagaaacttgggaccacgaggttgaggattcttgttttcgatgaggctgatcaaatgcttgctgaggatggatttagagatgattccctgaggataatgaaagatatagaaaaagagaattctaagtgtcaggttcttttgttttctgctacatttaatgacaccgtcaagaatttcgtttcaaggacagtcaggatggatcataataaactctttgtaaagaaagaagaactatctttagatgcagtgaagcaatataaagtgtattgtcctgatgaacttgctaagattgatgtggtaaaagattacatatttgaaataggagagaatgtggggcaaacaattatatttgtgcgctcaaaaattactgcaagattaacacatgaagcacttgttaagttgggctatgaggttacatctatacaagggtctcttagtaatgacgggagagacagagtatctgagcagggttggcaaagctgggcgttttgggcgcaagggggctgtatttaacctgatatgtgatgaaaatgatgaaaggctcatgtcgaagattgagaaccattttggcacttgtgtaactgaggtgcgagctcaaagtgttgaagaatataaagccgctctcaaggaagccggtttactgcaatgatgtcgtcctctttttactttttgttggtatactatatttacttgctgaataaagtaaagttgacttgggatttatccccccttttccccc

SEQ ID NO: 96261 - DNA, 297 bp, Glycine max
  Clone ID: PAT_MRT3847_57935C.1
cgccggacttagaatagccaatgggaataggacaattaaacttttcgatccgtatttggtgtcccacatggcggcgtatccgtttattaaatttggggaaacacaactctacacctaatgaaccgtactatccaaactgaaaaaacacacggataatgaatcttttccgctcaatcactgacaaacgcttccaagagtatgctatatatatggctttacattactctactttattaatgataaatacttttaccctagattcatccacatttttttaggagaaaaaaatactccttc

SEQ ID NO: 96262 - DNA, 749 bp, Glycine max
  unsure (1)..(749): unsure at all n locations
  Clone ID: PAT_MRT3847_57936C.1
gttgggctatgaggttacatctatacaaggttctcttagtaatgaagagagagccaaagttgtcaaggagttcaaagatggtttgacccaagttcttatatcaacagatatttttgctcgtggctttgatcagcaacaggttaatttggtcatcaattatgatcttcccaagaaatacggtgtacgtgatgagccagattatgaagtgtatttgcacagggttggcagagctgggcgttttgggcgcaagggggctgtatttaacctgatatgtggtgaattggatgaaaggctcatgtcgaagatcgagaaccattttggcactcgtgtaactgaggtgcgagcacaaagtgttgaagaatataaagctgctctcaaggaagccggtttactgcaatgatgtgaatctgcccaagttaaaggatgatggatttagagatgattccccgaggataatgaaagatatagaaaaagctaggtgtcaggtttgttggattctctctcgcatagtgatgcttgcatgcatcatgatgtctccatctgcccaagaaatccttataaagacttggtcttcacactgacatgacattatttttcggtaattatttttcgtaaagtgtccgtttgttttagattttggcagaattggtcttgatttgttgaatatgatcgagatgtgtgtccaaattaagctcagccatagattttacattgtgtgcacgtgtgtgttaaattaaaaataaaaaggn

SEQ ID NO: 96263 - DNA, 940 bp, Glycine max
  Clone ID: PAT_MRT3847_57937C.1
attactaatttgaggatagtgaagagaaagaaagaatggatgatagaaaggtatcggaggagcttgtgagagggcttgagtttgctaatcaacttcgacaagtgatgattaatggaaaagataatgagtcatcagcaacaacgacaaccccatttgttcaaagtcttgtcaagaacgtgttcagatccttcaccaacacccttttcctcttggacaagtatccctcttacgaggtttctcacactactaaatctgaggactctcaagaaagttgcaagggtttcaccactaggaacaaaagaggctactagtatatatgaagaagaaatacgcaagaatgggaggaggtgtcgaaaactccaaaagtagatggccaccaatggagaaagtatggccaaaaagagatcctgaaagccaaatactcaaggaactactacaggtgcactcacaagtatgatcagaattgtcaagcaacaaaacaagtgcaaagaattcaagaggatcctccattgtataagaccacctatttgagccaccacacatgcaatgacttgctaaactatgaaatcatacctgattccaataataattctccttcggacacttccatattgcttagctttaacaacacctttcctactccaaccaaacaagagtgcccctttttatcatcttttccctcaccaacatcagtgaagaaattagaggaggtgattccggcctcatcttcaaggcataataataatgtcactctgccactgcctgatccctgggatgttatgtctaattctgccatgtgtgattctgttggccttgatgatgtcaacctttttttggattttgatgactaattgggtctgcaaatttaaatttgtttttcaatttgataggagtgctcgatagctagctatttataaaaattttaaattaagtcaattaa

SEQ ID NO: 96264 - DNA, 488 bp, Glycine max
  unsure (1)..(488): unsure at all n locations
  Clone ID: PAT_MRT3847_57938C.1
gaatttctttacgtcccacgcgttcatctccaccgccgaggcagaaaccnccacgggtgactttttagcgnaaaccatcggctacaaagaaaagaactcttgaaaactcttggacgaccccgacgattttaatattcaagcggttacttttggcgatacgccgtacacgtcggtagcgaggttcgaggacctaagcctttcgccagagcttttgaaggggctctatgtggagatgaagtttgagaagccgagcaagatccaggctatcagtttgccgatgatccttagcccgcccaatcgggacctgattgcgcaggcacacaatggctctggcaagacgacttgcttagagcttgggatgcttagccgtgtcgtaccaaaggtgcaggcttcacaagcgctctgcatctgcccaacccggaggctggcattcagaacattgaggggctcccgcagatggggaagtacacggtgattgcattcgagtg

SEQ ID NO: 96265 - DNA, 704 bp, Glycine max
  Clone ID: PAT_MRT3847_57939C.1
tcaggatggatcataataaactcttgtgaaagaaagaagaactatctttagatgcagtgaagcaatataaagtgtattgtcctgatgaacttgctaagattgatgtggtaaaagattacatatttgaaataggagagaatgtggggcaaacaattatatttgtgcgctcaaaaattactgcaagattaacacatgaagcacttgttaagttgggctatgaggttacatctatacaaggttctcttagtaatgaagagagagacaaagttgtcaaggagttcaaagatggtttgacccaagttcttatatcaacagatattcttgctcgtggctttgatcagcaacaggttaatttggtcatcaattatgatcttcccaagaaatacggtgtacgtgatgagccagattatgaagtgtatttgcacagggttggcagagctgggcgttttgggcgcaagggggctgtatttaacctgatatgtggtgaattggatgaaaggctcatgtcgaagatcgagaaccattttggcactcgtgtaactgaggtgcgagcacaaagtgttgaagaatataaagctgctctcaaggaagccggtttactgcaatgatgtgaatctgcacaagttaaaggatgtgtgtaagcttacaaaagatgttatgatgtacaattattattataaaaacaattgtcctctttttgtttt

SEQ ID NO: 96266 - DNA, 225 bp, Glycine max
  Clone ID: PAT_MRT3847_5793C.1
atctacattggatttgcatcctgatctattttagatcttagcttatgtttattaatatcatctttattggttaattgctgggaaactgaaatggaactacatctggaatattctggtcattagtgctttagaggccttactttaaaatttcaggataagatgccctgtaacttaccttttacaggttagaatgtttatagtcttttaactgttgtgtttaagtat

SEQ ID NO: 96267 - DNA, 350 bp, Glycine max
  Clone ID: PAT_MRT3847_57940C.1
gaaggaaaagtagctgtattcacgaaattgacacatgcatagtatttcaggatcttcttcaacagacagcctgatgagacgattatccacaatgtcaaaatcagctccatcatctgtaatgtccatgcaatgcttcagtaccattgcaagcattcctcccgatcagcagcatatgattttcgccctgaaacaacttgcccatggaatgaccctggacgactacaacatccagaaggaatcaacccttcatcacgtcctcatgctgcgaggtggcatcattgagccttccctcacagctttggctcccacatacaatcacgacagtatgattatgccgcaagtgctatccc

SEQ ID NO: 96268 - DNA, 613 bp, Glycine max
  Clone ID: PAT_MRT3847_57941C.1
acgacagaaggggaccgagggaggtagaatattcaaatcatgtaataataataataataacaataatctgattttgatctgccacctcctctttcttcgtcctcctcccgtttcaaccttcgctcgtgggtgccacctcctctccctccgtcgttcgtcgttgctacaacattattagcaccgaaatttgaaaacgatggggatgcgaatgcgcgtgccaggattcatgcttttgctaatcatcggaatcttcgaactcgatgctgtttatggttacgttcgaccaccacctcgtaaaacactctttgttccacatgcagatcaggattcccactcgcctcaacaggtacacatatctcaagtgggccaaaacaagatgaggatatcatggatcacagacagcccaactcctgcaaaggttatgtacgctccatctccttcaggtaatacagtctctgccacaggaactacctcttcgtatcgttatctggtctacgagtctggtgaaattcacaacgtcgtaattggtcccctcaaccccaacactttctactactaccgttgggtgacccacctttttgcaaacatacactttaaaactccccctcccact

SEQ ID NO: 96269 - DNA, 391 bp, Glycine max
  unsure (1)..(391): unsure at all n locations
  Clone ID: PAT_MRT3847_57942C.1
tacgcgtcgaggtaccggctacgaattcncggctcgacccacgcgtcagtacacgcgtcagtagaggagcgaaagggctagagaagggggtgcttcggaagaacgctcgcctgcaccgtccagctcgttctcaagagaagaggaccgagtgatgtttttccttgcagttcatgcgatggcgcctctgatcctgcatggtggaaaatacaatagcagttcgtacaagagactcagtgcggcggagtatgccggcgtccaagttgactttgcaccaacttttgacatgggtgtctctactagaactcgtgaatttcgcaagatcagtcctagtggcagggttcctgtgttggtaacatctgagggtccagtagtctagagcattgccattgct

SEQ ID NO: 96270 - DNA, 459 bp, Glycine max
  Clone ID: PAT_MRT3847_57943C.1
gtgatgtggtgcgatgcctaatgaaaaattggaagattgatcaatctactataaaccagaaagactgtgatgggaacacaccgttgcatttggcttcaaaaaatttatttcctaaagttttgtactttattacacaagataggaggactaatatgaatctcttgaataacaacgggttaacagctcgagatatcgttaacaacaatcaactggcgattcgaaagtttctagccaatcgagtgttaaaagcagctggtgtccccttgaaagtaaaagatatgttgcgttctcaacataaacaatcacccagaacagaattgagcttaaaagatctcctgaccacatttttagttgtggccacattgatggtaactgtgacatttgcagctgctttcactatgccacggagggtatacggtcctgatgatcccaacccaaaaaatagagggacagcaattt

SEQ ID NO: 96271 - DNA, 478 bp, Glycine max
  Clone ID: PAT_MRT3847_57944C.1
ctcgcccgcctgtacgggcccggacttactggctggatcgacccacgcggattttttcgtgtaccgccacgccagggtgcaggagcttgaaaccggaaacaagatgcgagggtatcttgatgttaagaatcttgcaaattacttactacttgttggtgacgatttgttaagggaaagaaaatgactgctatgtgctggccacatactttgtgaatcagttctcttttccactcttagagtgttggctgaacatctcacctattatgatagtaggacgttcgatgtgcaaattaaaaactttgcctagattgtttgaaaggactctggttaattataagttaatgctggcgaaaactaggatgagggctcccactctgctatctggcataggactacctgggtagacatttctatgtgtgtgcctacaatagcttattattgcactgatccgaatatgacgggaaatgaggctttattt

SEQ ID NO: 96272 - DNA, 266 bp, Glycine max
  Clone ID: PAT_MRT3847_57945C.1
gatgacaaatatatattttttatatggccttagaaacaaataaacaccaggtcctcacgcgatgattaacatgccacactcttattctactcaaggcctcaatcaagggcacttgcgaaataaatactaagggcagccaggtccttatatgaagatatagccaaccattttgtttattactttgcccgacatattcactgcaatgtgatccactttctcttagatttttccaggagaggcaacaccgtaggaatgttctttgcgaa

SEQ ID NO: 96273 - DNA, 415 bp, Glycine max
  Clone ID: PAT_MRT3847_57946C.1
tgaacctttgggctagatctatcaaacgattgctcttttggcttgaaagattatgtgtcctttgcgaatgaaccaaaggatgggcattgcacctattgaatgtgtaatgctgttgttggatataacctctgggggatttttagaaactactctgacaaatagccctggagagaactctgtcattgccaaaaataacttttcaaattatgcactgccttaacctgatgatggaatgcttgaacttgaaccacaagcttctttttgaaccggtcctactcgtgaccaacctgatttaaatacccaatcgctaagacctgagaaactactgcttgaatgtgatgccctctgttcctgagccgttctagcgccaatggcgatgtctacaacgctgagctgggctgaccatgtctggcac

SEQ ID NO: 96274 - DNA, 311 bp, Glycine max
  Clone ID: PAT_MRT3847_57947C.1
gggtcgaggcgaggtactaaaatgagattgccgttttttttgttggtgttgctgggaactgtttgcctggcatcagttcgtgtctcattaaacgttacagaagatgagaataaccctttctacttgagaagctctaacagcttccaaactctttttgtgaaccaaaacagttgcattcgtctccttccaaaaattaataatacgctccccacaacctgagaacccttgagactaccgtaattgcccgtttcagtcaaaacccaacacaattcttcttccccaccatgctgaccccgattttcttccctttg

SEQ ID NO: 96275 - DNA, 487 bp, Glycine max
  Clone ID: PAT_MRT3847_57948C.1
atgcgtccttgttttcgtcaaaaacacagtgggaggaaccatggggcgtcttgatctattggcaaattttttgaccgagggcaattatagagcaagtgttgatttgcagcgcactcattgtattaaaggaatgattaaaatggtggccacagaaggttttcctgagaatacaggtatattattggtctgtgctatgaatcttacttgtagggggctgaccaacactgatattgacaccatcagctttcaagacggggaattatggaatcctgtttgcacaaaagcaatgactatgtcatttaatccaaatccgtgttctgatgcatggagtctggaatttttgaagcgtaccggatttcattgtgatatcatatgtgtcaatggatggactgccaccccgatgcaggatgatgaggttacaattgaatggtttatttcctttcaggaatgtgatcccaggacctattgtgttgtaaatccacaaaat

SEQ ID NO: 96276 - DNA, 352 bp, Glycine max
  unsure (1)..(352): unsure at all n locations
  Clone ID: PAT_MRT3847_57949C.1
accggttccagacatcacccgcgctgcacgcgatacgtaacgctcgcaattcggctcgaggttgaaagattcgtnggcgacgagtgaagtgnggaaggaggaccaattacaacggactaaggtcgcacacaaggctgccacagccagcgacggatgacataacggccactgccactaccactactatagcaagagcagtacaaaagaagcagaattagagagttaaggaacctacgccaatgctattactccttctcgtgaccttcttgactatagatccgatcaaaatcctcatcgcctagactaggataacgactccacccaatgaggataaaaaacgaaaaaatgacaa

SEQ ID NO: 96277 - DNA, 746 bp, Glycine max
  unsure (1)..(746): unsure at all n locations
  Clone ID: PAT_MRT3847_5794C.1
tctcgatctacatcgcgagcgtttttttttttgcggcggggggcaaatttaagtnattggggggtgcacaaccagaaatatataggtaaaaaaccatctccaggaaccctaaaacaatacaaattaccaaacggttgcacattaaaactcgctacagaaggtgctgccttatgctttcactacaacattaagccttaatttctccagcttacatcaccaccaccacgagagtagcgtgatccaccgtccccgaaaggtccgaaacgatggtctttggcgccgccataaccaccaccgaaaagggtatgtgcacatctcccaaaggtcactcattttgattggacaagaacagtggaggcatccaccgtctattaaaaaaccggcaccggctccaccgtggattcctgggaactgagcttttttcacagagatgatgggtccatcaaggatttgacacgacatccctttggtcgaatccctcattgaatccttggaggcgaaggggacaaattccaatcctccgggggaggggggggaagcaatctgctaatattatttagcctggtgtgaccactgatgaaattgacagagttgttcatgaggcaactattgctgcaggaggatatacatcgccttttaaataccatttcttccctaaatcttgctgcacgtcagttaatgaagtaatctgtcatggaattcctgatgcaaggaagcttgaggatggtgacatggaaaatgttgat

SEQ ID NO: 96278 - DNA, 249 bp, Glycine max
  unsure (1)..(249): unsure at all n locations
  Clone ID: PAT_MRT3847_57950C.1
caagaatttccattgcatgcaaagcanatacgcattatattactagttttaatttgttttgtcgtttgcttcnttcntgattaatgatgactagctttaaggttgcatgtgtggttgcgatgatgtgcatggttgtggccatgagtgttacacccatggcacaggccgcaatcacgnncgggcaggncgccggcgacgngtctccgggccncaggtatcttngaagcggcggnaaaccgnggancccct

SEQ ID NO: 96279 - DNA, 2075 bp, Glycine max
  Clone ID: PAT_MRT3847_57951C.1
ggaattcggcatcgagcatagctacacatcaagagagtatattatcaatagctattattttctcatgtattttaatgcctcattgcattatgtttgggattatagacccttctttgagggtgtttgattctttttgctctattgaactgttgattcggccccttattacgtttgcattgagttgcgctgttccttcctcctgttgttcgtatttatttcatttacgccgccgtcgtctccgccgcagagagcgatgtcttccgtcgaaacggagatggagccactcacgtcgggggccagcaaccgcataattccgctcctcaaggccctcagagcctccctcatcttcgtctacaccttcttcctctccttcctcctcttcgtcctcccccgccgccgccgcctctcccccgcggcggggccgccctctccgaagaagcatttgaggcggcgctggctcgtgcgcgaggaggaggacacgtgccgcagaagggcgctggcgcaggacgtgggaatgggtcgcgacgaagggtggtaccgctggagcacttccatcttctacggggttcggaacaacgctctgttttgccggtcgtggttcccggttgccggtgatgttaagggcattctaatcatcattcacgggcttaatgaacacagtggaagatatgcggactttgcaaggcaattaacatcatgcaactttggtgtctatgcaatggactggataggtcatggaggtagtgatggattgcatggttatgttccatctcttgatcatgtggttgtagatacgggggctttcctggaaaagattagatcggagaatcctgggataccatgctttctctttggtcactccactgggggagctgtggtcttgaaagcggcttcccatcctcatattgaagtaatggtggaaggaattatattaacctcaccagctttacgtgtgaagccagctcatcctattgttggtgctgtagctccaattttttctctggtagctcctaggttccaattcaaaggagcaaacaaaaggggcattccagtttcgagggatccagcggctttgttggcgaagtactctgatcctttggtctacacaggacctataagggtacgaactggccacgaaatattgcggatatcctcgtacttaatgcgaaacttcaactctgtgactgtgccattctttgtcctgcacggaactgctgataaggtgactgatccactggcctcacaagatctatatgataaggcagcttcaaagttcaaagacataaagctttacgacggcttcttgcacgaccttctgtttgagcctgagcgtgaagagatagctcaggacattatcaactggatggaaaagagattatttactatttgaaaatgttagtatatatatatatatatatatgggggggttaataggaaagggaagacacaagggaagaaaaagggatgccatgtttgtaagtgtagaaaattgaagtcgccctgggaaatggggggaggcggatgcagataggtttattcatcttttcattttagtgttttgaatatatgtattgtgtgaagatctttgttttatcaagaaacttgtacattttatagacttaaatatttcagtagtgtttccatttcgcacatcctatagttggtgctgtggctccaattttttctctggtagctccaagattccaattcaaaggagcaaacaaaaggggcattccagtttcgagggatccagcagctttgttggcaaagtactctgatcctttggtctacacaggacctataagggtccgaactggccatgaaatattgcggatatcctcgtacttgatgcgaaacttcaactctgtgactgtgccattctttgtcctccatggaactgctgataaggtgactgatccactggcctcacaagatctatatgataaggcagcttcaaagttcaaagacataaagctttacgatggcttcttgcacgaccttctgtttgagcctgagcgtgaagagatagctcaggacattatcaactggatggagaaaagattatttactatttg

SEQ ID NO: 96280 - DNA, 400 bp, Glycine max
  Clone ID: PAT_MRT3847_57952C.1
tttttattttttttttttttttttttttttttttttgtccactcgggaaaaagtatcatttttatttttttccgggaataaattatcatctttctttagatatcgaaacccacatcaccttacccagcttatgcaggcatttttatcatccaagataggagtgccccgaagcctccccccaaaagaatgtttttatggaaacagtcagatcaaaattgtgggatccccatagtccatggggatcaggcccaagagcgaaatttttatagaccaagaacagttaacatgcgtgacattttataaaagacccaaggcgctactcccctggtccaggagaagagactgccctggcaatgaaacataaaccggggccagcttcccccatcatcataatatttcc

SEQ ID NO: 96281 - DNA, 591 bp, Glycine max
  Clone ID: PAT_MRT3847_57953C.1
cgttcgcttgggcggacgcgtgggcggacgcgtgggcggacgcgtgggcattgagttgtgctgttccttcctcctgttgtctgtctcttaacaaatcaattcatttccgccgtcgtcgtctccgccgctgagagcgatgtcttccgtcgaaacggagattgagccactcacgtcgggggcgagcaaccgcataattccgcttcttaaagccctcagagcctccctcatcttcgtctacaccttcttcctttccttcctcctgtttattctccctcgccggcgccgcctctccaccgcggctgagccgccgccttcgccaaagaagcatttgaggcggcggtggctcgtgcgcgaggaggaggacacgtgccgcagaagggcgctggcgcaggacgtgggaatgggtcgcgacggagggtggtaccgctggagcacttccatcttctatggggttcgaaacaacgctctgttttgccggtcctggttcccggttgccggtgatgttaagggcattctgatcatcattcacgggctcaatgaacacggtggaagatatgcggactttgcaggctataacatcatgcaactttg

SEQ ID NO: 96282 - DNA, 289 bp, Glycine max
  Clone ID: PAT_MRT3847_57954C.1
ccaacccttccgggaactttgccaccattgtccattgagttaagtaggccacatcctcatgtggaagaatttggtcctgtgggcaaattctactttcttgccaccaaaggagtggaagctattttttgtttattgtcaaaggtttttgttgttttttatgtttaattttacattttaatctgtatctttttttaatttttattttgttttgtttttctacattttttattatttactcttatattttatctttttttataattttattatttttttttatattattttt

SEQ ID NO: 96283 - DNA, 381 bp, Glycine max
  Clone ID: PAT_MRT3847_57955C.1
agaaccggccccggggggggcccggggggttaaccgggaaattcggggcggggcccggggggggcccccgttttccttatgggggggcctttaaaggcggggggataactggggaaagggggtttccggggggaaatggttttcgggcaaaaattccccaaaaaatatcgggccggaacaaaaaagggtaaacccgggggggcctaggggggggcctaccccactttattgggggggcgctaacgggggttttttcaaaggaaataacttggttgccccttggttttaaaaattggaacaccccgggggggggggggtttttttttttggcccccggggggttttttttttccccgtgagaggggccacgttttttttttt

SEQ ID NO: 96284 - DNA, 336 bp, Glycine max
  Clone ID: PAT_MRT3847_57956C.1
tcagctcgactgagctacgtgcgccctttttttttttttttgaatgcaaatggttgagcttgtgattgataatccctcatgaactattccatgatatggggaagacgtacagcaccgtacaatgacaaacagtggatacatcaaacagcaataacacaaaacagaaacaagaaactatcaggacacacgctaagtgggatatgaaggaaaatgtgtgaaaaaatgagtatgttagaattgattagagaaagagacaggcaaagcccaatttggaaagacacgcgcaccgggcgttaggaacattggataaggatgaagagtcccacacaatttaca

SEQ ID NO: 96285 - DNA, 319 bp, Glycine max
  Clone ID: PAT_MRT3847_57957C.1
cggtttcgtgggtgcattttgatttattggcaaaatttgagacagagggcaatgttagagcaagtgcagatttgcagcgcactcattggataaaaggaatgattaaattggtggccacagttggtattcctgagactacaggtatagcattggccagtgctatgaatagtgtttttagggggcgcgccacttctgagatttacaccatctgttctcaagactgggaattatgtaatcctgcttgcacaaaatcaatgactatgccatttaatccaaacccctatactaaatgcaggagtgtcggaatttcctaagcgca

SEQ ID NO: 96286 - DNA, 136 bp, Glycine max
  unsure (1)..(136): unsure at all n locations
  Clone ID: PAT_MRT3847_57958C.1
cgnttacacatctctccaacctttnactttcgtttctnagttttattcgaatcnctctctnaatctctttccaaatggncagcgttgangttgcacagnaaacaccaannacagntccagaanctgnaacnaacgg

SEQ ID NO: 96287 - DNA, 110 bp, Glycine max
  Clone ID: PAT_MRT3847_57959C.1
gaaggtcattccagctcactgtttacagcgctctgtgctccggtcattctcctatgatgggtatgacctcacgatagagttctgcctatagtatgtcgcaacacattacg

SEQ ID NO: 96288 - DNA, 492 bp, Glycine max
  Clone ID: PAT_MRT3847_5795C.1
atactaaagtgtaagcctagtcctttatttataaaaaaaaagacaaaaaaagaaagagaaacgtttatatacactgagtttcaagttggtcaagtaatcaagagaaaacaaagcctactagtagtagtccctgaatgaaggccttgcctcacaaagtgaaatatagagaattgtcaaattcgaaagattggaattcatgcttgtcattagatactccctggatttctgttccaaggcaggtaggacgggtccccaagaggtcttggcttgatgacatagagaagtatgaatcctatggcacagagtaaggataggccaccaacgaaaagatatgctgtccccaagaaaggattttttcctcccatgacagttgttgttgagagaaccagcttctttttccctccaaactcatacgtgttataattggttactattgctatttctatctcatcattcacttcaagggcaacctctatcttcccatatagtttt

SEQ ID NO: 96289 - DNA, 446 bp, Glycine max
  Clone ID: PAT_MRT3847_57960C.1
accggtgcgagaagacacacagaagggggcgcatctctctctctctcgcgcgcgcagctattctctcaaacagccctgcagggttgtgcataacttaactctctatctccgtccacaatgggtaaagctaaaaagggaccaaagttcgctgatatgaaaaaaatagtaacttgcaaagcactctatagctacaaagaagaggttttgaacccagaaaagaacactctcatgaatgataagctacccacaaatgtttcaacttattcttcaacgcttttatttcaatacaacactgcactgggacccccttatggagagttggcggacaccaacttgattaattaatcgatccaaaataaatcggatctggacaaagggacgatggactgtttatatgcaaaaagcaccccttgcattacggactgagtgatggctgaactcgagaa

SEQ ID NO: 96290 - DNA, 219 bp, Glycine max
  Clone ID: PAT_MRT3847_57961C.1
cacaaggagaaagattctgtcgtgttcataggagttttctaggttattctgctccatatcctttgcacccatatctgattctagcattataatttcatcgacgggggaggccgacactacatcataaacatgttcgtgcgggtctgacatttcatatactacactaggaatttgttctgtaggaccttacattgcactgctaacccaaattgaatggaa

SEQ ID NO: 96291 - DNA, 450 bp, Glycine max
  Clone ID: PAT_MRT3847_57962C.1
accagatattatcggccaacgttcgtaaaaaaaaaaaaaaaaaaaaaacacttgcccaatgtcggccgaaaaacagcagtcgggggctatttaaccaccgacgtcggctattgtttttttttcttttcaatccctgaataatatttggatgacgtctattaggaaatgttcgatcggcgtcatccggtgatgcttcttttctgaacctcgatcggtcatctttcctggccgacgtcggctggaattcttttcgatcagtaccgtgaatcatgtttttttgccgaggttggctaatgttttcctcgtgccgaattcggcaccagcctgatcttattgtgttcaagtgacggacaaatccaaacaggaaagagagatttgaaatgtaaatgccaagtaaatgtgaaaagtacagtccatttttagtgatctctttaatttatttgttcatag

SEQ ID NO: 96292 - DNA, 860 bp, Glycine max
  Clone ID: PAT_MRT3847_57963C.1
acaccggttctaggaaatgagaagatatacatcggatacaaacatctttcaaccaacaagtgacttttagcagtttttatccatcagtttttattttaccaatcataacactgatcaatgaagacagaagccacaaacactcaaaaaaacacattacaaatatagttacttaattacacacaagttacctgtgcagagcacaaaggcaattttcctgtcctacatcagaagctatacaatagggttgacagttcccatctctaaaccacacagcacgcttctgcacaagctcattgagaaaatcatcaagtttctcaatggtgacattaggcatcaccacaacatgtgcaacgtttccttggcacgcaagctgccacttgtgcacaaacccttcatcgtgaggcctctcaaacacaacggtgctgctgagctcattcagcatcgctccaatgccagcatccacaaggcgatctttgaagtagtgtgcattcctcaaacacttttgcacctctttctggaagcctctgtagcctttcatgttgaggctgtaccagaggaatatgggggcgtgcccgttcctgcttcccatgattgtggcgtcccttgaagccaggtattcgacgtttctggaaagagcgttgacgtgctccaaccgtgttatctgcacgccacagggcatggggcaccccacgaatttgtggcctgagacctggtcactaccaattggtttcttgaatgaaatttttggagcacgtttgacaaaaggcagcatgagaccaaacaaagccccatcacaatggatatagaacctgtcttgtgaaaatcctgcctcttctagtttctttattaccagatcaagg

SEQ ID NO: 96293 - DNA, 319 bp, Glycine max
  Clone ID: PAT_MRT3847_57964C.1
ggctcgagatcatatcatagctaaaaatttttaggagagagactgagggggaagcccttggcgatacagggagaatgataggggggccctctaaaacaatgcatccagctgaggtcttgggcgggtgaaccgacgttgactgaggtggtcaatctgagagctacaagaagaagcactgctcgcaaaatgccttggctgaagaatttggaagcaatgtggaggaaatcataataccgtctccattacacggaagggggagaatgggcttctctggactggccaagggtccacttgttcctcctgcacactgtatgtcaga

SEQ ID NO: 96294 - DNA, 223 bp, Glycine max
  Clone ID: PAT_MRT3847_57965C.1
attagcaaggacgactccgaagagcaaagcatgcgataacactgagtatttgagaggacacctcactgctgacaaccagatctatcacacatcctgttacggatgataccgctgcgacgtgacccttctggagactaaccattattcttttgagggcgacttatactgaaatcctcgttttgatcacctctttccgaggaccgcccgcttggacaaaaggtat

SEQ ID NO: 96295 - DNA, 503 bp, Glycine max
  Clone ID: PAT_MRT3847_57966C.1
aagaaaataaattgttcttgcttttttatgccttatcttcttatgcaattttgtactttcccaaacataagattaaagactcaatactcaattgcagaacattatgctaggtagataaccctgttacccttagaagtcggtttgaatcttcttctttcttcttattgtttccttacttcctttaaatttctaggctttacgaaagcatgttgttcaggcctgattttaattgatttgctatttccgtgctttatgatgtgcattgtgaaagtattgtttgctttatatgattttgtcccaagtgccaaaggaaagtattgtttttattgcagtgataagtgactcccactcttaagatagaactgaagttcactctctggaaataacaatcgtttgagtttcctcttaaagcactccaaaaggctaatctcgtgtaggaggcatatgcatgtgtgtcattttgtactcttattaaaggacatgcatcatattttcaatttgta

SEQ ID NO: 96296 - DNA, 285 bp, Glycine max
  unsure (1)..(285): unsure at all n locations
  Clone ID: PAT_MRT3847_57967C.1
aaaatagaaaaataaacaaaagaaaaaagggaacganaaaaaagaagataaganaaaaaataganaaaganangaaaaaanacanaagnnnnaaaggaatgaanaaanatctacattgtctgaccnttggactctgaaggagagcccattaggtcaagcgaaaagcatagtgcataaaaggggnaaggangaaagtctgtgcaattaatgcanataaaagncgcatgagtcccaaggacatggaattgatcaacgaaagggtgacatttggcattgccatcagag

SEQ ID NO: 96297 - DNA, 223 bp, Glycine max
  Clone ID: PAT_MRT3847_57968C.1
cagcgccgagcgccgtggccaattcgctggtgacggtgtccgcgttgatgctgaagggctgtccggactcgtcggctgtgacgagtaggtgacgacatgggatgtggttcggtgtccacgagggagcggaggacactgcgggctactcgtgcgacctggccgacgaatccgtgggcggctggcttgtgggcggcccaggcatgaaggactcggtcgtccatgc

SEQ ID NO: 96298 - DNA, 326 bp, Glycine max
  Clone ID: PAT_MRT3847_57969C.1
gaacaccagggggtggggcaataaataccattgggggggaagcctggttaatgggtttgggtaatggcattcaagtggtgtgtggttccttaattggcctatggatgtgacgattataataataataatgtgtttcttggggaggaaaaaaaatggtaaaaggtggcctaggattggggaatgttggaaaattctttcctcttgaattatgttttttaactattaatggtgtttaaaaaaaatttattattaatttaaaataagggtgggtattttatagggttctaagttttcttttgttggtttgtaagttaattatttttttt

SEQ ID NO: 96299 - DNA, 591 bp, Glycine max
  Clone ID: PAT_MRT3847_5796C.1
ggaacttatggcgtattcgaattaattaagagagtgggtagaataagctacttcactgccatgtaataacttgtcattggttctatatatgtttgatgtcgttgtatattcgagacttgtgaaagattaggttgatcctcttttgagcctcttttgtttacttttagtctttttctaatccatgttgaaagcacaaacatggtgtgttgttttatacaattcctcataacaacaattatgcaacagttagaaatttgtctcagaattctaaaccattataatttattttctgttgctttagaggaagcgtcctagcagaatattcgaattggaatctcagaattctcaactcaaagaggatttgaaggtggtgaggaaccagctcggtgtgtctgaatcatgcaagaagcaagctcagcaagatgctgaagagtccaagaagcaagtagcttccctatccttgaaacttgaagattctcaacagcaacttgtgaagttctcggctacagaacaatctcgtgtgttgagctccagaaaaccatagaagagcatgacaagacttggcaatccgagcttatgaatgcccaacaa

SEQ ID NO: 96300 - DNA, 281 bp, Glycine max
  unsure (1)..(281): unsure at all n locations
  Clone ID: PAT_MRT3847_57970C.1
gtcaggttcagatgtattgcacttgagttgggaaaggagtggaaactgggaaattgcacaagatgtccttgccaattcaaatgtcacagaaagcagaaactatgtgacttcaaaggaaatgcgccaatgaggggtgtggttttgtctcttacgatattttaatggctncaaccatatatgatgtgggattatttggatactaaagatggaataggatatgggagctgaattggtttgaacttttggtataaaacttagcctacttttttgtggtagcccta

SEQ ID NO: 96301 - DNA, 333 bp, Glycine max
  unsure (1)..(333): unsure at all n locations
  Clone ID: PAT_MRT3847_57971C.1
aaaacgtctaaggatgggaacttctcttgtttcanataaggggacccgtttttagagtggtcttctatgaccgagataaggtnttgttgccttctccttaagttgggggaaaaggaccgcgggtgtccgtttgtcccagttctaagatgtttttagctctttcgacccctattttccttatgttggttcgctttctctttttgccttccccctcgacttccaagttggctccctcctgcggctcccgccttccctccgacccccgtctctgaattctctgtttcgagatctgacctccgcgccgcgcgcctcccggggctcgcctcctctttt

SEQ ID NO: 96302 - DNA, 958 bp, Glycine max
  Clone ID: PAT_MRT3847_57972C.1
tgcgctgtgcgacgcgcgaggccaagtacttcttttgcatacgttcatattgttatgtgggtattcttttgcttccatttatcatgagcaacatcccaagatctctcaccgactcttccctaaccctcttcaaccttgccatatcatcctctgacccctggcctttctcactcgttttcttatagccctaattaacgtgttaataattctcactccacttttcttaaaccttgctctttctttctttttttcccctatccctttagcttaattttttggctacgttatggggatccttagcgatcatcataatcagaagcatcaccaccaccaccatcatctcatgagttttcatttgcacattcctcaccttcagtactttcaccatcaccaacaacaagagaagaaggaggatctgaaggacattccaaaagggtgtttggccatcttggtagggcaaggggaggagcaacagaggtttgtgatccctgtgatgtacatgaaccacccattgttcatgcagttgctgaaaaaagctgaagaggaatacgggttcgaccagaaaggccccatcaccattccttgccacgtggagcacttccgctctgttcaaggcttgattgataaggacaaatccctccaccatggccatcaccaccatgcttggtgcttcaaagtttgattcatcagtcacactctagcaacatgaatttttaaattttaaaatcatgtacatgatatttcttgtttatttttattttagttttgtcattgttttcctaattttccacgacaccttgaatgtggcgttgtactgttggtataatgatgtgatgacgacgaaaatctttggatcttaatttgcatgatttttttcctttctgggtactattaatgtttgatcaatggaaaatgaaacgagaattataggatttgtaatgtgaaaaaaaaaacaaaa

SEQ ID NO: 96303 - DNA, 164 bp, Glycine max
  unsure (1)..(164): unsure at all n locations
  Clone ID: PAT_MRT3847_57973C.1
cacagagcaaaaacccaacacaccacactcttgcaatcaatnaatggcggaaacttcctcctcgaannccggcggtcctctnctgaangacganctngncatcgngatnccgncgatncggaaacttgncttnctcngaganntngcgggccttttttganccc

SEQ ID NO: 96304 - DNA, 292 bp, Glycine max
  Clone ID: PAT_MRT3847_57974C.1
gacaaggtactgatgtaataaatctacatttgggtaccgatatgataatacgacaggtgtgtttggtgcctcatttccttataggggttacggcgccacacatcgacctgaggcgcttgcaatgtgttcagtcatcacggtttggatttttcgtagtagtcaataccatgctgtgatcactgcatgtgcgctctcgcagatgccacctcacctcagctgtgatgatattacgctcatctcctacgatgctaattatattcaattctatggcacacgctcaacaacatcataa

SEQ ID NO: 96305 - DNA, 229 bp, Glycine max
  unsure (1)..(229): unsure at all n locations
  Clone ID: PAT_MRT3847_57975C.1
acaattaattcccttccgtttatctctttaattactctancctatactggcccctgaaaccatttttaggaggaaaagatacnaccnttcctacatcctcaattatatctccctcactcacaacaccttaacaacatcaatgatattgctcatgtatgtctctgncaaaccaaacaccaatatttaaaataaaaaaatatattaaaactccaactagcttactttcatt

SEQ ID NO: 96306 - DNA, 670 bp, Glycine max
  Clone ID: PAT_MRT3847_57976C.1
ggatttttgttttgggtttttgctcgctgatgttttcacaaaatcggtttccactgatttcgcattcttcactcttccatgtctaaaatctccgaaatggacgttgctttcaaagacgcaaacgccaaatcccctctctgggaacaagtctcaagattcaaacttttgcatcaagaagatatagagtttcaaagatttggtatgcgtaacaatgttgatcagctttgtgtttttgagtgtggaatcccaggaagtgcttgatgctgaactctcagcttgagtttcacagttgataaatgtaactgacagttgaatacagtcaggaaaggagatgttcccttgcaacagatctcagcttgtttacttacgaataaaggatggtactgtgcctgtctgatttttttcagaagtacctcctgaagaaacttaatattgccagtggagcagaggtggaaataatgtgtcgaggtcagccagtgctcccatctgtacaactgcataatttagtagatttatgaattaaagtgtagttttttcctttgtttttttaatgcagtttttttcttactttttaatgcaggttttgtctttattttgtggtgttcatgattactttatttgtttcttatggttgattattggctatttaagaaatctagaggttgatacg

SEQ ID NO: 96307 - DNA, 502 bp, Glycine max
  Clone ID: PAT_MRT3847_57977C.1
gactagcgatcgagtctatacgtagcggatgcgcactggtcccagttcactgtcactaaaaaacaaaacagctgtccacactattagacactcaagttaatccggtaccgcttgttcgccttagtttatcatgagttaatccttcacagcggtgttctcgggggaataaatcatcgtaagctgccgcacgatgtgatcgatgagtggtaagaactatagaatcctagtgcgtactcaggaggtgcattcggtgaagtcagaatccgatcgtgcagtgtagcatatcgcaccatgtaagtttcatcgtcctccgcgcatctccgatgtcgcgtcatgtagggagtctagctgatcacaggtaaccagttcctcagctatatcgccgaacgtatatcatgccatccacgcgatcgatctgtagattcgtcacaacctgtcatcttcccatttcacaaacggttatgatgttcctctgctagcattccacgggtctaacccaaat

SEQ ID NO: 96308 - DNA, 266 bp, Glycine max
  unsure (1)..(266): unsure at all n locations
  Clone ID: PAT_MRT3847_57978C.1
aagccatcccatatccttttgtnttgtnctcttncagtctgtttgcnagtgcgaatgnancaaaaatgggtggnggangagctntgaggtcggcggcgaacatagccggaattggcgtgtccaagggggcgatccggccttngcnctcncctacngagcagacggtccgcaacgcntngctaccaacggnggtctccggantgtcgtcccantcggcaaaatccgcggagtnncnccgtgcacanggnnctgctnggaccttggga

SEQ ID NO: 96309 - DNA, 612 bp, Glycine max
  Clone ID: PAT_MRT3847_57979C.1
gctgaagatgaaaactggggtggtaatggtggtggccatcaaagaaatggcgcattggatcatagatcatgggctacagattttgcaatactggcctcccttccttgcaaaactgaggaggagagggtggttagagatagaaaagcatttctgcttcacagtcagtttgttgatacctcaatatttaaggctgttgcggctatacagcatgtcatggaatccaagtcaaatatcaagagtgaattgaattcttctccgggttctgttctgcatgaagatctcacgggagacttatccattatagtcaaacgtgatatccaggatggaaatacaaagtatgattctatactggatgaatctagcatgcatgaaggggatgctcagaagaatttaatcaaagggttgactgcagatgaaagtgtaattgttcatgtaagtaaataacccaccttgcaaggctatattatgattttttgattgttcaattttccgctttggtgattacaggataacttctccttggctgggtgtgttggacaccactgtcgatatactgcaacagtaaaggttgtgggtattgtgaacgtgaggaagcctgatgtccgggatatt

SEQ ID NO: 96310 - DNA, 236 bp, Glycine max
  Clone ID: PAT_MRT3847_5797C.1
gggggaaatgcagcaagctgggcatatacctttaatggtgatgaaaaaggtgtgcgaataaaggggtattccgggcaacacaaattttaaggaaacctgcgctcttttgtgttccttagaggcgctctcttcctttccacttttccaaacacccagggggtttagcaggttcattggttgcaccgggtggaaccattccgtaacctggggacctggccaggaaacttttccttttc

SEQ ID NO: 96311 - DNA, 389 bp, Glycine max
  Clone ID: PAT_MRT3847_57980C.1
tttttcatttttatcttattttttatatttaatatttttatttatagggcaccaagggccattttttataaaaatatcccaattctacttattaattacaacccttctaatgactataggacattactattacctatgctacaaatggtcctaaaattagattactgcaatatacaatacacattatatatatgctatattgtaatgaatgcatgtatatcaatctttcttttggggaactagagatcaaatccataactgtagaaatggaatatggaataatagcaactctatattcataccgagagacctgatttcttcaataacaacatcgcctgaaactatacaatggcccacaaactatgatacccacatcaacaacgccccca

SEQ ID NO: 96312 - DNA, 1060 bp, Glycine max
  unsure (1)..(1060): unsure at all n locations
  Clone ID: PAT_MRT3847_57981C.1
ctcttcttatctctctgctattggttctttgaggaatcaaagcatatattgttttgaaacttgatgagtgaagtccctggttcccggtttaggtttatgacccacttggttcaatctttctccgttgtcttcctctactggttctatgttttctcgttgatctccagtttcccatcgcatattattattatataacttagtaatatagttatcagtgtctctgggtcctgcgtcctaattaggattagtttattttataatatgtccatgtccatggcctcatcaagtggaaactcctctattagcacaaaatctcagagctcagggtctgagggtgatttgcaggtcgtgataacagacgagaggaagaacaagaggaagcaatcgaatcgtgaatcggcgagaagatctcggatgcgaaagcgtaaccacttggaccaactcactaagcagctctcacagctcgcaaagaacaacggcgaaatcctcgccaccatagacatcaccacgcagcactatctgaacgttgaggcagagaattccattctaagggcccaaatgggtgagcttagccaacggctccaatcgctcaacgacatcgtccacgacatcatcatcaacacaaccaccacctacgaaagggactgttatctaacaagcgcacaaaatttcaccaccaccacctacacgctctgtcttaaccaacccgtttttcagtggtgaattgtcaccctcgtcctctgtggatcttgaccataaaagaaaggaaaagtgtgcgtctgggtgaatcttctcttggaggaatcaatgtcaatcagtgaaaaaaaattaagttcatattagtacagtacttagggtggggctatgttaattgttaaacagaatttgcgcaaagtgcttattgaaaatgacatagtggcctgcaactatatttcagatcactagtactaatcgatcactcttgtccaatatcatggaaaaacagatttcagtgctagtgtaatttactattatttattatacctgtatgtatctattccatggtatgtttgcttnnngt

SEQ ID NO: 96313 - DNA, 204 bp, Glycine max
  Clone ID: PAT_MRT3847_57982C.1
gaaagatctagaaacttaggagttttaaactttctctatcacagaatacaaaaccctaaaactaccaacgtcacccaaccaccacaacctcccttaatagccgccgcaccaccataagcaccaactcgccacccgcgaccaaactccgaccactatcgccgcgccgcatcgtctccgacgccaaacagaaacatctcatccaac

SEQ ID NO: 96314 - DNA, 181 bp, Glycine max
  Clone ID: PAT_MRT3847_57983C.1
gggcctggccattctgtgtcacagatctgctccttccgttctccctcagttgatgagcatgggtcttggagttagcagtggtggtggtctgtattcagtgggttacctttttggcatttgaggggcccctgtcctcatccagcaccttttattgctccagcccatcctgatgtgcaggctg

SEQ ID NO: 96315 - DNA, 418 bp, Glycine max
  Clone ID: PAT_MRT3847_57984C.1
ctcttttcccccccccccccccccccccccccgttaaccgaaggtcgatcaacaaagtaaggataaataataaactagtacttgacccaaaaaaaagtgacctttttagttaccttttacaaatccctgaaaaatttatgatcagcaatgaaaggcaaaagtccaagttttcatgtcaatcaaccaattttttaggaaacccattattttgcaggagcgatgacattaattggggaagggaataaggggtttaccatagccttggggatagaacaggaaagaaaaggggggggggaaaccattatccacacaatactttttgagggaactatccttatttaaaagttcacaatttgaggaccctctttcttctttggttttacatggccttttgttgactttgaggggtttttcttgc

SEQ ID NO: 96316 - DNA, 293 bp, Glycine max
  Clone ID: PAT_MRT3847_57985C.1
agaccatcttgttctttttaaaccagaatgttaagttgccctaataatctaaagctgccaaagtaacacaattatcacttatataacagaattatcggacctcaagagtctaaataaaactgtggggggcaacctactacagggcccatcaccgacccgaggggccaaccgcggactccggggcggaccctggaatcgcggaacgtttccctatggggagccagattacactttggggaacccattgacagaggggcgtcctgttggaaataggtgttccctgagaaaaacgg

SEQ ID NO: 96317 - DNA, 502 bp, Glycine max
  unsure (1)..(502): unsure at all n locations
  Clone ID: PAT_MRT3847_57986C.1
nnnnnnnnnnnnnnnnnnnnnnnnnnnnnnnnnnnnnnnnnnnnngggacgacaaaagtcataaacattttatttgggaacaaaatgcaaaaaacaataactgactgaccctgtttttatcctgcattgcatccaggacaaaactaaaaacagggaaaacggattatttttaaaaaaaaaattgaagaccttaacgaccccgacgttcaacaagaagaagaagaaccccccggccggcaacaaaaacaaagggaatgatgacttgggcgagactttttgaattgaagcccattctttaataaaacccctgctcccccaaattttgagcaacaggaacagcagggggaacattgtccgccccaaaggaagacaaagaccgcacataaggctttttgtcaaaggggcgagcaaggccagcaaccaaaaaccctgctgggttgtcggggataaaatactcctgcgcgcggggcttgagtgtctaaaacattaactcgggctgggg

SEQ ID NO: 96318 - DNA, 453 bp, Glycine max
  unsure (1)..(453): unsure at all n locations
  Clone ID: PAT_MRT3847_57987C.1
cgccctatttttttttttttattttttttttatttttttttnttgcaaaaaaaataacacccatggggagggatttttccaaagataatttgttaaatattttacaactaacaagaccctttcagaattcaattcacttttccttaaagaaaaaaaagaatttcaaaattacatcttttgtactttgccttttccctctttattggggggcaacactaccaaacttaactgaataacattgtccataaaatgcccaaaccgaaaatatctctttggccatcctttttgggcccctattttttattcccttatcataaccatttggtattactggttttatcccacaagtctccaaaaaaagttctggcggaaaccaagcttggaaaaaacggaggttcaaggaaaaaatgagttaacgagccctcccagttttaactcaacccaagtcggtta

SEQ ID NO: 96319 - DNA, 397 bp, Glycine max
  Clone ID: PAT_MRT3847_57988C.1
gggaccaccacgactaaaaatatcctttttaataccctcatattaatggaaatatacccttttttatggggggggggaaattttttaaaaattacaaaatctttttatgggatcatcaaatccgatttgaaacacatctttttttttagttttctaaaaacttcaaccaataaaaaagttgattttcaaaacatttttttcactaattaattaagatctaaaacccttttccagcaaagggttgaaatttggggctgttttcctttgggggcctggtgcatccacaactgtttttttcaccttgatggcattttccttaatttttttccccttttcctccaccagaaccagcctaaagcttttcaccaacccatttttggggaacactccaccttcc

SEQ ID NO: 96320 - DNA, 485 bp, Glycine max
  Clone ID: PAT_MRT3847_57989C.1
gtgagattaagctagagaacataaaagatggacctacaacctttgagcagtccaagatgactctggagaagctcttgacgtatggtaacatgcttgtccaagaacaagagagtgacgagagagaccgcttggctgacaaggacttgaacgaggctgcacttgcaaatgctaacgacgatgctattcacaggggaacattcttacgctcgtgaattggcggcatcgcaaacttggcaaggaaatatgactgttcctgtagggggatctgatcctagtgctggaagtggagaggggacttgcgagtggcaatcttagacttcatggcgcttgaggtgcattgatgacaagcccagacagacaacagcttacgatattctctagagaggactgaattactctgaaattgcgagttaaagtgtccagtcaaattgaattgggcgactggctcttgtgagatattcagaaaatgcggaatcctctgaatg

SEQ ID NO: 96321 - DNA, 268 bp, Glycine max
  Clone ID: PAT_MRT3847_5798C.1
catcatgagggagggtcccaaccttctcaagttggcgaggaaggaacagtgcttggctcttggaactaagctcaagtcaaattacaagatcaagtaccaggtttacaaaatcttccccaatagggaagttcagtatttacaccccagaaataatatttacccttagaagatcaaccccgaacgccaaagatttggtcaaaacttgagatctattaataacaatattaatccgattcaactcaaggggactagcaagcaaccctatgat

SEQ ID NO: 96322 - DNA, 627 bp, Glycine max
  Clone ID: PAT_MRT3847_57990C.1
attgctgtaatagtggggactgtaactgatgatatcagagtatatgaagttccagcattgaaaattacagcactcaagtttactgagagagcacgtgcaagaatagaaaaggctggtggtgaatgcttgacatttgatgagcttgcccttagggctcctttgggacagaatacggtatgggtggctaacaatattgacctttgtaattttttggacggaattgttaagccttactactgtggttgtgtcagtaaatctaatattggttcttgctcacattgttgaatgatattttttatgacaccttcagattggagaataggtgtctattcttttgctggaatcccaagtttactgccatactactgtagcctctggtttaaataattttttctttggtagacttcatagattcaccaatggtcataacgttttgagtttgattgcttaaaagagtaactttttttgtttgttggcatgcattgttggaatattgttcatcaagctatgtgtgttaatatactcggtatatattatcttatatgggatcatgaacttgggtatgttgaggagcaagcttttggaaacataaatttcattttatgttgttgaatgcaggtccttctt

SEQ ID NO: 96323 - DNA, 429 bp, Glycine max
  Clone ID: PAT_MRT3847_57991C.1
acgaggttcctcttcatcatctttgcttcagaagcgcaccggaaaaccctaggccgtgtgcgagagtctgattctttcacccaaacatacacagaggctattttttcagctattgccaacaatggctgatggtgaatctgacaagaacattgagatatggaagatcacgaaattgatcagagcattggaatctgcacgaggtaatggcaccatcatgattactctgattatgcccccacgtgatcaaatatctcatgtcactaagatgctgtgagatgagtttggaactgcttcaaatatcaaaagcagggtgaactgacagtcagtgatgctgccattacttctgctcaacagaggttgaaactgtataataaggttcctccaaatgttttggttctttatactggcaccattgtcactgaagatggc

SEQ ID NO: 96324 - DNA, 454 bp, Glycine max
  Clone ID: PAT_MRT3847_57992C.1
tcctttttttttttttttggttcatattatttttttacatttttttatcatttatttttttaattcttgtcgaaattgtttatgatttttttacatttttctattgtttaaaaggggaacagcttaaatacatataagtgaaatactgggcttgggggggaaaagtttatacactaactagactctttccaagaattatggtcatccgttgagaaatcatcctattggcggtttttcctataccaaatgaaagttggccaaactgcaagaccctgtacaagcccaaatacagggtgccacccagcgctttataagggtctcaattgatgcggcgaaatgctggaaaccgaaagtgaaatgatttgtttttacccactgtaaaaggggcacccgcgtagtgaatgatctttggctatgggaacccaccagacttagcacatgctcttgctaatcc

SEQ ID NO: 96325 - DNA, 335 bp, Glycine max
  Clone ID: PAT_MRT3847_57993C.1
acccttttggtttttcaccagcagaacgataacactatatggattttttttagttgggttcctttggacccacaccccccccttatgtcaactgggaaggccaatttttcctacgggaacaacaaacggccaattggggaattaaaatgaagaggtttttcctaaaaccctcaattgaggcaattcctggttggggtgtatacttttttggccaaaagaattatttttggggaagggagggggcacttcctctcttggagaggtaccaaaattttggttgcgagaggaggatctatggcagccacactatgagtgctcagtgccaaagaagaccg

SEQ ID NO: 96326 - DNA, 740 bp, Glycine max
  Clone ID: PAT_MRT3847_57994C.1
gcgcgacggcgtagtcggcgcttgcccgcgcggcgtgctggcttttgcgactggccggatggtgtgcgagctcttggtacacttggacgtcccaatgacgcaagaggatccaccgtcatcagcggtcttagcgggcttccctcctcgtcagagggggtagctgccgtcgctcctgacgaaacccctgagccgaaaacccagtgtgctaagcggttgtgccgagctccctctggtctggtttcggaactgcccgtcctgcctcggggctgattgctcaatcggccatccaccttgcaggttgataggagaatcagtaatgtacttggcagtgattccgaagataaagataaagatgaagaaaaagaagaagaaagagaaaaagaggaagaagaagaagatattgaaaagacacttagtgtcatacttggtaaattcaaagagatttgtgcaaacaacagcaagaaagcaattgggaagaaatcgatttcatttttgctgaagaagatgtttgtttgtagaagtggatttgctccagcaccgagccttagagacacccttcagctccaagaatcaagaatggagaagcttttaaggacaatccttcacaagaaaataaattcccaacattcttctcgggcattgtccctcaagaagcgcctcgaggacaggaagatgccaaaggaggatgaagctgaaaatgatgatggctgtaaatgggtcaagactgattctgaatatat

SEQ ID NO: 96327 - DNA, 947 bp, Glycine max
  Clone ID: PAT_MRT3847_57995C.1
gatggcgttgtcgatgctgatgatgaggaggagagtgacgcggatgaggaggagacggagtcgtcgaggcggatggttgttaatggggagggccaccgggagaatggttttcgggttgcgcccgtggagggtgacgacgtggaggaggaggatgacgaggatgattccggggaggagattgatgaggaggagggggatgacgatgatgtggtggaggttcatgagattgaagatagtgatgatgaggatggagtggaggagtacgatgaacgggacgatgacgaggaggatgatgaggaggaggaagaggtggataacgacgagggtgattttgcggagcccgagagtaccgggaggctgacgagtactgatggggagattgatgggcatgatgccagtgcctttttcatcattgaagtatttatctaatgcaggaattgagatgaaaatgaattcttttgcagataccaggaacagcatagcagtataagctgcaattttggttttggatgctaataaattattttgatattcttaatgatgggtgttaataagttagttttatattttttatttttctgtaagaaagcttcagaatttgtgtttttttttttttgcagatcctttgtatattcgttgaaattcctctttttgattgtaggaaatctgttgtgttttctttagtattcttattctcttcaatgacatgtggcagtcccaatttttttgaatgttgattttgataacttcaggattgtaatgcccatcctttttttatgggtcttaatatgttttgttgtaataatgtttgttgtcttccaaagttatttttttaggttaggattttgatgttctacgatggggacatggatcatttgcttgattagtgtttcgtgagattttgttgttccatgtgctgcttctgctctgatgcttttgtaagctta

SEQ ID NO: 96328 - DNA, 385 bp, Glycine max
  Clone ID: PAT_MRT3847_57996C.1
agtcggcggccgcccttttttttttttttttttttaacttttgctttttttttttgcaaaaatactaaatcaagtatgagactcaattgtgggctccccttatgttatggttcactattggacgtttattgcagtataccgcgcaagggctggctatctcgctgtaaaaaaatggttttgtgctggtacgtaatcataaactaactttgctttacaaagcttttgtatgacctccgcacgaggatagaccttcgcaaacttaacagcttttttttaccggggtgctttcaactccttggtacgttagatgcgacttgaatcatcagcactcacgggcggaactttcactgtgatgctaattttttacgagaacaattgacttcta

SEQ ID NO: 96329 - DNA, 1930 bp, Glycine max
  unsure (1)..(1930): unsure at all n locations
  Clone ID: PAT_MRT3847_57997C.1
ggctcgagcaaaaaacgcgtttggtgtgtgtgttcgctctcaccactctcatgccactggttaacggaggcgatacttaaaacaagcgttgggggggctttaagacggtgtcgttttgtatgagacataggatatcgtatttgatggacgagatctgggagagagctatggaaacggcgttggacggcagatggaccactcggcggctcggacgctttccctatatctgttccgtttattgcttgtaagttattttatctttcttagtcttctggagcggttccagaacctgcagcacctatcgatagcgaacgtcggcgtttcgtcgctggagcagtttccgcggctgaggaatttgcagaagctgaacctctccgacaaccggatcgccggcgggctggagtttctcgtgcaggcggggctggattcgctgcgcgacctcgatttgtcgaacaatcggattcagtacattgaggatctcgcgcccctcgcgcaggtgaagctggtctcgctggatctgtacgagtgccccgtgacgcgcgtgaaggactatcgatctagggttttcgggttgatcaagtcgttgaagtacttggacaagatggatgcggaggagaacgagaggcccgagagtgacgacgaggaggaggatgaggaggaggaggaggaagaggatgaccccgggagcggcgagattgacggcgctgaggaggatcggccctttgggattaacaatgggcacagtgagggtgctgatggcgttgtcgatgctgatgatgaggaggagagtgacgcggatgaggaggagacggagtcgtcgaggcggatggttgttaatggagagggccatcgggagaatggtcttggggttgcgccagtggagggggacgatgttgaggacgaaagaaggatgatgaggacgatgatgatgaggacgacgatgaggaagaagaggtggataacgacgagggtgatttgtgttgctttagagaaccgggaggttgacgagtactgagggtgagattgatgggcatgaagtgagataacccttttgacttgtgatttttgtttaatgcatgcttattcacttgtgtactttttgtggtgattgtctcggtttggtgtgatgttttgttgttgtcgcattggtttattgaagaaccggtcttgcttgctattcgtattggggtaattctgttgactgatgcttatgttgaggtagatttgcactgttatttctttgagttgtattattggcttcatatgattgaggattgcgcgctgctcgcgcattttaagctgtttgcgttggatctgtacgagtgcgccgtgacgcgctggatggactatctgtctagggggttcgggttgatcaagtcgttgtggaacttggacaggatggcggacgcgtggtttgaatattctaattcaactatttgtcactatcttatctgaggaacagtttgcatgttattgtgtgctgctgttttgatatcctgtaattgttgtctcttaaatggaacttatgaagcattttgtctaactgccagtgcctttttcatcattgaagtatttatctaatgcaggaattgagatgaaaatgaattcttttgcagataccaggaacagcatagcagtataagctgcaattttggttttggatgctaataacttattaacacccatcattaagaatatcaaaataatttagttttatattttttatttttctgtaagaaagcttcagaatttgtgtttttttttttttgcagatcctttgtatattcgttgaaattcctctttttgattgtaggaaatctgntgngttttctttagtattcttattctcttcaatgacatgtggcagtcccaattttttttgatgttgattttgataacttcaggattgtaatgcccatcctttttttat

SEQ ID NO: 96330 - DNA, 291 bp, Glycine max
  Clone ID: PAT_MRT3847_57998C.1
gagaaactaaacacacagacacacctaataattaatcgaaacaacaaggcaatcacaggggggtaattaaaaaagtgaatatttaagttccccccgaacgtataggggatcagcattaatttgcatataaattacattatgtaaaaaaccaaaattctgtatatgaaccttaattacaatgcaaaacaaaaataagttacagaacatcgagtaagtattggactatattaatattaatcttaaatgagactaaatttttaaaaattgaattataataataaataaatatat

SEQ ID NO: 96331 - DNA, 413 bp, Glycine max
  Clone ID: PAT_MRT3847_57999C.1
tgatgaggaggagagtgacgcggatgaggaggagacggagtcgtcgaggcggatggttgttaatggagagggccatcgggagaatggtcttggggttgcgccagtggagggggacgatgttgaggaggaagattgatgaggaggagggggatgatgatgatgtgggtggaggttcatgagattgaggatagtgatgatgaggatggagtggaggagtatgatgaggacgatgatgatgaggacgacgatgaggaagaagaggtggataacgacgagggtgattttgtggagcctgagagaaccgggaggttgacgagtactgagggtgagattgatgggcatgagcagggggaagaggatggggatgaggatgataatggggagactggggaggatgagaatggcgtagaaga

SEQ ID NO: 96332 - DNA, 300 bp, Glycine max
  Clone ID: PAT_MRT3847_5799C.1
aattcggctcgagaaaaccggggggatgcaatcaaaagcgacgttctcaccgactagatgaacattgggaccctaggttaaagcattggcgacggagaaccagcactcttttcaacctcctgttcctctttttaaccattttactcatgttctactgctgctgctgcatcactactctacatacaacatgcttgtgctctcggcttcgggtctgataccagatgtcttgatatgtgcttaaggaacctattgtcgcttggacaaggttcgtgtgatatgactaagaagtaccttagacga

SEQ ID NO: 96333 - DNA, 152 bp, Glycine max
  Clone ID: PAT_MRT3847_579C.1
gaacaatcgggagatattgtaatgtcttgcttgatacatcgttcaatacgttttcgaacacagagaatgtcatgctaatcatgtggatgcacattaaggatgcaagtatcgagtattaatatctcatgccctaaagatatttactatccaaa

SEQ ID NO: 96334 - DNA, 351 bp, Glycine max
  Clone ID: PAT_MRT3847_57C.1
cgacagacggggacactctcttttctctctctacaaacaatatcaagacatcttcatctaattaaccattaatcaccaacaatattctcctgtgacttcaggggcagcggtgggtcagagcaacccaaacaaaccaccaccacctgttggttatcccacaaatgatcatgttccttcccaccaaaatgttccaatcaaaacctctattatgggtgatcgctttttccacggatcttgtgctggattgttctgttgctgttccctcgattgttttctcctattccctttattcctttcggcctatcccctctgtcctttgtcattttcctttacccacttaactttttttcc

SEQ ID NO: 96335 - DNA, 518 bp, Glycine max
  Clone ID: PAT_MRT3847_58000C.1
cccacgcgtccgcggacgcgtgggtggcagttcaagtagtgattcctcatcgtcaagtgattcggattcggggagttcctcagggagtgattctgaagcagacaacgggctttcgtagtagccagtgagtttttggaactaatggtatcatgtgggtggggtaggcgcggatgaagaaaatgtttgctttcattggattccttagagggcgttggtcgaatacatggagaagagagattgtgaccgttgtttgttggttcgttttgggagtagaggcggaccacctgctccaggatttgtggtgtgacatagatatagttgtacaaattatttcgggaaccgaagaaaacaatttgtaggccagaaagtagtggacttaaatgttgtgaaaattctaagatagaatcgttaaagattaggaatagaaccgggagaattagtgttttttgagtttaccttgtacacattactacagtaaatagatggaacggcctccttcgaaaaaaaaaaataaagac

SEQ ID NO: 96336 - DNA, 131 bp, Glycine max
  unsure (1)..(131): unsure at all n locations
  Clone ID: PAT_MRT3847_58001C.1
cccacgcgnccgggcacgccagcgagagacgaaagacacacgacgccaacgaagacgacccgaggaacaccgcaggggggtttgtgaggaacctgaatcagaacaagctcattactgaggcttacttagga

SEQ ID NO: 96337 - DNA, 138 bp, Glycine max
  Clone ID: PAT_MRT3847_58002C.1
gtccctggaagcaacactgtgaaccatgatgaggaggggtgattatcgaaactggatatgtccattcagttagaaaatatggccttatgttggacagagggacaaagtgtggggtgcaccccgagaggtgataggaaa

SEQ ID NO: 96338 - DNA, 638 bp, Glycine max
  Clone ID: PAT_MRT3847_58003C.1
tgtagttgaagctatttctgtgaggaaaaacttaagtttgatcgccattgcacccacgcgtcgcacgtggtgcagagtagtgattccttcgtcaagtgattcggattcggggagttcctcagggagtgattctgaagcagacaacgggctttcgtagtagtcagtgggtttttggaactaatggtcatgtgggtggggtgatgaagaaaatgtttgcttcattggattcctttgagggcgtggctcgaatacatggacaaggtatgctcatctcattttatgtattatttttttatgctgtgaatattgtcgcagatggatatgataggctaaatttgtgattacttttcatttcagagattgtgaccgttgtttgttggttcgttttgggagtagaggtgatggcgtccgctccaggatttgtggtgtgacatatttgtacaaattatttcgggaaccgaagaaaacaatttgtaggccagaaagtagtggacttaaatgtggtgaaaattttaagatagaatcgttaaaaattaggaatagaaccgggagagttagtgtttttgagtttaccttgtacacattaccacagtaaatagatggaagactccttcgaaatttgcctttttttgtggatt

SEQ ID NO: 96339 - DNA, 814 bp, Glycine max
  unsure (1)..(814): unsure at all n locations
  Clone ID: PAT_MRT3847_58004C.1
cccaaaccaacaaaatgcttgaattgagtgaatcccactccaaaaacttgcactttcccctcactcacatcattctcttcttcacatgtttcaaactttctaaagcacaatcctccatggagccagttcccacctacatcacccaccacagctgggagccttctgtcgtcatcaccgtcggcgccatcatcatcgccctcctcttaatgggaatcatctcaatctaccttcgccgctgcgccgagtctcacatcatcatcaccacaacccaaaccaccaccaccctaccgtgctcctgcgcgcaggggatcaacagggagctcctcaacacgttcccaacgctcttctactccaacatcaaggatctcaagaaggggaacgaaacgctcgaatgcgcggtttgtttaacagatttcactgacaaagacgcgcttaggctgctccccaaatgcaatcacgtgttccaccctcactgcattgattcctggctcgcgtgtcacgtgacatgcccggtttgtcgcgcgaatctcagccaggaatcctcccatgtttccataaccgtccctcctcataacgaggaagagggttccagaaacacaacaacaaacgaagctacccaaattgagcaaagtacaagcaatgacgttggtcaagtttgtcttggagatcctacaccgaccagtgatgcggctaanataatgtatataagtgaagagcagcaacagcaacactcgtcttccgagccgacttttgaanttgagttagacccaacacanattctactactactactattaacantaatggtggcgat

SEQ ID NO: 96340 - DNA, 182 bp, Glycine max
  Clone ID: PAT_MRT3847_58005C.1
aacacaatggcattgcaggcaccacctagccttgacaccgccaatgcgaatgctggtctgagacgacccttgatgaatccttcttctctctctctaaagtcatctctcttctctggctccctcaatttctatattgatcccacatcacctccatcttacttcagctccacccaggatttcca

SEQ ID NO: 96341 - DNA, 585 bp, Glycine max
  Clone ID: PAT_MRT3847_58006C.1
tgataatggaactcaaggggatcattccaactcatcggatcacttgtctatctctctcaattaattcatcaacaaatcttttctgggaatgggatgtcttcaacatcttcacttctttttatttctcacacaaaaaaagttttatatttgtttctgcaatatatactaattactattttattctaaaaaaataaataataatgtatgtattgccaaaatcatatattaaaaatacaaatacattttaatatacatgattcttatcttgggtgttgtaactttgaacctaaataatggtggtaaataagaagaaacagatgaatatgatttcaattttaattattattgttgttgatgaatgatggttggtgaatttcttgaatggacactattagtttcgttttttcatgatcctaggattaatcttagttgattcgaatatggttgtctttcagaaaaaatatttgaaatttatatatatatatatatatatttaaaatcacattattacttgcttttttggttatgtaaaagaaaactctgaaactgacactattacttgctttgttgcttttcaaacgttgt

SEQ ID NO: 96342 - DNA, 340 bp, Glycine max
  Clone ID: PAT_MRT3847_58007C.1
tggtaccctgtcgtacgctgcggaatcccgaggtcgaccagccgtcggtacgctgccaaaagaacaacaaaagggtcacaatcaaacgggaaaaggcgtcttcaaaaacgcggcccaaaacttctcctacccttttattcattcaattcgtttctagggtttcctttcctttgccgagaaaaatgagagattgcatttcaatccacattggcaaggccggtatccaggttggaaacgcctgctgggaactctattgccttgaacacggcattcaccccgatggacagattcccaagtgacaagaccgttggcggaggagacgacgccttcaacacatttt

SEQ ID NO: 96343 - DNA, 442 bp, Glycine max
  Clone ID: PAT_MRT3847_58008C.1
caaccacaaattttgcagggagattctgttaagaagaaattataatgtcagaatttttttttgtataattaaattaaattgagctaggtcaggtttctctttctttctattttgaaaatcaggcacccagaaaaactgttgatgggccaagcaaaagagagtggagatgcggaagtaaaagcagaatacagattctcccataagtaataatactgtagtattatgttccttctcttttggcttgtcttattaatgttgtctttttttctcatggaggaatcagagggcaagttgaaagcaattcttggttacactgaagatgatgtggtttccaccaactttgtgggtgacagcaggtataaacagttgacaagttaatgaacacacatggttgtatggtagtggcatctgtccaaccaatccaataattattaatcccttt

SEQ ID NO: 96344 - DNA, 382 bp, Glycine max
  unsure (1)..(382): unsure at all n locations
  Clone ID: PAT_MRT3847_58009C.1
acgagaaagactaaagaatcagctgaatacgtcaaagataatgcagaggcagtgaagaagaacatgaactcaaagaactgatttaatgtctccatcatatttcatggttaccatttaagcactttttttttcttttttctttttatactaatttcattttgttatgcatggcatcaaatatggagaggatcgatcgatatgtctcttcccatgtgccattgattagtttgaaacaaaaactcattttgtttcaattatcaataaatatttaagcctttcattctaaaaaaaaaaaaaaaaaaaaaaaaaaaaaaaaaaaaaaaaaaaaaaaaaaaaaaaaaaaaaaaannnaannnnnanaaaaaaaaaaaaaaaaaaaatt

SEQ ID NO: 96345 - DNA, 362 bp, Glycine max
  Clone ID: PAT_MRT3847_5800C.1
aggaaaacagcccacacatttatttatacaaacaatacattattgggaaatttgtatggccaaacacatggaaaatacattttgatacatattccttaacggccacaggggcaaaccgtgcaagagcaactagggccacacttgccctccccaaaatgctcacctggtgaaacatccatgacaacagtgcacatgaaattatttaaagtctctaaaataaccccctacctggtccccttggggcacccaggcttgccaacgcacccccactttccgcatgggataaacatgtttggctctcgggaaaaaaggtaaactgcacggaatgaacttaacttctccaaatcaaggcttccaataaa

SEQ ID NO: 96346 - DNA, 448 bp, Glycine max
  Clone ID: PAT_MRT3847_58010C.1
ttataatcttttaaaatcgaaaatcaatcgtggaccacttctaaaacacaagagacaccaccgatgatgatgatgatgatattaaagcaacatgaccaggagtcagagagagcaaaggtgggtcctttgcatgagagtcttgagtggttaatggattgtactgctgccatgtggttttctactccaaaaaggaagaggggaaaagaattcgtaacatgggcaggattccctgtaccggaagctcaaacactaggaatattgatgaagaagaaattggtgaagatggaagggccttatgagcctctgtgttgcgatcaaagccacccgagggaaattaaagaggggggcattcatgaataacaaagattctgttcaaaaatgggaactctgagcacattgatgtacatacatttgtatttcgcgagttgagcactgcaactagaaactt

SEQ ID NO: 96347 - DNA, 357 bp, Glycine max
  unsure (1)..(357): unsure at all n locations
  Clone ID: PAT_MRT3847_58011C.1
cagaattatccgccccaacagaactttgttcgagcatcacagttttatccaccccaacanaattatggccagagatcacagaattatccggcccagacgagaactattgccaggcatcacaaaattatccaccccaacataacttttgccaagcatcacaaaattattcaccccaacaaaactattgtcatgcaccgcaaaattatcctccccaacaaaactttgatcaagcatcacataattatccccaacagcaaatatattgtccatcttcaccacaatatgcacaacaacatatacttttaccaccatgacaaggagaaagaaaaaattatattccacaacataacattttac

SEQ ID NO: 96348 - DNA, 524 bp, Glycine max
  Clone ID: PAT_MRT3847_58012C.1
ataaacttcggtaatgtcggcctcgaggctggaagatctgtcaaaggtggataggaaaaggacaccttggctgcttgtgttatttcatgtgccatggtataatagtaacaaggctcatcaaggtgcaggagatgatatgatggcagctatggagccgttgctttatgctgctagtgttgatttagttatcgctggtcatgttcacgcttatgaacgttcagtatgtctttatggtttagcattttatcctctttgtaagcaccatttagtgggaaccgggttttaatactctctctgattgtcagaaacgtttgtataatggaagattggatccctgtggtgctgtccatataactattggtgatggaggaaacagagaaggcttagctcataagtaagtttcacagccagaaacatcccacagaaatctgttctctgaatcgtttgttatgtgaaaaaaaactatattgaggtttatcgtcatgtatgcagcctgaaatttgtttttctgtcattgttgctgg

SEQ ID NO: 96349 - DNA, 492 bp, Glycine max
  unsure (1)..(492): unsure at all n locations
  Clone ID: PAT_MRT3847_58013C.1
gccgctcagcggccggcgggaaatcctccttctcccacttgactccttctcccaaccctctcantattttattatacccaacaagaattcttcactcactcttaatttcttatggnatcatccgagaacgtagcccgcattgagccatgcatgcttcccccccctgcccccgattcctgantcgccnagaccctccctcgcgacccccctgccttaccccccgctcccctgcaacccccccccccccctgtcctgccgtcccacgcacccccctctccccctttctgccccaccaccacccccccacccaccccccctccccccccccccccccccgcccactccccccccgccccaccccgccccccccccccccccccccgcccccctcgccccccccactccccccctcccctccccccccccncccctccccagcgtatcccccccccgctccccccccccccccccccccccacccccccccccccc

SEQ ID NO: 96350 - DNA, 346 bp, Glycine max
  Clone ID: PAT_MRT3847_58014C.1
gagaaacaccgagaatgggaaaaacagcgacgcggagaagaagccaatttggaaagccggcagatccaatctggaattgcgcgtgcaaagaattgccggggtggggagaagaagaaatacgctcacatatcggaccaaggctcccatatacttagctacacttctcaaatacgtggctaccggaaggcgggagttaacgtaaaataccacacgtgacaacaggaaggacgggattattccaagacacgtacttttagcaaggaggagcgatgaagagtgggagaaagtactgactggagtaacgaggacgcatggtaacggacttgcgaacatcagccctgtggtt

SEQ ID NO: 96351 - DNA, 1157 bp, Glycine max
  unsure (1)..(1157): unsure at all n locations
  Clone ID: PAT_MRT3847_58015C.1
cattaatatcccattcgacgtgtgcttctcgccctctcgacatgtcttctagaaaattcactatccaacattgaaaagagagagagagcttttttgtacacttgataacatgtcttcatattttccaagctttggtacaaaaatcccacgtatggggaaggggtacgatgatgtgttgttcacagtgatcaaccaattagttaaaccaggttcatggtccaactataaagtcccctgcaacctctcaaagcaacacattggttttgtatcgaaattcgaccaaatttgttcttctcctgtgatgatggaggacgagcataaaaagttggattctttgcctgaaattggattatcagagccagagaaatattccaaggaattggaggtggctgttagagcagtgcaaatggcgtgttccctctgccagagagtgcaggacactttgatttccaacgctcggaccaatcatcgtcaggttcagtccaaggatgacaattctccggttacggttgcagattggagtgttcaagcaattgtcagctggatgttgtcagaatgtttagggagtcaaaatgtctcaattgttgctgaagaagatgctcaaactctctccgaggctaacgcatctgagctgttagaagctgtggttgaaactgtgaatcaatgtctagccgaagcacctcgatttggagttcaggagccaaaatcacctcttggaacttcagatgttcttgaaatcattagtcgctgcaactcaactgggggtcccactggaagattttgggtactggatcctgttgatggcacattaggatttgtacgtgggagatcaatatgctgtagctctagcactcatagagatcgccgctgtcatacgtggtgttcctggttgtcccctccaccctctgaagcttggatcgctgggtgtgcgccacctgcttcatatggttgtatccaatttgacacgtccancttctaaaacttaaaacaaatgttgtatactatatactaaaaatggtagtgaaaaagcttggatacaaccactactccatatcaataagatattagtatagccaaaccatacaaaacgaagttctatctctggcattgacaatcctacactaaccactttgtatgaaccagttgagataccgaat

SEQ ID NO: 96352 - DNA, 565 bp, Glycine max
  Clone ID: PAT_MRT3847_58016C.1
ttgttcaagagatttcaaatggtaagaaattttaaagggttaatttgtaagatgaatcagctattcaactaatagttattgtctttacaatttaatgaatttataatgacaacttacaagtagactgtgcacttgtgtttccttgttctattaattttatagataatgaatggtttctatctagactatgtttgttcaaggcatttcagctagcttctagctttttttactagctgagaagctcatgtggttgtttggtaagcatgctttttttagtagcttctaacgttttttgaaacgctacttgaagtagcattttttgcaatatattaaatttgaacttagtcatcaattatatctgaaaatttgatttcttttaacatcttccaaatatataaccgtaaatatcattgaatataattttcaaaattaaagacagattttttacaggatttctttttagacgcatataaactgcagcattttacatataactaacatatagaaagcttgaacatacagatatttatgataaagcttactgttattcttcaatttccttaat

SEQ ID NO: 96353 - DNA, 348 bp, Glycine max
  Clone ID: PAT_MRT3847_58017C.1
acgcttacttccaacccttctgattataatgggtcttgtctgttagctcaagaacacgggtgcagctatcactctgaccatgaatcactcatctccctgcgctcttaactattgccatattactggagacagagagagagttaattatcacacctgcaactacgccttttgttattgtcaaccgacggtggccctattcaatggatgtagacaactctggccactcgatgaatagaccggatctggcgattaccattgactacagtgcagtgaccgggaaccctataggatacgaagatgaagtcagagaaagcagcgacgagtctagatacggagctattgacgtaa

SEQ ID NO: 96354 - DNA, 699 bp, Glycine max
  Clone ID: PAT_MRT3847_58018C.1
aggtagtaaaggcttttattgtcctgaatcctgattacaagtcccatgatcaagagcaactgaaaaaggagatccaggagcacgtgaagaagactacagcgccttacaaataccccagaaaggtaggcgtccctggtaccagggatgtcagtccagtgctttggacagttttctcctcagatatactatgcgagaggtttcaaacagagctaatgacaatagttaatcaaaaactccgaggctaaaccgaagcccccaacataattcagtcaattagctcataattttaatgtaaaaaacaaaaagaacaaaacctaactttatcctttcacctagagtttgaaacagagctcttgagtaaccggcatgacctgaaggaagtgaacaagtgctggactaacctcttcctgcccttactaccaacaggtagaatttattgaagagctgccgaagactgtcagtgggaaggtcaaaagaaatgaactgaggaaaaaggaatgggtaacaacttgaactcctcccactaatcacctgtgtagctataaacacagtgtctacaagtctgcaggaaccacagattatgtgggcagactgctttgaaactggattgaaagtattttgtagttatgacatcagagcctgaattctgaaatcaaataatcattattgaatccttctgcattcatgtcaatgctcctg

SEQ ID NO: 96355 - DNA, 481 bp, Glycine max
  Clone ID: PAT_MRT3847_58019C.1
ctcacgcgtgcgtgcacgcgttcgaggatacatgcttaggatctcttaaatgcgattggataattcttacatagggatacgaaaatttaattctattatagtggcatctaaatttaattatttggaaaacggtgtagatcgtgaacattgataaattgctggagatacccattttaatagcttgggtaataattaagatgtccgcacctattgtaatatccaacaggtgcgcatccataatggttaataagaattgcacatgtctggatggataaagggaggcggctttgggcgttacattaagcgcgaccgttatagttgtaaagggcatagcgacagctacagtggctagcttgctagcctttattgccacggttgttttcttttcctgtctagctataaatgcggggttgccttgtggaactctaaatagagggctacctttatggtaccgaaaaaaagttttaatgggtgatggttc

SEQ ID NO: 96356 - DNA, 409 bp, Glycine max
  Clone ID: PAT_MRT3847_5801C.1
ctctctgggcctccacttacgaatccattgaatatacaatcatgccggacgaccatcaccgtgtagagtattaggccggcggcggagccttcaaaccctaccctcagcatgccggtcccatcccaaagaacggatacattgccatcaaacgccgaccctgcaatgttgtgcaaattgcaacttgcaaacctgcaaaccacggccaccctcaacgtcactatggagaaatcgatatacccactgccaagaatcttgaggatattgcacactcttctcacaactgtgacggtcctcacgataatcgtactgattaccagctcattcaccttgcttaagatggatgccagaatccactcactgaaaatggtcacactaaagatgaacctaagctttccactgataagagtct

SEQ ID NO: 96357 - DNA, 302 bp, Glycine max
  Clone ID: PAT_MRT3847_58020C.1
gatctcgaagccaccgtcatcgacgaagtccgctgctgctcccgccgtcaactcttgcatgccgaacaaggaagatgccgccaacaacttcgccagagatcactacaccggcaactatctaccgggaggagcataatgtagttgacttgtacatcattctccttagatttttaagagatcacgagctgtgttggatgagcttgaatctttgaagcccaaatttaaacatcgggtggaaaaaatgaatgactagcatgtaaaagctccattgcctgaagaaaatgggttcaataaagctttgc

SEQ ID NO: 96358 - DNA, 343 bp, Glycine max
  Clone ID: PAT_MRT3847_58021C.1
ctgacattctccctcactctcttttcagttagggtttgcagaacggtggtgaggttgtggattcccaaattttgaaggtaatttctcagaagcagaagaagttgttggcacttgatatggctcgaaggaagagtattgctagcagaaaattaactaagcgtcaggtgtttaagacagttagtgattaagttggctttaggtgatggaagctgaaatggtgggatatagttggcaaacaagcaatctatagtctgtgttgttaattttgggttaatagcaaatggtcctgccaaagaaagatcacattaaaggaaaagcttttattattcatccattgaaacac

SEQ ID NO: 96359 - DNA, 1991 bp, Glycine max
  Clone ID: PAT_MRT3847_58022C.1
gcgaccagcgtagtggttatccccgtggtgggttctccgtatcatcctttgcggccaagcgtgcaacagattcaggctctttttatcatggtgctggaagaaaaatgataaatcctactacacttcctcaacagtcccttcctggtattgaggtttcggctcagtctgaaaattcttttcaatctcaaagtgttgatgctgtcaaagctcaaactgagaacaaaagtggttttcgtcttcaggccgactttgctgaatcacctcctcaaaaagataatggaattaagatgttctcagctgatcaaagggcttttgatgttgttggcggtggcaatgaacattctacaccaattgaagagcaagcagatgaaggagatcaaagaggcaatggagactcaatggctagtggtgttggtggtgcaccatctgaagatggatataactggagaaaatatggccaaaagcaagtgaagggcagcgagtacccacgaagttactacaagtgtacgcatccaaactgtcaagtgaagaagaaagtagaaagatctcatgagggccacataactgagatcatctacaagggaacacacaaccatgcaaaacctcctccaaatcgccggtcaaggtataggttcggttaaccttcatactgacatgcaagtggaccaccctgaacatgttgaaccacacaacggtggtgatggtgacttgggctgggctaatgtacaaaagggaaatatagctggagctgctaattggaagcatgaaaacattgaagccacatcatcagcatctgttggccctgaatactgcaaccagtcccccaatttgcaggctcaaaatggtactcacttagattcaggagaggcggtggatgcctcatctactttttctaatgaagaagacgatcaagtcactcatggtagtgtatcattaggttatgatggggaaggagatgaatctgagtctaagagaaggaaactggaatcatatgcagagttgagtggagctactagagccattcgcgagcctagagttgttgtacagactaccagcgaagtagatatcctcgatgatggttatcggtggcggaaatatgggcaaaaagttgtcaaaggaaatcccaacccaaggagttactacaagtgcacgaatgcagggtgcacggtcaggaagcatgtggagagagcatcacatgaccttaaatctgtaatcacaacatacgagggaaaacataaccatgatgttcctgctgctcgtgccagcagtcacgtcaacgctaatgcttccaatgccgttcctggccaagcttctcttcagactcatgttcatagacccgaaccatctcaagttcacaatggcattggaaggcttgagaggccttctcttggctcattcaacctacccgggaggcagcaactaggaccatcccatggcttctcctttggtatgaaccaatccatgctatcaaatctggtgatgtcagggttaggccacgcgcaagcaaagcttcctgtcatgcctgttcatccgttcttggcagcgcaacaacaacatcaacagcgacaacaacatcaacagcagcagcaacatcaacagcagcagcaacaacatcaacagcaacagcaacatcaacaacaacaatgcgctgcaaatgatttgggtttcatgttgccaaagggagagccaaatgtggaggctattcctgaacatggtggccttaacctgtcaaatggctcatcagtgtaccaagaaatgatgagtcgcatgcctcttggacctcatatgtaaaattttattccctgattctttaaagaaaaaactaatgtttacatctgataacatacatatatagatttatacatatatgtaatgccaaggcatacataggcggacttttcattattagactcattgtaatgtttgacattcttcatcacatgtcaaaggtatatgttattttgctcatttattgcatagatcctagccga

SEQ ID NO: 96360 - DNA, 272 bp, Glycine max
  Clone ID: PAT_MRT3847_58023C.1
atcgaggcgggacagtagctgctgctttgtcccttgtctccagctagctccgatcctcgatctcattcaccagacaaaacagaatgggttgtcaaggtagcaatgagaaaagatcaagaccaaatttactacttcctatggatcagcagccactggtagtagtggtggtactagttacaacactgttcagtctccgccgccgccaccaccacctactactactgctactactagtaatcaggttcaaacatcagcagcaccaaaccacaatc

SEQ ID NO: 96361 - DNA, 151 bp, Glycine max
  unsure (1)..(151): unsure at all n locations
  Clone ID: PAT_MRT3847_58024C.1
atatgaccgtatcacncacacatatgttttatctggtgaatctcataataatagggggggattagcctatcgggcggctaatacatctactttgctattccctctccatcctactgtaaaagacagtaaagctattatcttaacaccattt

SEQ ID NO: 96362 - DNA, 151 bp, Glycine max
  Clone ID: PAT_MRT3847_58026C.1
cagttgggtgaagactaccgacaggaacacggggtacaactccacatagattaaaaccaaaaagaggggccggtctaaaggatccaagcctacctactcttgccttccagatcttaactcttctatagcggcacctaacttcaattcacta

SEQ ID NO: 96363 - DNA, 564 bp, Glycine max
  Clone ID: PAT_MRT3847_58027C.1
attactcccgagcaggcccgaaccagtgtggctggctggagctgtcatgcggcatgcggaggatcctgcaggggcaatctcggcatcgcccaagaggcaaacgaggtttggcgccctgcgaaagtggcggctgcggagaaaggagcgaagggaggtcgcgcgaaagcttcgtggctcggagcgaattcgccgagaccacctccgcttccaacacgtctgtggggagcgcatcattctctcgacgaatgctcgcgcccgtcggcgccgccgcgcgcacaatgttcgcaccgacagcgacatccttacgtcgtcgccgaacgaacagaactgccatcgcacctttgccttaacgcaaaatcctaaggagcacgaaagatgagtacgccgacctattccgaggccctggaattcgcgatcgaccgctcgtacgacatcaacattgacatgttaaggtcgcgcaatttgcacctcgacacgtttaacgattacctggtcggcacatatccccccgataagaaaagtaagaaaagaaaaagaaaaagagaaaggagaaaatatgaagtt

SEQ ID NO: 96364 - DNA, 261 bp, Glycine max
  unsure (1)..(261): unsure at all n locations
  Clone ID: PAT_MRT3847_58028C.1
aagttaaaggcttggaaaaaaaaanaccttnantanaaaanattaattacctaaaaaaaaagaacaccaccctgaagaaaggaaagtgctttaaaatactaaagggtatttaccaaagggtcttttctttaaagaacctttaatctaccttggatcaaggggggggttccaataaaaacaccaccaattnccattattaataacattattttttttacaatatcaaatcatttttcttcccattatcttcttttttaaacc

SEQ ID NO: 96365 - DNA, 691 bp, Glycine max
  Clone ID: PAT_MRT3847_58029C.1
caacgatgcaccgttctgaataaaaaggaggaaaaggataaagctttctcaaccagtttttctaaatttccaagtctaatttctaaataaatggaagaaaaggataataaagcttaaatctcaagcagtattgtcattaaggagaaagcttaaatttcaagcagttattgtcagcaacgaaaaggtttaaatagtgacagaacatactagagcttcatccgttgctagttgcactcgcgtacctcgattcctcccagggtggtgctgtttcgtgttctttttattggcggtaaaatgccagaagatattgtttaccaacaccctttgtttggtggcaagatatctagcacattcccccacagattccaggatgtcagcagcattcgacaagtccctgatcatcaggaggtgtttgcggacccgagccgtgatgaaagcttgatctttgagcttttagaattcaagcctgatgttgctgataatgggagtgctgggtggtttcttcaagaccttgctagtgaacaggatgctgaaggaagtgtggttattgagcagtcaggagttcttgaagcacctggtttgatgtacaacaatacgcctgcagttgtaacaactgcagtgggtcaaatggcaatttctaaaggacggcaaggaagggaagcacaaaatttggtgaaagtttatttggcaa

SEQ ID NO: 96366 - DNA, 338 bp, Glycine max
  Clone ID: PAT_MRT3847_5802C.1
aacaaaaaaatttggctcaaaaaaatttggctggccaccattttggctggtgaaaaacccccccttttggaaagggaagggccaattttttggggggggcccccacccttttacgtacgggcctcaataaaggaaaaatggtccaggggacacacctttcacaatggggacaacttggacacccgttggggttatcccccccaagcgcaatggttgtttaacctgtcccgaaccccccccgattttatttttgggagcgctctttgaaacaaaaatttgggcccccctttctcgggggttttataacccccttaccccggggaaaacccctccccggg

SEQ ID NO: 96367 - DNA, 255 bp, Glycine max
  Clone ID: PAT_MRT3847_58030C.1
gaaacaaaggagtagagtgcctatctattcttatgtgttgttagtccaaataagtcatttgaccttttttatactaaactttttgataattttctttttaaaattaatatttttctaaatgaaaataagtatagcaaacattattttaacctattgaaagtatcttcattcagtagagttgtagtatgtactattagataaagtgtattataaaaaaaattgtgtattagagtcgattaaaaaggggggaaattg

SEQ ID NO: 96368 - DNA, 568 bp, Glycine max
  unsure (1)..(568): unsure at all n locations
  Clone ID: PAT_MRT3847_58031C.1
tgagcatcgtctagctatctcgatcgaactgtccaaggtcctgtcacctaacctaaagtgctaggctcagcgctcttgttcaacgtgtggtcgctgggctcatgggatgcgaatgttgaacggggtcattagtcacgccccgttcaacattcagagggattagtcaaccaacatagtgttacacgttgcaagattgaacactagtacccagttaaggacgagctaatgtaaggcttaccagttaaacggtgtcacggtgtaaagcacgccaaaacggcccaccacnacgaaccaacaaccgatcgaaaggagacctacaaaaacgaaaactgttaggcaaccagataagtaacggattagattaagttggcgtacaaccataggcgtggctgtgttataaaaaacccagtatgcccagcgtgcaacgagtaccgagccaaaccatgtaggtatcgcatgccagcaatgatacaactaccagccataacatggaaaaccccaatgacacaatatacaatacccacaaacgcgaatgcgcaaatgtcacgattgcacggacacaaaaaca

SEQ ID NO: 96369 - DNA, 428 bp, Glycine max
  Clone ID: PAT_MRT3847_58032C.1
gatgcacaaggcttgcctattgatggaaatagaaatgttctttaccagcgtgtacagaaagcaaggagaataaatcgatctcgtggtaggcccctttgggttcctcccgtggaagaggaggaagaagaggtggatgaagagctggatgcattaatttcacatataaagctggaggaaggaaatacagagttctggaaacgtcgctttttaggagaaggcttaaatggtgatcaagaaatgccaacagatgcagctgaatcagaggtccctgaagttctggatgacgttgatgctatagaagatgcttcaaaagaaggtgaagatgatgaaacggatgatgatgaggaggaagcataacaggcataagaagaagtagaaccagcagagaacctagatgtaaacaggattaaggagaacgaagttgaagc

SEQ ID NO: 96370 - DNA, 356 bp, Glycine max
  Clone ID: PAT_MRT3847_58033C.1
ggggggttttttttttttttttttttttttttttttttttttttcccccaattctcacaattttaactgctttataagaatgagtcaaaaaacattggcgttccataatcaccaccttttgccttccccccatacctgatttgggaaaaaaaatcccccttttgggggaactttaatttatcttccgcctgttgggataaccgtcaaaggtaaccctacttttagaagccttcttggctttccttcatttcggcccgattttcttttggccccgccttgtttaaaggggcccccccccccctttttttgtttgctggggggagtaaaattttttaaatcaaacccacaaccattgg

SEQ ID NO: 96371 - DNA, 1183 bp, Glycine max
  Clone ID: PAT_MRT3847_58034C.1
tcaacgcggtagagagaatctagggagaagatctcagcatgaaggcacacacataaataacactacatccatgccactgtgccaccacagttttttctctcatgcacctactaatagcaaaaaaaaaagctaagagggataattacattccacctctccttcccattctcactctctctctctctttctatttctctctccgtgcgtgaccttgaattactgatattttatattttaaccagctatatatattacaagaaaacatagatagtgtgtgttcatcagcttattctcaaacctgatatggagtttgtggataccagaaaactacaattacaacatcaacaacaactgcaacaacagccgcaacattttcatgtgttggcagtggacgacagtgtcatagataggaagctattggagaggctccttagaggttcttcatgcaaagttacctgtgtggactctggagacaaggctttgaaatatcttgggctaatagatgagcttgatgatacttcttcaacctctttagaatcagaatcttctcatcctccacctcaaccattacaacgagagggaatcaaagtgaatttgatcatgacagactattgcatgcctgggatgagtggctatgatttactcaaacgagtcaagggatcttcttggaaagatgttccagtcgtgattatgtcatcagaaaatgtaccttccagaatcagcatgtgcttagaagaaggggcagaagagtttctattgaagcctcttcagttatcggatttggataagcttcagccgtactttctgaaatccgttgataattcctgtgaaaaagaatctgctaacagttccatagattcagacaatgacaatgtcatcaacaacaacagcaataacagtaacagtaacaataacaacaacaatagcatcagcaaaaggaaggccatgtctcctgagcctcatcgggaggagagatcaagacccaaaatgaaagagttagcggtggtgtaaaaaaaaacaacactatagagagaggttgatggatgcatgcataggtattatatattatagtttatgactatgatcctaattatggatatctcctctactctaagagcttaattaatgaattcccagtgcgtactaatgttgttcacagttaccatttaccttcaaaaaaaaa

SEQ ID NO: 96372 - DNA, 591 bp, Glycine max
  Clone ID: PAT_MRT3847_58035C.1
gcttcacttccatggcgcagacccaaaccctatccttcattcacgagatcgaatctctcgtctccgataaacttcaagtggtttcgtacaaatggctgagtcgcaattatatggtatcgtccgatgaagcaaagaggttgcttcaggagtttgtgcaaaaacatgagggtgggttggaggtggtgtatgctttgtctggctggttaaagagcaaccatcctagttaccacgtaaggcttgttaccgggccaaagcttgcagaagcacaacaagaatttgatggtgattgctccgttcagatatatagtgtgcaagctagcattcccaaggatccagctgttctttggaatgctgagttcattcaagcagaggagctcttcaagcaaccttcctcggttgacaattgtttgagggataataggttctgtgggatctctaattcttttgtgcagcggaatgtggatggcccaacagtagtttttgcagctcctcaatcaaaatctgtaggtgagggaccaacaaagagtgacatagttcagcaacctcctaaaaatatatcacgtgattcgattgacaaagtccataccaaac

SEQ ID NO: 96373 - DNA, 263 bp, Glycine max
  Clone ID: PAT_MRT3847_58036C.1
tacggctgcgagaagacgacagaaggggtacaagtgaatccaaacttaattagtgcgcatcaaatattgaatactataagagttaacaatcttattcatcttactttaatcatatcttggccaccaaacaagctttcatttaggcatgactattaattcgaacttgtggttttatgaccttgtataaacttgtttcaattgagattgggtttggatttatcttaccttgtagatgttgagaatggatagaggatgtgaaacgc

SEQ ID NO: 96374 - DNA, 492 bp, Glycine max
  Clone ID: PAT_MRT3847_58037C.1
acgagattttgtacaaatgggaatttggcacgtgtgttagttactggaagtagaaggaggctctggaacctttatgtatttccatgacctgattttactttctttctggagacttgagtcagtgtagcttattgatttgttgtcttcacatctatattagatacttttgtgaggctgctgtgactggtattctgacttgcgtcacacttgaatttattcatgaacatttcctgattctgttcacacaattattgtcataactgaattttatatgaactgtcttctccagtgtattctactcttaatgcatttcatttaaggtttatgcttacggtattaaaaattaaatatcttgtcaaacagttttttattgctggcattacaacttttgactaaactcactacacaacctactttcattgcaattgtcaaattaaagatagataacaatgaagaatacgtctaaaaagccttaaactgattgcaagtatt

SEQ ID NO: 96375 - DNA, 206 bp, Glycine max
  Clone ID: PAT_MRT3847_58038C.1
ccccccttggcccctttggccttctttcgccacaaaatcttggggggtgcaggttaggaagaccggaagagcccaggtccaaaatgcctaatttttcacaacaaaaatccccaaattattcaaaaattcaaaagccttaacaaaatttttcaacgatgacctgggagagaaacacgccctcactgggacaaaaattttgggtaaac

SEQ ID NO: 96376 - DNA, 166 bp, Glycine max
  Clone ID: PAT_MRT3847_58039C.1
acccactcgtccgatcctttcgaacactcgtccgcccatcgtcctaattcctcaaccacacttgccatatcaaagagaagagcgtcaacatcagatcaaagatacaacattcagactacttaatcatctattcaaaactacaaactcaccaccattttggcactct

SEQ ID NO: 96377 - DNA, 287 bp, Glycine max
  Clone ID: PAT_MRT3847_5803C.1
gcgaggaatctgtatgtgtctacctcttctctgccagaacacacaaagccgggatatcctggtatattgaagggaagagcaattatgaggtatgcatgctctcaattgccatgctgacaaagattaaaatatgatgtctaataaagcgttacatagggcatgcgtaggaagctgaggcctggggaggtttaccagcttgcaccattcgctggtgcgatctgatatgactttgaggacaactaacatcataaagttgaagactctgacagcgaagattgtggtgactg

SEQ ID NO: 96378 - DNA, 361 bp, Glycine max
  Clone ID: PAT_MRT3847_58040C.1
atctatattctttgtttcactgtttatgtttatgtaaaacgccacttggctcctaatcctgagagggcagacagctaatgtttagcaaaataacttgccacctttgaggcttcttaattggccagccaaccctttgaatcaaacttttgaataaacaaaggggccacatcactttattattaggcagctcacacagtatttaactcaacactctttgctggtcacaaatctataaaggggaacaaccttttgctgaacacctttatgagctatactaattgcctgacgaacattgggagggttccaatcggaatcagaagtttataaacaaagcctggtggagcaagacttatacccatac

SEQ ID NO: 96379 - DNA, 428 bp, Glycine max
  Clone ID: PAT_MRT3847_58041C.1
gagatgacaagtctagtaggtaaggattcgtagcatggagcctaatacaatagcacgcgatactgcttcgtgaaacgatcggccagcgcgcaaccgagtcctcccttcaggccggcttcccagtcatcgtcatcagtttccgctcttgcccgagatgtcgatttccaagatattctttccccctttgatctcggtaaatgacggcatctgtttcagcctcaatagttccgcatccttcgaaacgtacgggtcactcttgaccgatgcgatcgcgacaatttcattggcttcggcgtgatacccaatgaactttatctaatgctttgtcaagtctccatcgatgtggacattctcgaaaccggttgcggcactgacgtggcgcagtccacctactggcgatgaccagaagatggggaccttggagaacg

SEQ ID NO: 96380 - DNA, 319 bp, Glycine max
  Clone ID: PAT_MRT3847_58042C.1
ctcggcgcacggggagcccggtttacaagctaggcaaagctggagaagaatctcactctgctcttactgagtttgataggaccgagaaagacattaccctaataagaggtttccctcactatggtgtagaaaagaagataaacaagttctcgtggttgagggggtgccaagaaaagggttattacattgcgccaaaacattcttaatcagacgggtcggggtgcgctctgaaaaaatattaagctcaaggttatcgacacctctttaaagatcgggcatggtcgctctcagaccacccaggaaaagcagaagatctttt

SEQ ID NO: 96381 - DNA, 2165 bp, Glycine max
  Clone ID: PAT_MRT3847_58043C.1
ccggggcaccttcctcctctttcctgcccatgtgtctccttatatgttttggactaacatgggttcctattcccggggtcatgtttcctatgatgatcatgctcttagttccggttagacagtactttctccccaagtttttcaaaggggtacaccttcaagatttggatgcagcagcatatgaagagcaaacagctctaccattcaaccttgcaacacactcggagtttggagctggatctgctcaagttggagaaggtgaaatcctagattaagtcattactagaatccgtggagagtttagtcaccttagcagttcaaagatcacaagcttcaccccaacaccaagaactgatcctaaaagccatttaatcccacgcctctcatttagtgctcgcgtgggtgagttcaaaactgagcagagtccacgatctggtgcaagaggtcccctcagtccaaaggcaggagaagtccacatgttatttctgggcgtctagtccacccaaatccatgttcaccggaggcatatgaaaactaataattaaacgtagaaaattgcagtcatctgccttagaacataatcggagcatttatcccagcaaccatgattgcagtactttattactttgaattttgcttgtcatcccagcttgcccagcagtccgagttcaagtccaatattccatcttcatgacattagtaccaacgccttgtgggatttttgaccttaatgagtggcctgattggaattcctcctgcaaatggagtcataccacagtctccaatgcacacaaaagtccgggcaactcttaaacatcagttgcttcgtaacaaactggtggtaaccgcacgaaaaagtatgggaaagaatgctagtttaggacagttatatggcaacatgctagaagcctacaatcaaatgcagacccctcttgtttaccaggacccctctgctcgagcacaaggactaagagaacttaaagaatcaaccattcaagcagctaccagtatgggaaacgtggatgccccagtagatgagactatatttgatgttgagaaagaaatagacgacctgcttcctgttgaggtaaaggaacagcgtctcagtaacttgcttcaatcaacaatggtgggaggatgcgttgcggccatgcctttactcaagaagatcccaacctcagtcctttggggttactttgccttcatggccattgaaagtttgccaggaaaccagttttgggaaagaatcctattactcttcactgcaccaagcagaagatacaaggtgcttgaggactaccatgctacttttgtagaaacagttcctttcaagacaatagcaacattcaccatttttcaaaccatttatcttcttatatgttttggactaacatgggttcctattgccggggtcatgtttcctatgatgatcatgcttttagttccggttagacagtactttctccctaagtttttcaaagggatacaccttcaagacttggatgcagcagcatatgaagagcaaacagctctaccattcaacctcgcaacacactcagagtttggagctggtgcttctcaagttggagaaggtgaaatcctagatgaagttattactagaagccgtggcgagtttaggcacactagcagtccaaagatcacaagctccaccccaacaccaagaactgatactaacagccatttaagcccacgcctctcatttagtgctcgcgtgggtgagttcaaaactgagcagagtccacgatctggtgcaagaggtcccctcagtccaaaggcaggagaagtgagattatcaaatctgggaagaagtccacttaatccagattcaaaacagcaggaccaaaactaataattaaacgtagaagattgcagtcatatgccttagaaggactttataggaggcttatttgttgctacatttccattctagtttgttctttaattttgcttgtcatggttgtaacttgtaaagtcctttcccttgtcccatattcgacagatatgagatatgtaacaaagtgtggcgctttcctatatcaattgtattagtgaatgttactatatttgtgcaaatgtatatcatcatcacaagtttgtttcaataaattgtgactagtttgagtcttgtattgcttcatatgggt

SEQ ID NO: 96382 - DNA, 124 bp, Glycine max
  Clone ID: PAT_MRT3847_58044C.1
tgcatcagctgagggtaccaagtgatatgctgccagacgttaacccagggcctgctgaggaccagacgcaatcgacgtccgctgacactgttcacgcagacggtgctaataccgatccgtttgc

SEQ ID NO: 96383 - DNA, 277 bp, Glycine max
  Clone ID: PAT_MRT3847_58045C.1
gcgcaaacgatcaaaatcatggcaagaaaaaaaacaacagaaagaaattttcaccgaaagagcatgcggcacctaccatccatgctgcaccaatgcttcatcatggaaactgtcctcctttttctggcactggacaaggtcttatggggggaactaccccacttccacccttaaacgtagctccaacctttgctacaaatggagtctggacaaacggaacaacatttccacatcagcaacagtcttccatgcttcctaatggatatcccacaaatgg

SEQ ID NO: 96384 - DNA, 373 bp, Glycine max
  Clone ID: PAT_MRT3847_58046C.1
agaagccagagtatcacttttgggcacagagtttatcaaagttgcaacgaacattgatcctgactgttaaatgataatcaacgaaaaagggcgaaatgcaaaatgcgcaatgaggaaggcctttgtggatgaataaaatccttaactgccaaagcatattttatataaggaacatcaacaaatcactgatagagatggctaaggttgagactgatagccttaaagctcatgctgagaaaccttgacctgacagaatgattgcacaatgctgccaacattttccccttcaatactccaaccagcaagagaaacataccactatacaatgatcattgataggttcttccctcagaaatcaccaaggctcactgtt

SEQ ID NO: 96385 - DNA, 567 bp, Glycine max
  Clone ID: PAT_MRT3847_58047C.1
atcatgctcacatgtgcaacctcgctcatccatatgaacaatcgatgattaaaataaataaattcgtcgaagaactaaatatcatcaaattgaatccacacaaaattattcaacaaaaacaagaatatttaaagaagtaacaaggaaaaataaactcttaagatgatttctccaaaatgaattcaatgaaaagctagaagaaacaaatagttaattgtcacatataacttcgttcttctccctaacatcacaataaggacaagcaatgtttgaaaatcaggtgaaaaaatattttttaggcaaacatgtttctgaaaaagattaagaactcttttattttattttgcttttacccattggattaggtaggatgcaaaatttcaatcggtaaaccaaacaagtacttagttagctgaaaactcatttccttcgttgttcaacctttatgtatgcattattttttttataatcataaatgcatacatacctcttctatgcattgagaagggtaatttttatagtcccgtatatttctaccaaaaaaggaaacaaaaagaaaaagaaatt

SEQ ID NO: 96386 - DNA, 484 bp, Glycine max
  Clone ID: PAT_MRT3847_58048C.1
cccaccttgactctttgcctctccattattctataaactgccttcccacgctgcttcacgctctaaatgcgtcccactatggccaccaccgagcacgaaaaacagttcattgtggccaaccctaaccctaaccctaacgccgagaccccttaccggacctgctcctgctcctcctcgctcgccattttcgcgaggaaaagctctttctacgacaggctccccttccaacccatgagactcaccgttctcagactcaacggatcatgcttccatattcaagtttcgaagatggccaccgctgcagaactgaaggacgcggcgtatgccgtgttcattcacgtgcctcacaaggggccagcaaaaatttcatgggcgcatgttaggtggcaatactgtttatgctatgacggacagaagctagctactgagaaggattatcttcgacatatggcatcaaggatggtgaccaggttagtaactttta

SEQ ID NO: 96387 - DNA, 1039 bp, Glycine max
  unsure (1)..(1039): unsure at all n locations
  Clone ID: PAT_MRT3847_58049C.1
gcacgcaagcgnaagctcggaattcggctcgagtccaattctctacacttcaatattccttatttttggcgaagtcgtattgactattgaagatggccattgacgacctctgcggcgattctgaagctgaaactccgctgctatcggagacgctatacggcgtcgtcaacttcaagggcctccccgtcctacgatctacctctggtggttggaaagctgctgccttcattataactgtggaagtggctgagagatttgcttactatggaatcaactcgaacctgataaattatttgacggggccacttggtcaatccacggtaacggcagcagagaacgtcaacctctggtctggaacagcgtcattacttcctcttctcggcgcttttcttgctgattcttttcttggtcgttaccgcaccatcgttttagcttcccttatttatgttctgggactgagcctgctgacgttttcgactatacttcctgtgacaacctcggacggcgaagttgctcgtccccaattaatattcttcttcttttctctatatctcgttgcacttgcacaaggtggacataagccttgtgttcaggcttttggagctgatcagtttgatgtgaacgatcctgaggaatgcaaggccagaagctcctttttcaattggtggtattttgccttcagtgctggtctttttgtgactcttttcatcttgaactatgtccaggataatgtcggttgggttcttggatttggaatcccttgcattgcaatgctaactgcattggttattttcttaattggaacttggacttaccggtttagcattcggagggaggaacgaggcccttttttgaggattggtagggtgtttattgttgcagtgaacaattggcgaattaccccttcagctgtcacttctgaagaggaagcttgtggcactctgccttgccatggnttctgatcaatnttagttttcctgaacaaagcattaattgcatcaaacggttcaagggagaggggggaaagtttgtagtgctg

SEQ ID NO: 96388 - DNA, 507 bp, Glycine max
  Clone ID: PAT_MRT3847_5804C.1
acggctgcgagaagacgacagaaggggccacaacacaagagaaatagcggcccgctcgccactgctcgctcgtgttctgtttctccgttctctgttttttttttcagatctcgaaaaatgcagagcgcggctttcactttctctccctctctccctctccgcaacccttcccctaactcttggaggagaccctctctttctctccgtctccacgccaaacacagcaacaacaacaacaacagtaacagcaccgaaggcgttaactccaatggcgtctcttccacttccttcactcgccgatcttggactcttcttccttcttcttctttcaaattcaggcctcttccttcttcacctcctcgcgccgccgaaaacgccgttcccgaaagcgcagcagcacccgtcgaaaacccgctcttcaaaactctcgaactcggcgccttgtttggcttatggtacctcttcaacatctacttcaacatctacaacaaacaggtgttgaaggcg

SEQ ID NO: 96389 - DNA, 444 bp, Glycine max
  Clone ID: PAT_MRT3847_58050C.1
acggacatatgcgaatgccgggctggtggatgaagcaatctctctgtataagagtattcctcggtttaactgtgtgaattggacagaatccttcaacaccatgttgcagataatggtcaaggagaaccggcttgaaattgcacaccggctttttgtggagagctcttgtggttgggaagtgaggtctctggttcgagcattgaacttgcttatgtatgctctttgtcaaaagagtcgctctgatctggcattgcaattattccaagagatggattatcaaagttgctaccctaatagggatagttatgcaattttgatgaagggactgtgccaagacaggaggttgcatgaggccacccatttgtggattcaatgttttggagatctcacagaaaggaaatggtgagggatatgtggtctatagaactcttttggatgctttat

SEQ ID NO: 96390 - DNA, 1411 bp, Glycine max
  Clone ID: PAT_MRT3847_58051C.1
gatcatttcatctccatcaacctctccaacaaaataaatatccctttaccctattttctcgaatcttgtttgctatctcctgactccggctgaatgcttgccttttcagccagttttcctccgtcttcccaacctcaatcacacttatccatcacaccccatgtaacaactttctgtctctagctttgagctttttctttttcttttttcttcaaacacaaaacaactttctggaattagttacttctactctcaataaagtttttttttttttttttttttatcatcagcttcatttattagtattttggtcggttctatatccttcctttttctttttgtcttctttccactttcccctcactttgttgtgagatcttgacaacaaagtgcgtgcttgaaaactgaagtcccttttaggaatacgagaatgcaggatccaacgttgttccaacccatgaaaccccactttccggaacaggagcagcttaaatgcccgcgctgtgactccaccaacaccaagttctgctactacaacaactacaacctctcgcagccacgccatttttgcaagaactgcagaaggtattggaccaaaggtggtgccttgagaaacatccctgttggtggtggaagcagaaagaacacaaagcgatcatcttcatccaacaacaacaccaaacgcgcttccccatcacccccagtttcctctgcacccgctccagaacccgaccctacccggattggccccaccccggttgttggtggcgggagtttcagttcccttttggcatcaagtggccatttgggcctggggaacctcttgaagggtctgaattcaagtgggtctaatctgaaaactgtgcaaatggaagagtttggggagaatgttagttcgggtccggttgcggatccggattcgggtcggaatcccgggttggagatgcaaagcaatgggaacgcagagaattttctgagtttgcaaaatggtgattcaagctgttggaatggtactagtggttggtctcaccttgctattttcactcctgggtcaagctttcagtaatgacaaattaatgaatatgattactctgatctgtatatttagacatatgtcgtactattatggaggatcacaaaccagaaggccactgctataggatcattaggtaaagtttctcctgttttggatttttatatttgtgaattgtggttggtgttcttcagttatatcaatgatggaagagaaatggaaagcaagtcatattttagggcagggtatggggggtatatgaatgttgttgtagtgagattgttttcagtctcatcacgtagaggaagtgttgccatggcttggagattctaatttatttaatctatatatgtgtattttacacgcgcagtttgtcaa

SEQ ID NO: 96391 - DNA, 373 bp, Glycine max
  unsure (1)..(373): unsure at all n locations
  Clone ID: PAT_MRT3847_58052C.1
gaaggaaaagaaagggcngaaagagaagaccgaggagaaaagagagggngagcagcaccancacaaggangaggacacaagngccccggnagagaaagccgaggccgcagaaacagcacatgctgaggaaaagaaggggccccncgacaagagnaaggagaagccaccagggcacaagaagacagaggtttttttttttactactcctccaccaccaccacctgatgcatcattggaccacggagaaggagctcatcatgaaggagaggccaaggagaagaaaggtatattagaaaagataaaagagaagcttcctggttatcactccaagacagaggaggaaaaggaaaaggaaaaggagagtggcggtcat

SEQ ID NO: 96392 - DNA, 1319 bp, Glycine max
  Clone ID: PAT_MRT3847_58053C.1
cttttcgcgattattttgtcttctttccatttccctcctcacttgttctgagatcttgaaaaaaaaaaaaaaaaaactgttcgtctccatcaacctctccaacggaatagatatctctttaccctattttctcgcctcttgtttgccccctcctgcccccgccggaacccttgccttgccagcccggtgcccccccctccccaacctctgtcactcctacccctcccacctctcgcagccacgccattttgtgtttgaaaactgaagacccttttaggaataggagaatgcaggatccaacgttgttccaacccatgaaaccccactttccggaacaggagcagcttaaatgcccgcgctgtgactccaccaacaccaagttctgctactacaacaactacaacctctcgcagccacgccatttttgcaagaactgcagaaggtattggaccaaaggtggtgccttgagaaacatccctgttggtggtggaagcagaaagaacacaaagcgatcatcttcatccaacaacaacaccaaacgcgcttccccatcacccccagtttcctctgcacccgctccagaacccgaccctacccggattggccccaccccggttgttggtggcgggagtttcagttcccttttggcatcaagtggccatttgggcctggggaacctcttggagggtctgaattcaagtgggtctaatctgaaaactgtgcaaatggaagagtttggggagaatgttagttcgggtccagtggcggatccggattcgggtcggaatcccgggttggagatgcaaagcaatgggaatgctgagagttttctgagtttgcaaaatggtgattcaggctgttgtaatggtactaatggctggtctaaccttgctattttcactcctgggtcaagctatcagtaatgacaaattaatgaatatgattaccctgatctgtatatttagacatgttgtgaaaatagttatatatataattatattactggcttaagtttaagcatatatgtcgtgctattatggaggattacaaaccagaaggccactgcaataggatcactaggtaaattaagtttcttttcttttggatttttatttttatgttttgtggttggtgttcttcacatatatcaatgatgcaagagaaatggaaagcaagtcattttttaggacagggtatggggagatatgaatgttattgtagtgagattgttttcagtctcatcacgtacaggaagtgttgccatggcttggagattctaatttatttaatctatctatatacgagtattttacacgcgc

SEQ ID NO: 96393 - DNA, 288 bp, Glycine max
  Clone ID: PAT_MRT3847_58054C.1
tccatcttttactttatgcaaatcacaatgcatctctgacccatatcaaactctcacggacaatcacacacactcaaacctaaaatctttctcaaaacatccaacagctccctccacgtctatctcactaaacaatacataactctttgactacccaagcatctaagactactttattccaccaagaaactcctcctctcccttaattcgacctacctcttcctagtcctcacctctctcaataatcaataccaaaatccatccacagcttttggattcataactcct

SEQ ID NO: 96394 - DNA, 733 bp, Glycine max
  Clone ID: PAT_MRT3847_58055C.1
ctgaaaccatcaaaacaaaacaaaacaaaacaaaaatctcaccacacaaggttgtatacttgtaccaccaaaagccacattcgtagtgttaattagtacttggtggattcaatcttcactctcatattaacaaatcaacacaaacatgagaggttgtgccactgatggggtggtggcatggcacagaacactgagaaaagcatttcattccttttgttctccaacttcttgtatttttggccccaacctccctgatgtttgggttcccagagagcacacaccccctcacaccctttttccagaaagtctccaatgggctaataatggtcacaatgctttgattcttgagggaaaaccaattgctcaacagataaagcttgttgtggcggttgagttttgatggttgttgcgtggctgtggcatgtgtccccgtctggcgctggttttggtcgctgtgcggtgggtctcgcgcgctttccttctccttaagttgaaggcctgtgatcaagttggcattgaaacagtgacttcccagttgcctgaaaactgtgatgaaagtgaactgcttgatgttgtttccggtttcaatgaggacccggatgtgcatggcattcttgtgcaacttcctctgcctcaacatttggacgaggaaaaaattatcaatgttttgagtcctgaaaaggatgtggatggctttcatcccttaaatattggaaatcttgcaataagagga

SEQ ID NO: 96395 - DNA, 508 bp, Glycine max
  Clone ID: PAT_MRT3847_58056C.1
cccacgcgtccgctaggtacctgatcaagggtttttggttagactttgttgctgcattgcctcttcctcaggcgttaatttggattgtcatccccaatcttggaggttcaaccatggcaaacacaaagaatgtgcttcgctttatcatcattttccaatatttgccaaggctgtttctgatttttccactttcatcccaaattataaaagctacaggggttgtgacagaaacagcttgggcaggggctgcttacaacttggtgctttacatgttagctagccattttttaggagctagctggtaccttctatcaattgaaagacaagaagcatgctggaggagtgtctgcgatatggaggagccatcttgtcaatatggattctttgactgcaaaagggttgaagattcgctcagggtgtcctggtttatagcaagtaatatcacaattttatgctcaccaaaggctaacttctatcagtttgatatatacagtgatgcagtgacatc

SEQ ID NO: 96396 - DNA, 366 bp, Glycine max
  Clone ID: PAT_MRT3847_58057C.1
ctcacgcgtacgatgaatttcaccactcttataaattctgagaatgaattggtatgagcgaagcattagcctttttctgtgtcgacactggtttcgatcccacacccactaactcatacgcttgatcctttgaatgctcttgcgtacttctttcactacctaattactaactcacactcacacaacgggtgatatcaatgtcgactactgctatgaagaggctcatgagagatttcaagaagctgcatcaagacccgactgcaggaatcagcggtgcacctcaagatatcaacataatgctgaggaacgctgccatatatggtccttatgatactcgatgggatggaagcacgtttaagttgactg

SEQ ID NO: 96397 - DNA, 596 bp, Glycine max
  Clone ID: PAT_MRT3847_58058C.1
ggtaaggatcccagtaactttctaagactaggaaatcagcaatcagcatagtatgaaaagataaataagtgggaatacactgaagaacacagctacagatattttccagcactcacaggagaagtttcatacaaacaaactcaaaatcctcctattgttatgtggacagcacgagactgaggtgagcttagttattagaggggtgtgtgtagctaaggtttagcttctcaaagaagcttctcaaggaagttttctcaagaaagtttctcaaggaagctacctagtctataaatagaagcatgtgtaacacttgttgtaactttgatgaatgaaagtcttatgagacacacttcgaagttccacttctctccctcttttattccttcaatttcgtgctccccccttctctctttcttttcctccattaaagcatcctcttcaagcttcttatccaaggcacattctttgtggtgaagcttcttcttccatggcttattccctagtagatgacgcctcctctcacctcttctcctttgtcttctgctgcatctccatggtggaaaatcaccattgaaggacctcattgaagctcaaag

SEQ ID NO: 96398 - DNA, 497 bp, Glycine max
  Clone ID: PAT_MRT3847_58059C.1
tacaatttttacagaaatcgtcggaggacgggagaaaacgtcctattgtaatcaaaaccaggttgctggggaaaacctttagccactagtctggtttggtaacccactggggatctattggaaggaagagcagtgagggaccaagtaccatttttcatcaaagcctcacactcagttttcatagctgccagtcattgtggattagaaagagcagactttgtagatttgggctcagcatgagctaaaagaagagtgagctgcaacctaggtttaactacaccagccttggcttgagtgcacataggatgagtgttatcaggtctgacaagaactgctggagtgggtgctggtgctgaagctgattttgagtcaacatcagaaacagaatctgctcccactgaagttgaaatagctggtgaggaatcattatccacttgacctgcaggagtaaggttgttaagaatgggaggagtgacacctggtggagttgtagatag

SEQ ID NO: 96399 - DNA, 342 bp, Glycine max
  Clone ID: PAT_MRT3847_5805C.1
tcgacctacgacgtacgcacagtcgccagaagactactgaacgctactgcactgacaattaatacagatgcggttgaaggacatcatggtgcagctacaggtgtgacggacagcttcagatgcttatctggttcactactgcgctcatacaactgagctactctataagttatcagtcacggagacatcatgataacttacattcgtcaccatgctgctatctcttgctgtgatctctctcgatacttgttaaatgcgaccactgctatatctgatcacactgctgcgcctcagaatgtaagatctgcatgtgcacactctcattgccaggtcaatgcccct

SEQ ID NO: 96400 - DNA, 853 bp, Glycine max
  Clone ID: PAT_MRT3847_58060C.1
ggaatagggttagcttagctattacagggggtgtgtagctaagctatagcttctcatctcaaggaggtgagcttagctattagagaggtgtgtgtagctaagtcctcagtttctttaggaatcttctcaaggaagcttctcaaggaggtgagcttagttattagaagggtgtgtgtagcttagctctagcttctcaaggaagttttctcaaagaagcttctcaaggaagttttctcaagaaagcttctcaaggaagctacctagtttataaatagaagcatgtgtaacacttgttgtaactttgatgaatgaaagtcttatgagacacacttcaaatttacacttctctccctcttttattccttcaatttcgtgctcccccttctttctttcttttcctccattaaagcatcctcttcaagcttcttatccaaggcacatttttggtggtgaagctccttcttccatggcttattccctagtggatggtgcctcccctctcctattctcctttgccgtctactgcatcttcatgatggaaaatcaccattaaaggaccccattgaagctcaaagatccagcctccatagaagccccacaagcaagcttccatcaaagtacctcaaaccgagctttttaattcattctatgtacccgtggtggtccacattttgtttcatgtatttttattctcattttcattcgctttttatacccccttttgacgtgcttaagccatttatttaaatcatttctcgcctaatctaaaaataaaataaatttccaccgatcgtttgaattgtatcatccgttaatttcggttaaaatgaattccgaccgttcggtcatgctg

SEQ ID NO: 96401 - DNA, 1299 bp, Glycine max
  Clone ID: PAT_MRT3847_58061C.1
gagttttcagaaccttattgtcttatcctctcaaaaacaattcattggccaaacacttgcaaatcaattaaggattcttctaagaacttcaacttgtatcattcttctctaaaagagagaaaaacttctgtacttcaaaaagaaaattattgtgattaagaggttgtgtgtctcttgaattgtgagtttcctgaacacaagtgatgcaatcctaccccccaagggtattggatagaagactccaagaggattgggctagagcagctaaagaagaccccagggttttcatgaacctcagggtagatttctgagcccaagggccaagcttgggtccactctttgtaaatattagaatagatttttccttcttttgggccttgtattttggccattctagtagtatagggttttagccttgtatttcagggcattttgagtagtctttgtagtagggactttttttgtattttcatgtattttgtcaaggaggtgagcttagctattagagaggtatgtgtagctaagctctagcttctttaggaatcttctaaaggaagcttctcaaggaggtgaacttagttatgagaggggtgtgtgtagctaagctctagcttctcaagagagttttctcaaagaagcttctcaaggaagttttctcaagaaagcttttcaaggaagctacctagtctataaatagaagcatgtgtaacacttgttgtaaatttgatgaatgagagtcttgtgagacacaactcaaagttcaacttctctcccccttttcctccttcaatttcgtgctcctccctctctctttctctctctttcttttcctctattaacgcatcctcttcaagcttcttatccaaggcacattcttggtggtgaagctccttcttccatggcttatttcctagtggatggtgtctcccctctcctcttctcctttgtcttccgctgcatctccatggtgaaaaatcactattgaaggacctcattgaagctcaaagatctagcctccatagaagctccacaagcaagcttccattagtggggctcgtcatgcctcttcaagccagtcttggtcgagcttatcgcccattcgaagtgcagctaaaatggtgatgcggaggagaaaggacggtagcacaatggcaaagaggatgcagctggtgctggggcccgtacgagccgccatcgcccagcctcactgggagagttgaagaagaagggtgggccctcaaggaagcgaatgcggagggataagagattggattctttctcttttttttctcgcagcga

SEQ ID NO: 96402 - DNA, 1638 bp, Glycine max
  unsure (1)..(1638): unsure at all n locations
  Clone ID: PAT_MRT3847_58062C.1
ggctcgagtgcaaatcgatcaaaacagaaacataaagtgagagaacaccaaatcaaacgcaactcgagatattaataagcttcttcttcgtcagttattaccattcgtggaagagaaaaagaaaaaagtaactaaaaaaataaactgtaataaagagtccaaaatgaaagccaaaacggtgaaaggaaattggagcttgaggacgaacaagctcagcttcccttacgtcttcctcgtctgcatcttcttcttcctcgctggattcttcggtttcactctcttctctcactctcagggcgatggagatggcttgaggccgaggcagaggctgcttgaaccggggaacgaggcggagtacaatttgatgcctgttagagatcttggcgatgattccattacatcgattccttttcaggttttgagctggagacctcgagcactatattttcctaattttgcaactgcagaacaatgtgaaaacattattgatgtggcaaaggatggcctcaaaccatcaaccttggcgttacgccagggagaaacagaggagaataccaagggaattagaacaagctctggcgagtttatcagtgcttctgaggattcaacgaggactatagctttcattgaggagaaaattgctagagcaacaatgattcccagaagtcatggagaggcatttaatatcctacgctatgaggttgatcaaagatataattctcattatgatgcgttcaatcctgctgaatatggtccacaaaagagccaaaggatggcgtcatttttgctatatttaactgatgttgaggaaggtggggaaactatgtttccatttgagaatggcttgaacatggatggtaactatgggtatgaggactgcattggtttaaaagtaaagccacgccaaggggatggtcttctattttattcattgctcactaatggtacaattgatccgacatcactccatgggagctgccccgtgataaaaggggagaagtgggtggctacaaagtggataagagatcaagaacaggatgattagatgattggcacctgcaatcgagattcgaattccgacatccatcgtagcaattctgtctcataagcaaggtcgtcatcttccatacagtttatttttatatggtcagatgaataatcaagggctaaattcaattagatgctgaaattatgtaacactagtacaaaatttgatagcatgaacgcactactagctgaccattaaattgagacccacattagtcattacccttcacttttgcattactctcttgatctctcatttaagagcgttcttgtcaaaaaaaaaaaaaaaaaaaaaaaaaaaaaaaaaaaaaaaaaaaaaaaaaaaaaaaaaaaaaaaaaaaaaaaaaaaaaaaaaaaaaaaaaaaaaaaaaaaaaaaaaaaaaaaaaaaaaaaaaaaaaaaaaaaaaaaangggggggggccgttttaaaggaccaaattttaagaaccgggggtgggaaagaaaaaattttttttttggggccccaaaattaaattccggggcggggtttttaaaacggggggaggggaaaaacctgggggtaacccaattaaatggctttggaaaaaatcccctttttcccaggggggg

SEQ ID NO: 96403 - DNA, 278 bp, Glycine max
  Clone ID: PAT_MRT3847_58063C.1
ggaaaaacttaaacttttaccaacaaaacaaaaaacaggtcttattaaaaacaaacatcaacaaaaatttttccgccattcaaaaacccagttttgaaggctacggctacatgaaaacgggggacactttaaaatatatcggggaaaaaaaacaccaaagacttttttaagattaaccactggaaaggaccaagtttttttaaaaccacttttttgatcacatttgcttgcaaaatttgcaaaatgcggtcatttttttttgagcgtaaattttttaa

SEQ ID NO: 96404 - DNA, 4651 bp, Glycine max
  Clone ID: PAT_MRT3847_58064C.1
atgtcagctttcaagaggattctaggtttagaagtgatttttagatttctagaggtgaaggagacatcctcaccactgtgtgatttagttccactagatttggaaatagaagccacttgtatcaggaacaacacagagagaagaagaaaaatattgcaggacaggacaacacaaccaattccagaggaacctcaatcatctaagtcgtcttctttttatccagagccaagagaatcagaaataggtgcatttgaggctgacataatggctgaaggtcaacctaggagggttactcttgaggattactctagctcaaccgtgcaacaatttttcacaagtattgcacgaccagaagttcaagcacacaatattacataccctcattatttgatacaattaattcaggggaatctatttcatggttttccaaatgaagacccatatgcacacttggccacatacattgagatatgtaatacaattaagattgttggtgtgcctgaggatgttgtgaggctgagtttgttctcattttcattatctagggaagccaaaaggtggttacattcatttaaaggaaatagcttgaagatttgggatgaagtagttgagaaatttttgaagaaatatttccctgagtctaagatagctaaaggaaaagcaaccatttcttcatttcaccagtttccggatgagtctttaagcaaagcattagaaagactccgtagtttgctttggaagacaccgactcacggattttcaaaaccaattcagctaaatatttttattaataggttaaggccgcagtccaagcagttattggatgcatctgctgggggaaagatcaaattgaaaaccccagacgaggctatggagcttattgagaacatggctgcaagtttggaggttgcagcatattgcggaggagctcatgagtccgaatgctgtattcctttagatgacacagcccaagagatagccgacaattcttctagcagttttggagcaaacatagagaagaatccaaaagaagaatgcaaggctatcatgactcggagcagaaaggcaaccctggttgaggataagggaagaacaggtgatggcaaacaacaacaagtgagcgaagatgaaggagaccagttgaaggagaaatcaataaatgagaaagaaaaagaggtagaagagaaaaatgatggtgagaaagaaataaatgaagaagaaaaagaaaaagaaaaagaaaaagaaataaatgagaaaaatagagaaaaagaggagaacaggaagacaaagagagaaaaatttgaaggtgcaaaagctactgtctcgctaagcctggatcgtgtgcttagtgagactcaatcgctaagcgagacatcagctgcttattgtttttatgtgttcaatgtttctatctgtgcttatgttatgcatgcttgtggcttgatcacccattcgtgttaccaggatgcgaacaatgagcttgcaagagagaagaagaaagaggttgttccatgctcagggaaagaggtgccataccctttggtgccatcaaagaaagacaaggagcgacacttagctcggttccttgatatcttcaagaaattggagataaccattccctttggagaagcccttcagcagatgccactctattcaaaggctgtgattcaaagaatccttcaaccaacgcataaggatccggggagtgtcacaatcctctgctctattggttcagtgtctgttggtaaagctctcattgatttggggtccagtataaacttgatgtctctctccatgtgtaggagaattggagagttggagattatgccaactagaatgacactacagcttgcagatagatctattaccaggccctatggagtgcttgaagatgttctggttaaagggaaacattttactttccctgaagattttgtggttatggatattgaagatgacactgaaattcccttgattttgggccatcccttcatgttaacagccagttgcgtggtggatatgggaaatggtaaattggaaatgagcgtgaaggaccagaaagttacatttgacttattagaggcgatgaagcacccaaatgatcacaaggcttgttttgaagtagaaaaggtggaacacgaaatagctatggtagctagagccatggaattagatggtgtggaggaaaaacctgttgggcatgtggtatttgaagaattgaagaaaaatagttcggtagaaaaggctaaagtggagttaaagacccttctagaacatttgaagaaggaagaagaggatcaactggtgaaggtattgaagaaacataaggcagccattggatggcacatttatgatttgaaaggaatcagcccttcttactgtatgcataaaatcaatatggaagctgattataagccagtgagacagccacaaagaagattgaatccagttatgaaagaggaagtgaggaaagaggtgcttaaattactggaggcaggccttatctatccaatctcggatagtgattgggttagtcttgtgcaggtggttcccaagaaaggaggcatgacagtgataaggaatgagaagaatgatttaattcccacaagaactgtcactggctggaggatgtgtattgactatagaaagctgaatgaagccaccataaaagatcattatccacttccctttatggatcagatgcttcaaaggctagctggacaatcattctatttatttttagatggatattctggctacaatcaaattgttgtagatccaaatgaccaagaaaagacaacatttacttgtccctttggtgtgtttgcctataggcgaatgccattcggtctttgtaatgctcctgcaactttccaaagatgcatgatggcaatctttgttgacatggtggagaaatgtattgaagtgttcatggatgacttctctgtctttggttcatcctttgattgttgtctatcaaatttagaaagagtgttgcaacgatgtgaagagacaaatttggtacttaactgggaaaaatgccatttcatggtgcaagaaggtattgtattgggtcacaagatctctgtgagggggattgaagttgataaagaaaagattgatgtgattgaaaagttaccccctccttttaatgtcaaaggagtgagaagctttttagggcatgttgggttttattggcagtttataaaggacttttcaaaaattgccaaaccactcagcaatctgcttaacaaggacgcattgtttttatttgatgaagactgtttgaaagcattcaataccctaaaaaccaacctagtgtctgctcctgtgattatgatgcaatcctatctcgcaagggcattgggtagaagactccaagtagattgggctagagatccaagggatggccctagggttctcttgagccttagggtagatttcgagcccatgggctaagtataagcccgcttatctttgtaaatattagaataggtttttccttcgtttgggccttgtattttggccattctagtagtatagggttttagccttgtatttcggggcattttgagtagtctttgtagtaaggactttttttttgtattttcatgtttttttgtcatgggggtgagcttagctattatggggggtgtgtagctaagttctagcttctcatctcaaggaggtgagcttagctattagagaggtatgtgtagctaagctctagcttctttaggaatcttcttaaggaagctcctcaaggaggtgagcttagttatgagaggggtgtgtgtagctaagctctagcttctcaaggaagttttctcaaagaagcttctcaaggaagttttctcaagaaagcttctcaaggaggctacctagtctataaatagaaacatgtgtaacacttgttgtaactttgatgaatgaaagttttatgagatacacttcaaagttccacttctttccctcttttattccttcaatttcgtgctccccccttctctctttcttttcctccattaaagcatcctcttcaagcttcttatccaaggcaattcttggtggtgaagctccttcttccttggcttattccctagtggatggtgcctcccctatcctcttttcctttgccttccgctgcatctccatggtgaaaaatcaccattgaaggacctcattggagctcaaagatccagcctccatagaatcttcacaagcaagcttccatcaagtggtaatcagagcacaagagcttcaagtgttgagggaaggagcccagagtatgaaaaacctcaagatttgatgtcaaatcctttccaatgtagagggaatgatgcaatcctaccccccaagggtattggatagaagaatccaagtagattgggctagagctactaagggaaggccctagggttctcatgaaccttagggtagatttttgagcccatggttcaaggttggatctgctcttctttgtaaatattagaataggattttccttcttttgggccttgtattttggccattctagtagtatagggttttagccttgtatttcagggcattttgagtagtctttgtagtagggacttttttttttgtattttcatgtattttgtcaaggaggtgagcttagtttttataa

SEQ ID NO: 96405 - DNA, 1711 bp, Glycine max
  Clone ID: PAT_MRT3847_58065C.1
gttttgtacagggagagaattccaaaatattatcgtaaaataaaactttttttttataaaaaaaaaaaacgtgtgtgtgtgtgtgttagtgttagcggaggcagatcggaagcgggaagttaggagatctgtgatagatggagggagttggggcccggctggggcggtcctcgacccggtacggaccggccacggtgttcagtggaccggtgcggaagtggaagaagaaatggatccacgtgtccccctcttcagcttcctctaattccagcgccaataaccacgcttccaatgcctcacatcttctcctctacaagtggacccctctcacccacagccttcacaccaccaacacctctcctctacaagtggacccctctcacccacagccagaacaccgccactactaacaacgctaacgccaaggactcgcctccggagcctcccgaggaaccgcctcgaaggaaattcaaatatgttccggttgctctactagaggagcagaaaaatgagggtgcagaaattgagggtactgagaaggttgacgaggaatctaaaccaattgatgctgattcaggtgcagcagaagcaactcacaagaatgagactttggatgaaaaacctgacataaatgatgtcccaatggaagaaagtcagtctcagtacaaaaatcaagtggtgcgccaagatctgaatgaaagcacattggacttaagtttgggcttgacatcacatgatgatgaacatgattctgattcaaaaactaatcaaacaagagatggccagtaatgcaagttaactaagtggtactgatacatgaacagcaggggtctcatgattctccagatagtgagaacataaatgattcagtctatataccttgttgaaggaaaggaattttcccctggctttgtgttcaaccactggttattttaggttgaattattgtaacggaatatgcctataacatggattttttttttattgagtgtccttgcagggctgaatgtaatatgcattggaggaacggatagtgtacctttttccccaatcactggacagattttttccagatatttattgaaataggatattctggactttgaaactacaatagtttggagctaaattgtttttattttctttttcaaaataaataaaataaataacattcctgatgattcaaattacgcttttcttcttctcctattattatttaagggttttattgaaaactcattcaatttgaaattatggaatgggaatttcactcccgaggaacccgtgtaatatgcgttctttgcattgtataaatggattgcttgtagtgactacaatgtcctgataatttgtgtcttattcgtttttgcttaattctttttgtccctttgtttggaacacgggttgaaagttgtgtcctgatgtcaattcatttttttttaaattatttttatttatagaagataataaatgatcatgagagattcttaactgtagcttcctgttttttctggttaagatttgcaaattgggagactgaatctaattgatagagatttaatttaaattaagcttgaggggtttgttggttgtttcctgtgcatgtatgtgtgagtatttcataattgcaagtctgcaatttatttgatggatgaaaagaacaactctaatgcagaaagtgacattattcaatcactcaaatatctgaact

SEQ ID NO: 96406 - DNA, 646 bp, Glycine max
  Clone ID: PAT_MRT3847_58066C.1
atcagccaaatagaattatatatattaagataacagtaccaggggtactgtggttacaatagagttaaagaaaacgtagtgaatccacctgccaagctactcagcttggggaaatccacccactcaggagattacataatcaggccccttggcttgtgaaccctcctaaactacatccccgccattagaacccatcctaatctgctgaaaagcatattggtaaattggtggaccaataattgtagtgaataatgaagtctttctccgatgctctaagccacgaccacaacaggaacagagcatcatccattagcttagcagcgttaaatgattcattcgagaaaaggatcttatttctgtgctgccatattgaccacgttaatgccacccaccagcacttccacctatgatttctttttcctccattcatcccgttttgatgctgcaaaaaatggtacctagggataatggggaatgcccctactattccagtccatgctagagattcccaccatagagctagagatttgggacagttgaaaaagagatgagctgcatcctcctgctgagatctgcaaaacgggcataaactgtcgtttatctctatttgcctccttctgagattagatttagtcggcctcgagcc

SEQ ID NO: 96407 - DNA, 331 bp, Glycine max
  Clone ID: PAT_MRT3847_58067C.1
gattaaaataaataaagaagacggcctttgtaattgaataagagcgtggaagtagttataaacaggggaatacacttactagctagacctctactcttttaatggggatgggttggtaactccagaagggaaaaaaccctttgagcattgaaaaaaaaatgggcattattgtagttgctcattctaggctgtacaagtaggagcttttgctggtattacgggcttgacgtttgcacattaagccggagttgcaccttcattgaatgtgagatcaacatcagatatatctacacccttacatggtgcaacactacttcgaataaaagtcact

SEQ ID NO: 96408 - DNA, 196 bp, Glycine max
  Clone ID: PAT_MRT3847_58068C.1
gagatccctgttggtagaggtatcaaggtttgcactacgccaacgtgacaatttgcttaacgtggacactcagaaacaatctctagcatgcttatctttttcgaaaggacgcgccgccgaagactcccccttacaggcagagtgccctactactaccccttaatgggacccccgcccttgcatatgggcattggtg

SEQ ID NO: 96409 - DNA, 481 bp, Glycine max
  Clone ID: PAT_MRT3847_58069C.1
gatacatttcgtcttggggaccaactccatctcgtcaacaccacggtcgccccatgtcgaagtcgtcttcgagtcgctccaaaatgccatgccgtacaatgcccaatgccatgcaccgcccagccaaaagcattggccaacagccaggcttcaaggcaatggttggtcggcactgcttcaactgtttgtgcggacctgttcattttaagagtgctctcgctcatgttctgctggcgctttgtttgacatattttggctctgtgatattttgtccatcaacaacattccatcggctggacttgaaaaacggttcaagttggaataacgatcgacaaaaacggaagtgccgcggggcagattttgttgagattttggttaagatatcatttccaatggagcaaattgtgtgcgaaatttgcccagcaaaatgtgacggagccaaaggaatggccagccacatgaacatgcggcacacaggaca

SEQ ID NO: 96410 - DNA, 1556 bp, Glycine max
  Clone ID: PAT_MRT3847_5806C.1
ccctcgctaccgcccacgcgtccgctttctctgcgtgcaagctaacctcattcatagaccatattgtacgacaaaaaccatcattatcctctccttctctctctccctccctagggattgttttgcttgctttatatatatatatatatatatatccaaacaagtcttgtggtttctattaccaacctcacttcgcaatttgcatgactcctccctccctaagatatctccattctcaaccttaatttgcactctcacgctttccctttcttctttttttcatgtcaagtactaccacttagacactcagatagatacacccacatataaaagcacgcctttgagattctaataaccttagtgtgttgtgcttagtccgattctgattgtatgaatgaatccttctagtggacaaccccagcaaatgtctagccagtcagtggagaagaagccaaagcctcatccagaacaagctctgaaatgcccaagatgtgactccaccaacacaaaattttgctactacaacaattatagtctttctcagccaagatatttctgcaagtcttgtaggagatattggacaaaaggaggaacactgaggaatgttccagtgggaggaggatgcaggaagaagagatcatcatcattaaagagggctcaagatcaaacattgacacccaatcttaatccactcactacactccctcatttgtcttatgactccaatgacttcactctagcagtagctaggtttcaaaaacaatcaagtggacaattgggttacaatgatcgtgatctttcaactttggggaaccccaccacaggctcattttgtgacattcttggcaattcaggcatgaatccctcctcagcaaacccttcatttttggatgcaattcgaactggtttccttgagacacaaaaccatcttcagaatttgtattgtatgtatggaaacggggacttgggggaggtggataatggcaattctggtgtggttggggttagtggagagatgatgctcccttacgatcaagtgataatgagcaatgcaacaactcaatcagtgagtgtaatgaagcaagaaatgtgtagtcgcagagaacaaagtgaaaggagggtgttgggggggttcccatggcagattaatgcagacactaacattggcgaacttgactcaggaagaacaattgcaagttggaacagtttcacaaattcttggcacgggcttctccaaagtcctctaatgtagaccccccgccacaagaaaaatcagaaggcacttatttcctctaatttatgtttgactaatatgtcagtcttaattttaattaaagtactgtcaatcatcttgagtagttttgggttaatagggatttaattcacttgggtccactttctttacttgtattgttttccctccgtttttttaattagctcctcaaaaactgtcaaattttctgtactattaaattatcttcttaatgatgaatagactaatgaaatttcagatttgtagtttgccaaccaatgcagtgaaggtggagggaaatagt

SEQ ID NO: 96411 - DNA, 231 bp, Glycine max
  Clone ID: PAT_MRT3847_58070C.1
atggggggtgcaaatagcacccaggcccacttgggccctccagaaggttgttgcttctggaggaagcaacctggcttcgcctgggcgagctgggcggcaagcacccttcccttttttgccgaggcgcttccgaaacgtttccgtaacgttttccgtgaggaatttcgcaaaggtttcaaccgttcttcgacgttcttcattcgttcttcatcgttcttcgatcttcaacgg

SEQ ID NO: 96412 - DNA, 137 bp, Glycine max
  Clone ID: PAT_MRT3847_58071C.1
agacgtcagaacgaggagagaaaggacaaagataagataacagtaagagactcagagatgtctttgcaaagcggtcgatctagaggatttaagcttacgtactcatccatgagacgtcacaacgcttccatagtgtc

SEQ ID NO: 96413 - DNA, 859 bp, Glycine max
  Clone ID: PAT_MRT3847_58072C.1
aaaatacaaactgggccatcgacccttagaataaactcaaattaacaacaaaggtaattacactgggccattttgctcaatgaatgatagaactaacatttcaataattggttcatgacaacattaaagatcatccaagttaattacattgtcattataccaatgaatctcagaagattttctctcacaattactctcaatatcacagcaagaactttccaagggtctttctaatgattctgcaagatccatctcccacaaacctaacctacatattgggttgtaggtctcataactggttaccctcatgccatctgacactaactcctttaagtctcctcttatttcttcactattcaatatgtctagaaatctttttgataccccagattgccagaaaacaacaatggcacaactcttgtccaccaatttaacatcaaactctcgtgaaaagatatcatgggaagaacgaagtaaactcttcagcatgccagctgtgataccaattttgaatccccataagaaaaccaaatgctcacaactgactttttttgtattattggtccacatgccgacatccccaccattaaatgaatcttggataggggttgagaatggatggaatacattggtgaagtcttcaagctcgggggccaaatgcttgttgccagattcagtaacatttggggaaattttcaatatagagcaaagcttcataaataaataggatagccttaatgcagtaagtccgtgaatcttgccttcttttactgtagcttggtcaggaatttccaaatcaactggtgcaaaaaaatgattattcaagtaggatatagcactcggaatgttggtcactttt

SEQ ID NO: 96414 - DNA, 184 bp, Glycine max
  Clone ID: PAT_MRT3847_58073C.1
acacccaccggaggtcgcccttttttttgtgctatttattttttttctccttttaggccttcaaaactgagccacaacctttttgggcgtgattcttaccattaaaataaaaaatctcttttactcatttattacaaggatcctacaacactctcctgtgccgggccttcttcatagaaataaa

SEQ ID NO: 96415 - DNA, 1141 bp, Glycine max
  Clone ID: PAT_MRT3847_58074C.1
ctcaatcttattgaacatttcatatctggttgcagtggggcatccaacaatttcgcttgaaagcaacaccattttaaatgatagggaaaggaggaaaaagaatatgaccaatgaaaatacaccaaaggccgtgtattctgtcagaaccatggatcaaagacagcaattcactcaatgcttggcatgtctgttgaagtggagtgctaccaatagtctttacacgagcagcttccatcctcaaaacaatgaaacctatttgaatctctcactgttatctttctttgaacaatctttgatatatatttgatggcggtgtgacagtctacacaagttcttaaatttttaaaaaccttgattggagttcctgggggagttgaaattattccaaaggcaacagcaagcttctcactgtggtaaacaagattttgctctttctgctcctcctccacatcatgtagcacaaagttcgtgtcaggaacatagccttcttcctttattttctttgagagttctcctaggaattcatgtatatcacttgtttttgggggggatgtatctcctactaagaacacatgcacttgtcttttaatttcaatccagctcttacctggcttcttcactatccccatattgtccatatcctttctaacattggctacctcgctccatagaccagcattagcataaatattagccagagtgatataggtagctggattctcgggctctatctcatataatgcttttgctgctcttttagccaattcaaggttcccatgtattctacatcctccaagtaaggatgcccaaaggaatttatcaggctttacgtgcatgttatcaatgatattctctgcctctttgaaccggccaaatcgttccaataaatcaataacacatgcataatgatctgcagtatgcatcaatccatgtttctcccttattgaatggaaatattctaaccctttatttgatcaggcttggtacctgattggagtagtaatttgaagaaatgaagtgcttcctctggttgaccattctgagcatacccaacaattagagaagtccatgataccaaatctggctgatgcatctcgttgaacacctttcttgcaactctagtctcgagccgctcgagccg

SEQ ID NO: 96416 - DNA, 329 bp, Glycine max
  Clone ID: PAT_MRT3847_58075C.1
gaagctcccggcgatggagaagaagcccatgaggatgaggagatggccgatttgcttgacttcttgggagggagtggagacacgtgactgggagatccccagattcatgttttctttcatatttcttttgtcatttttattctatgttattgttttgacttgagaggctaatgtttgtttttgttgttttgattgtcatttgtacagcgcatacatttttgtttagattggtgcgttagtatttgtatatcattactatcgatgatgtttgaaattctggaaccgtgtagagttcttcgtttaggaacgtcgtccaaaagtatatatgt

SEQ ID NO: 96417 - DNA, 240 bp, Glycine max
  Clone ID: PAT_MRT3847_58076C.1
gagtaccaagagaggagaaccccaattaaataaaaacattccttacagtatgaacaactcagaataaacgccatcacgtatgtaatagaaaacttgtgatggaattgcctaaaagaaaaaagaggtgcaagttttttttccagggggttcccaaaacaaaagcttctagccccgaaaaagaaacccagctcgcctgggcttcattcccattgaataattgaagagcttgtataactgcat

SEQ ID NO: 96418 - DNA, 351 bp, Glycine max
  Clone ID: PAT_MRT3847_58077C.1
cttatggacaaaggatgggtttcctttcaatctcttcttcctcccacaccgggcagtactatgtttcctttcctgggattccccgtaaaactaagccgcccaaccatggaactccaccatgttacccgcaaactggtggttgaagtcaactttttttttattactcggccacccaacatcgtcaagaaggaactggatcaacacactttttaacataaatactggttcacacctccttattgttcacaccaagagagaccaatataccgggggagacggtcttatatggtgcgcaaaatatacgcgagccaaacccaccgctctcacacatgcaaatggagagttaaaaca

SEQ ID NO: 96419 - DNA, 787 bp, Glycine max
  Clone ID: PAT_MRT3847_58078C.1
ctgcggctaaattcttggaccgctgtgtgatgaatttcatggcccccgcctcaatcactcatagttaaaagaaggtagggaaatgcacctagtcaaaaatttctttcatcaccaccactgccaggaacagcaacagcaacagccgctcaccatttcctattaaagaaatatttgtgttgcggatgtcacagagcttcaggccaaatcgattttattgcttgcaaatagaaaattggaggaaagagtgaggacaccaactgggtcagagccatcttcaccagcagtgatgcaatctaacaatcaattgtatagtcctggcactggcctttccatgagaaaatcgttgcaaaggttccttcagaagagaaagaatcgggtccaagaagcatcgccataccatcactagttgatcatgaaaaggaggaaccaaatgaaaattgttttgctgtatgaaaggagagtctatttagaattaattagttctttaaattctttctttaatatatccttaattattaggtttactagttcacaccttttttgaaatattatttttgtaccatcatgtacttcttttacaggctgtaaatacttcttttacaatgcaaaacttaatttaactttgtttatttttaaaaaaaaaaaaaaaaaaaaaaaaaaaaaaaaaaaaaaaaaaaaaaaaaaaaaaaaaaaaaaaaaaaaaaaaaaaaaaaaaaaaaaaaacataaaaaaaacaaaaaaaaaaaaaaaaaaaaaatttttttttttgggggggggcccccccccc

SEQ ID NO: 96420 - DNA, 2664 bp, Glycine max
  Clone ID: PAT_MRT3847_58079C.1
tgaagttcctggtcaaaatgcttatgcatacttttatccaccaacttatcctgatttccaagctagtgaagaagaaaagcctccattattattgaagagccacggtggaccaactgctgaaacacgtggaattttaaacttgagcattcagtactggactagtcggggttgggcattcgttgatgttaattaggctgcgagaagacgacagaagggggttatggcagggtgtacagagaacggcttttgcgccagtggggaatagttgatgttaatgactgttgtagttgtgctacatatttggtggacagtggaaaggtggataaggagcggctatgtattatggggggctctgctggtgggtataccaccttggctgcccttgctttcagagatacttttcaggctggggcttctttgtatggtatagctgacttgaacttgctgagagctgaaactcataaatttgaatcccattacgttgaaaacctagttggcgtcgggggttcttgttgttgagccggaaaatctaggaggtgaggctgtggacattactcctaaggagtttggagacagtggctcaggagtatggaggtggtgctttcacagtttcagacgatgttgttttctttgcaaattacaaagatcagagattgtacaagcaatccatcagttctcttgatgtgcctcccatacctctcactccagactatggtggcccagtagtcagctatgctgatggaatattggatgtacgctttaaccgttttattagtgtaagggaagatcgttgcaagagcagtcaaaatccaactacaactattgtatctatagcacttggcagtaaggatgctcaggaaccacaagtactagttggcgggagtgatttctatgctttccctcgtcttgatccaaaaagtgaaagaatggcttggattcagtggagtcatcccagcatgccgtgggataaatcagaactatgggttggctatatttctgaaaacggagagatctacaagcgggtatgtgttgccgggaataatccttcacttgtggagtctccaactgagcccaagtggtcttctgatggagagctgtttttcatcacggatagggaaaatggtttctggaatctccataaatggattgagtctgagaataaggtcttgcctgtttattctttggaagctgagtttgcaaggccactgtggatttttggtatgaattcttatgaatttcttcaaagtcatacacggaaaaacttaattgcttgcagttacaggcagcaggggaagtcatatcttggaattattgatgatgtgaagggctcaaaattaactgtgctggatatccctttcacagatataaataacataacgtctggtaatgattgcctatttgtggagggagcatctgaggttcttccatcgtcagtggccaaggtgactttagatgatgataaatcaaaagcagttgacttcaatattatttggtcttcgtcacctgacagtttaaagtatagttcctacatcagtaaaccagagtttattgaattcccaactgaagttccaggtcaaaatgcctatgcatacttttatccaccatctaatcctgatttccaagctagcaaagaagaaaagcctccattattattgaagagccacggtggaccaactcaagaaactcgtggaattttaaatttgagcgttcagtactggactagtcgaggttgggccgtcgttgatgttaatgatggttatggcagggtgtacagagacaagctcggaaaatataccaggcggggaaagaaaaaggtgtgccagttgctcttgttgagtatgaaggagaacaacacggtttccgaaaggctgagaacattaagtttacacttgaacaagaaatggtcttcttcgcacgattgattgggcactttgatgttgctgatgacatcactcccatcaaaattgacaactttgatgactaatggctttttcggagtgctttgcagaaattcaggaactcagatggaaattattgtaccaattaatgagctgcttctgcctcatagccataatagccctctgaggaaggtctatattaatgctcattgccaagagtgtgctgagtttctactatatattatcttgaagttcaatttaattagtcttgtatcttgttttctacttatcaatttagattttgaaagtgtgctggagatactgcatatgtttgttttctaagatacctgtcctgcatggataaagtgggtgatgatgaactttatagtattgaacttaatttttgatgtttcagccccatcaaaattgacaactttgatgactaatggctttttcggagaaattcaggaactcagatggaaattattgtaccaattaatgagctgcttctgcctcatagccataatagccctctgaggaaggtctatattaatgctcattgccaagagtgtgctgagtttctactatatattatcttgaagttcaatttaattagtcttgtatcttgttttctacttatcaatttagattttgaaagtgtgctggagatactgcatatgtttgttttctaagatacctgtcctgcatggataaagtgggtgatgatgaactttatagtattgaacttaatttttgatgtttcagc

SEQ ID NO: 96421 - DNA, 507 bp, Glycine max
  Clone ID: PAT_MRT3847_5807C.1
agcagtccgcccacgcgtccgctgaactggttattacaaatcaatgtgccgtttttattcaaaaaaaaaaaaaaaaaaaaaaaaaaaaaaaaaaaaaaaaaaaaaaaaaaaaaaaaaaaaaaaaaaaaaaaaaaaaaaaaaaaaaaatccctcaaaaaaaaaaggggggccctttaaaaaaaccaaatttaaaaaaccccgcaatgaaaagtaaaagttttttaaaaaagtcaccaaaaacaaatcaacgggccgctttttaaaaaacgagggaattgaaaaaaccttggggttaccaaaataaatgcctttgaaaaaaaaccccttttggccagtgggggaaaaagaaaaaagcccccaaaaaaaaccctttacaaaaatttgccaatccaaaagggaaaagggaacccccctttaagggacccataaaaccggggggtgggggggttaacccacagggaaacctttaaatttacaagcccctaaagccccctttttttttttttt

SEQ ID NO: 96422 - DNA, 241 bp, Glycine max
  Clone ID: PAT_MRT3847_58080C.1
attatccttcattctaaggcttgagcttgttaccttctcattcatgatcatttgctcaagggagggcgacgcacgtaccctgcccaaatcagccttattggcttcccaagttgatttaccttctgttgctcctctttcagtggtggcaccactggccaaattgcctggtactctaccttcagtgcctggactacctgcagtacctgaagtaccaactcctgaagttattctttataccgcg

SEQ ID NO: 96423 - DNA, 1759 bp, Glycine max
  Clone ID: PAT_MRT3847_58081C.1
gaattgtgattccttgttaagcatatggagggaatggtgaggaaaatggatagatatgttactgtcactaggaatttgtacagtgagatggaggtgttgaatgagttggagcaagcagtgaagaagtttcagcataaccagcacgaggagagtaggagggcttttgagcagaagctcatgtggcagaagcaagatgtgaggcatcttaaggatgtttctctttggaatcagaactttgataaggttgttgagttgttggcaaggacagtttgtaccatttatgccaggatttctgtgatctttggcgaatctgctttaaggaagaacgcccttgggctcggtggaggctccccgggtacacaaaatgaattggggtttgtgtctggccatgttaatgttccgaggagttcggagaagttgaagcgcaatcagagcaagagaaatggatttcatttgggttcggttgggagaatggctgtggcggagagaaggggaactactagtaggcctcagattgatttgaggagaggtgagttggtgcctattcgacctgaagattttggttttccatgtggtacggctgcgagaagacgacagaagggggaacaagtgcgggaagacttttcatggaatgcctaagtttgagtagctcagtttcaaaatttgatgatgctgatgatgtcaatagggaggaccatcatagtagctgttgcagtgttgggatagggaataatagcatgaagatggagcacgcgtgccattctggtattctaagtcatagccgaagtggcgttcctttcaccggagatcttagacaagccaaatctggtgtacaaagttgctcaacattaggtcccaaaagtaggttagctgtttatgctcctccttccacacttggaggctgtgctctagcattgcactatgccaatgtcataattgtcattgagaagctgcttcgctacccgcatttagttggcgaggaagcgagggatgatctatatcagatgctaccgatgagcttaaggttatctctcaaggccaaactgaagtcctatgtcaagagtttggccatatatgatgctcctcttgcccatgactggaaggagaatcttgatgggatactcaagtggctcgccccacttgggcataacatgatcagatggcaaagtgagcgtaattttgagcaacaccaaattgttagccggacaaatgttctgctacttcagactttatactttgctgacagggaaaagaccgaggaatcaatctgtgaacttcttgttgggttgaattacatatgccggtatgagcatcaacaaaatgctctactggattgtgcaagcagtttcgattttgaagattgtgtggagtggcaattgcaatgtggagattcttttctcaattgattacattttaaattttgaaatcttcaatatggtggtgagcattttcttgtttttaaatatcttaggatatcatctcaatagaatgtggaactatgagctttgcacgttgaagattaatactgttgaagacttggatgtatttatttacagtttgacttgcgtagtggataagcagtcatatttataaaggggcatagaagttaatgcccaacttgtatatatataaatttatgtacagattgcttactgcttaaagtatgctttgttaaaattgttgtcatgaaaaccccagaaactagtattgggattttaatttttaagcgggggttgatttgttggggcttgtccttccc

SEQ ID NO: 96424 - DNA, 499 bp, Glycine max
  Clone ID: PAT_MRT3847_58082C.1
ggcccagaaaaaaaaccttcttcacggaaaaaaaaggaaaaacacaccccccaattttggaagcggataccaaaagtccaaaactatcaaaaaaccaccgggggggagcttttttttttctaaaaaaaacaaactaaaaacaccgggttccccggacaaaaaaaattaaaacaaaagggaatccccaattaagctatttcatggaaaaaataaagggaacgagggttccaaaaataaaccaggcccccccccggaaaaaaaaaatatataaaaatatttaaggccccattaaccgaggaagcccccatcaaaaaccccaagcccttgggggaaaccaaggggggggcccccagcccggaaggcattccccccaagggacatttctttaaaaaaggggggcttgaaaaaggggacagaaatccccccggaaaacggggggggacccaagcccaagtgggtcaatttaggaaaagggcccacgggggggggaataccccca

SEQ ID NO: 96425 - DNA, 398 bp, Glycine max
  Clone ID: PAT_MRT3847_58083C.1
aacacgctgattctaacggtgatgtaattttgtattaccgacgagcactccttcaccgacggaatcatgatgcaaaaaccatatctaagattcagaaagaacttgttgtttatgttatatatagtggaggggaagcagtccttacaaatcttcattcccatatggacagctcgttagtacccagaaacaacttacaagaggctattcttctcttaatgattttgctgagaaaaatatctctaaatataattgaatgggatccgttaattttggaccacctttcgattgctctatatgtgtcaggggatttgacagctatagcccattaatgggaagaattactccctggtactatccatcgaagagaaagataccatgccttatatgtgttggattat

SEQ ID NO: 96426 - DNA, 184 bp, Glycine max
  Clone ID: PAT_MRT3847_58084C.1
acctgccagtttggctttagcatgggtatttaaacaagggaaggatgttgtacctttccctggaacaactaaaattaataacctgtatcaaaacataggggccttagacgcgaaactgtcagaaaaaaacctgaaaaaaatttctgaggcggttcccattgttgatgtacccggtggtaaatac

SEQ ID NO: 96427 - DNA, 1000 bp, Glycine max
  unsure (1)..(1000): unsure at all n locations
  Clone ID: PAT_MRT3847_58085C.1
aatcaaccaagtgcgatgacgatgactatggctgtaaggagggtacttggctttgcttcaaaaaaacccccttttctgaatctctatcaaaatgcaaacttgcgccatattctcccttctcctcgtcatatctccgcattttcaggtataatgtcacacttagtaatttctgtataggtgattcatgtgtaatccacaatggagtctgcattggtcaagatggatttggattttacgtggatggtgatggtaatatgataaagaagcctcaggttggttgtatgtcttattgtaaatggatttaaaactctgtatgttgacaggtgcttttcataaactatatttttccatatttagcacccaccttccttagtttgtactagacacaataaaaatgcttttcgtgcttaaatctgtcagatgttgaatgtaataattgggaacaatgtggaaattggtgcaaatacctgcattgatagaggcagctggcgagatacagttattggggacaattcaaaaatagataatttagttcagatgaggcttttgaatttctactgagttacaacaataatactctgttgaggtcagcataggagattatgtgactacggaaggaagggtagcagtacgagatcatttatccatcatatcaaagcaagttgagtaaccaaggacatcaaagagcctggggactatggtggctttccagctgttttaattcaccaatggcggatacaagttgccagtagatgtcagactctggtatgaaggaatccttaaagtcagcaaaatatattttgatatgtagttagtacttagtggagtctaaatacttgcctcatgaagaactttttgtgcagtaatttctgatcgattgttcagtagagaactgtaagcaattaatgccaaaaacttaaatggctgaaatcaatatgtagttagcacagttttcagagcttanaaaaaaatantaaaaaactatttatactaantgtat

SEQ ID NO: 96428 - DNA, 406 bp, Glycine max
  Clone ID: PAT_MRT3847_58086C.1
aattgattattttttgatggttgatatacagggtagatatgggggcgaggaaaaaaaatggaaagagagaagtgggagaaactcacatgtggaaagaagaagacatacataggaaccacaaaaaaaaagccggaaacagagaaggaaaaaacggggggggcaaacaaggaaaataactaaacgaaattaagagacgctaacggccggactgccagagggaaaagaagaaaaaccagcacaaaaataaataacaaaaccgcgaaaaaagagaagaagagtaggggcgcaaagaaggaagtgaagtggaccacggaaaggggaaacaagagaatgggcaaaaaaaaggggactaaaaaaaaaaacaaaaagggatcaaaaaagggtagcaacgactggcaaaagaaaa

SEQ ID NO: 96429 - DNA, 361 bp, Glycine max
  Clone ID: PAT_MRT3847_58087C.1
cccaattgctaatcttgctttgtgtcttgctgtttctagcacttattggcaccctctatccctacaatcgtggaggactgttaaattggcttgtcttgctgtatgctctttcatctgtttttgctgggtacactgcagcatccttccatggcctgtttgctgagaatggatgggaaaggagtgctagtctagcagcaattctttacactggaccagtgtttgttgtagcctctatcctcaacattgtcgcaatatcttacagggctacaattggactcccattcggctctattattgcgattcttggtttattaacatttctcgccatcccattgcttgcatttggtggagtgattggata

SEQ ID NO: 96430 - DNA, 795 bp, Glycine max
  Clone ID: PAT_MRT3847_58088C.1
ccggatcatacaagtaaatgcatttggtgatccaaatcgcgctgcagatattactaaagatgttggtgttgatgttaagttcacttattctgttatctggaatgccactaaagtacgttttgagaacaggatggacagatacttgagagcttcgttgatgcctgtccaccagcaagttcattggttctcgtttgttaactcaattgtcatcattttgcttttgattggtttgcttgccctgctttatatgcggcatctgaggagtgatttgaaaaagtattctaatgcaaatgaagaagataatgaggttggttggaagtccctccaacatggcgatgtattcagacctcctccaaactcatccttactttttgctgttgtgggaactggtacccaattgctaatcttgctttgtgtcttgctgtttctagcacttattggcaccctctatccctacaatcgtggaggactgttaaattggcttgtcttgctgtatgctctttcatctgtttttgctgggtacactgcagcatccttccatggcctgtttgctgagaatggatgggtaattctttacataattccacaagaaagacaaaaatgttacacttttaatgttatttttaactacctataaatatatgtgatttggctataattccaggaaaggagtgctagtctagcagcaattctttacactggaccagtgtttgttgtagcctctatcctcaacattgtcgcaatatcttacagggctacaattggactcccattcggctctattattgtgattct

SEQ ID NO: 96431 - DNA, 268 bp, Glycine max
  Clone ID: PAT_MRT3847_58089C.1
ggttggttcaaaccagatgatccaaaccagaaaaacgttgcttatgaggacattctacgaccatcctagacattctttctgcgaaggatagctcccccagcctataacaatgcttgagcctttacccaatattgtcactttaggtatgctcacaccgtttacaccaaaaaacaaaaaatggaggctactgactacaaaagccacatgcagctgtcacggccaaagaatgttcatacttactaggatggcaggaatctgaaaagaaccc

SEQ ID NO: 96432 - DNA, 337 bp, Glycine max
  Clone ID: PAT_MRT3847_5808C.1
gttcgacccactcgttcgcccatcttttctcttttctttcgtggacgcgagcggaaaaaggctgactgtttatacaactgagcataaagagaaggccactgcatcctatcgggctgcgttcaatgaagggggaacttccttgttttgcgcaagatacacgagccaccatattttgttcaatgttcaatcttgcggcgcccaagatgcagatgcatgggttaattatacaagaaccttagtctgaatggcggcgtccataaacaaattgggtgccgctaaaatggcctgggttgcaaggaaatggcaaacaaggttggttgcaagaatcactcccatg

SEQ ID NO: 96433 - DNA, 1048 bp, Glycine max
  Clone ID: PAT_MRT3847_58090C.1
atgtcattgttcgagaaagggatgagaaagaaacacgcggtagttgcattgattaaaaatattcggcgtaaaaacttatctgtcgtcgaagaagcggaagcttataaaaagttacttgaaatcgggggaacgactcaaaatgaattagcaaaaagtctaggcgagagccaaagcttcattgctaataaccttagattattgaagttagcacccaatgtgattaagagattcggtgaaggtaagattacagaaagacatgcacgagcggtattagtattacctgatgaaacacaagaagaattaatcgagcaagttattagtcagaagttgaatgtgaaacaaactgaggatagagtacgtcagaaaactggaccagagaaagtaaaagcgcagactttccaattttctcaagatgtaacacaagcaaaagaagaactaggtgttgatattagtaaaagaagtagtgtagttgcacattataaaaatggaaaattccaaaaagagtttttcatccaaaataataaaaatggttacaattatttactcaagtatttgaatgacttagaccacccacaactcatttttgaatctacagaaatctttactcatccagacatggttcttgatatcgacaaggaggtactgattacacatatattcaattctacagataagggaatgtcaatggataaagctacaaaatatgcacttcaattaagggtgattgctcaagaaagctatcctaatgtcgatagacattcctttctagtcgaaaaattacgcttacttattcaacaattaaaacaatctattcatcatctcaaacaattagatgatgccatgattcaattagcacaacaactcgattattttgaaaatattcattcgatacctggtattggtaagctaagcacagctatgattattggggagattggtgatattaagcgatttaaatcaaataaacaactcaatgcttttgttggcattgatatcaaacgatatcaatcaggtcatacacactgtagagataccatcaacaagcgtg

SEQ ID NO: 96434 - DNA, 590 bp, Glycine max
  Clone ID: PAT_MRT3847_58091C.1
agacactttaaatttgcctgactattaaactatacagccaacataaaacttgtcaatataccaacatggatctagttttattgtcataagagggtacgtccttgctatatagaatatgttcttcaatgtctggaatggcaattttttcctctcaggttctttgcgatgtactacagtatagttttgattatcagttgttatgcttttactactatttttaaaaaaattcttccttgttttcactttgttttctactttaagggatttgaaaaaaaaaatggtgaaaacagcaaattcttgtttctccatatcctttacaaactcttagaaacaagaaacaaattgaaaataaagtggacactggacaatggactttataattaatagtaaaaacatataagttaaaatgatatcaaaaagctagcactgattgcatgtataaatgattcaataataacttttgctttttcaagagatttttttttttaaactgtttgcatcttaatgagtagttgttaccgccacaatttccatgtataagtgtatcttctcacctgttgaatggtagatgagagaattatatagaatat

SEQ ID NO: 96435 - DNA, 1101 bp, Glycine max
  unsure (1)..(1101): unsure at all n locations
  Clone ID: PAT_MRT3847_58092C.1
cgtccgaccacgcgtgcgttctacacaactttttctagcattgtagcatcatgactggcaaagacatccttcatataatgaatgtgaaagcagggttggcaccaccagacacagggaaaggaaaaggcaaaatatcaaaacacatcctatggaagattatttagtttcggaatttaagcaagaaaaggatagagaattaggcttgtttgcaatatttgatggccacttaggccatgatgttgccagctatttgcagaaccacctttttcaaaacatcttgaaagagcatgacttttggactgagacagaaagcgcggtgaagagagcttaccttgaaacagatgagaaaatattggaacaagcacttgtgttggggcgaggagggtcaacagctgtgactgcaatacttattgatggtcagaagcttatagtagcaaatgttggtgactcagttttatttgtgagaatggaaaaggccaagacaactatctgtgggggtatcatgaaccaagcaaggaaaaaaaatggattgagaggcgtggcgggtttgtatcaaaaattccaggagatgtccctcgagtagatggacagctggcagtagcaagggcttttggtgacaggagcctgaagatgcatcttagttcagaacctgatgtgcttgtagaggaagtagatccacatacagagtttcttattctggctagtgatggaatatggaaggttatgtcaaacgaagaagcagtggaatctattcgacaaataaaggatgctcaagctgcagcaaagcacttgatagaagaggcagtttccaggaaaagcaaggatgatatatcttgcatagttgtaaggttctaatgacatgtttttatggataagcagaggaatcctttcccaaaccaagattgaaggccctggtggacatttagaattttagatgatcagatgaacttcatcatgttctttcttagctaaaatgcctgcagaaactcacaagctagcactgattgcatgtataaatgattcaataataacttttatttttttaaatgagattttttaaattgtttgcatcttananaaaanaaaanataanaaaanaaa

SEQ ID NO: 96436 - DNA, 393 bp, Glycine max
  Clone ID: PAT_MRT3847_58093C.1
ggcacccaagcctgatccacccaagcatctcccatctggcccacaagttatcctatggtgccgtgaagtaccgattgctggggccccctcgtgaggtactgacccatctacccagtggcacttgaccattgggcctgtgagaccaagctttgtgacttaagtgaagactcaaacggacatggctgtctcttgtttggctcttgtcagccattgtaccggaaaggtcattgagaacctgcgataccttgctgaccctgcacacacgctggctatgcaccactcgtccggaaggagcgcaaaacaatgacttgaagtttaattgtgttgggaagacttaatatggatatctggtatcaatcactaagttctgctttactaaaaaaaaaaaactga

SEQ ID NO: 96437 - DNA, 1802 bp, Glycine max
  Clone ID: PAT_MRT3847_58094C.1
agacactttaaatttgcctgactattaaactatacagccaacataaaacgggtcaatataccgacatggatctagttttattgtcataagagggtacgtacttgctatatagaatatgttcttcaatgtctggaatggcaattttttcctctcaggttctttgcgatgtactacagtataggtttgattatcagctgatatgcttgtactactatttttaaaaaaattcttccttgttttcactttgctgtctactttaagggatttgaaaaaaaaaatggtgaaaacagcaaattctcgcttctccatatgctttacaaactcttagaaacaagaaacaaattgaaaataaagtggacactggacaatggactttataattaatagcaaacacatataaattcctgaactttgaacaactcttcacacaacaaaacttttttctggcattgtaccaccatgaagaccacagaaatggctctctaagtgaagtcttaaatttctgaacattgaacaactcttcacacaacaaaacttttttctggcattgtagcatcatgactggcagagaaatcctccatatgatgaaggtgaaagcagggtttggaacaccagacacagggaatggaaaaggcaaaatatcaaaacacattacacatggctttcacttgatgaagggcaaatcagcgcatcctatggaagattatttagtttcagaatttaagcaagaaaaggacagagaattaggcttgtttgcaatatttgatggccacttaggccatgatgtagcaagctatttgcagaaccaccttttccaaaacatcttgcaacaggtaaggttactttcatatttcatatataatttcgtgtttggtcccattttcatgaaaattgtaatggacaaaattgagatacacttctttagatgctgccatgttggccttgtcttcgatcagaattgaagtttcagcataataatccgcaaaatgcatatctttattacgcatacgcatattactgaggtgaaacttcaattttgataagagaacaacacttacagaatctaaggatctgtatctaagtgttgtcaaatagttatttggtagacctccccactgtttgataagtaacgcttttcacaccatctaataatgatacacttcttctaaaccggcttcaagagattcttctttgactcatttttatgtttggtgcaagcagcatgacttttggactgagacagaaagcgcagtgaaaaaagcttacgttgaaacagatgagaaaatattggaacaagaacttgtgttggggcgaggagggtcaacagctgtgactgcaatacttattgatggtcagaagcttgtagtagcaaatgttggtgactcaagagctattatctgtgagaatggaaaggcaagacaactatcagtggatcatgaaccaagcaaggaaaaaaaatcgattgagaggcgtgggggttttgtatcaaacattccaggtagatagctttttgatgttgttataacacagttttttataaacaacatattttcatctgtgcaaacaacatatttaagcactttttcaataaactctccttaaatggtcacttatttcttagttttcctgtgaagtttacatgtcattttgataagtttaaatatgctcttccaaatgatcctttagtcttgagaatcatttgattgttagagtttctacaactcttagaaaaacttgctttgcaagatgctataattatacatttattttgtttcaaatagaattgcttagaaattatgatg

SEQ ID NO: 96438 - DNA, 277 bp, Glycine max
  Clone ID: PAT_MRT3847_58095C.1
ctctctctctctctctctctcattcacacgaatcacactctccacagtgcgattcattcaccaatggatcgcaacggtgttctctctcttgcattcatcggcatctcctaccaccacccccgccgcgcctgctccagcgaccaagccacctgcagcctctcctcctccggcgccggttcccgtgagctctccccccgctcccgtgccggtgagttctccacccgctcccgttccggtggcggcgccgaccacccctgtggctcacgctccggctccg

SEQ ID NO: 96439 - DNA, 1544 bp, Glycine max
  Clone ID: PAT_MRT3847_58096C.1
aaaaagtaagaatggttaattttactatctatattgtaattacataaaatcagctcctaaatttaatttcaattctactagaaaattcaaacataactttaatatttgaaggtataattgtgatctctaatttggtgaccactagcatcatccatctctcaagtctcaacaagtcccaaagagtaataatgatctaaacccaaaactaacgagacaaaaggccaagcaaagaagcactagtaaggacaacgacagcaatcgaataataagggtctgaaggtaacaatgtaaataaatgtaatgtgtacccaaaacagggtcaaaagaaaaagaaacaaaaaaggaaaataaatgatacaatacaagaatttaataacagcaacaaagcctgtctagaagaccaaaacaagggtagcccaacccaaacctaagcctcctagaaccttcttcaagcacatgatggtctctgctccactctcatcgttggcagcagtggcaggtccaggggaagaagcgtcctcgctaggaccaggagccccggtgggtggcgcaggaggtcccagcaacgacggtgaaggagccggagcaccgtgcttcttacccttcttcttgtgcttgctcggagccggagcgggagccacaggggtggttggcgccgccaccggaacgggagcgggtggagaactcaccggcacgggagcgggtggagaactcaccggcacgggagcggggggagagctcacgggaaccggcgccggaggaggagaggctgcaggtggcttggtcgctggagcaggcgcggcgggggtggtggtaggagatgccgccggcgacgaagcaggggttgcggttgcgggcttaggagacgaagctggtggagatgatttgggagaagcaactggggctggtgaattcggtactgtggaaggtgcttgggcgggagtggcggcggcgggagttgccggagtgtttgacggcgctgcggcgggagactggcctccgacgccggcgactacaatgcagatgaatgcaagagagagaacaccgttgcgatccattggtgaatgaatcgcactgtggagagtgtgattcgtggttttttttttttttttttttacaaaaatctcaactccattcatgcatgtacaaacttgtcaaacaatgcacaacgtgcttccaaaagtcattaaaaacatggtgtaatcgttataaagaaccttcatctcacagacagtagatttatgagagtctgattttcgtaggaagtgtcgcaatcctcagtaggtgatgaaagtgtcatgagagcaacaactatagacctcatactcgggcgtagtagtgggttatctcttgtacaagctctcccaagttgagcaatcttgagaactgaatcaattggatagttttcgccaagcctaggatccaccagtttgcgaatactttctgaaggattactctgattaagtgcttcttcaaacaaagctacaaggccctttgattcagcaacagattcacctgtctttagaacagcattctttgcagaa

SEQ ID NO: 96440 - DNA, 1200 bp, Glycine max
  Clone ID: PAT_MRT3847_58097C.1
aatgattcaaagagaatgaattgaaaattaaaagtagttttgattgtatggaaagtgtgaattgaaaattaaaaattagtttggagtatagtgtaattacataatattatctcttaaaattataatttcaattttactagaaaaatcaaaacatatttagaatttgaaggtataattttaatctcaaatttcaatccacgtctaatttggtgaggtaatcgaccactaacagaaaaaccaccatccacctatcaagtctcaaccaagtcccccaaaagagtaataaacccaaaacgaacgagacaaaaagccaagcacagtagcactagtgatgacaacgacatcaatcgaataataagggtctgaaggtaacaatgtaaataaatgtaatgtgtacccaaaacagggtcaaaagaaaaagaaacaaaaaaggaaaataaatgatacaatacaagaatataataacagcaacaaagcctgtctagaagaccaaaacaagggtagcccaacccaaacctaagcctcctagaaccttcttcaagcacatgatggtctctgctccactctcatcgttggcagcagtggcaggtccaggggaagaagcgtcctcgctaggaccaggagccccagtgggtggcgcaggaggtcccagcaacgacggtgaaggagccggagcaccgtgcttcttacctttcttcttgtgcttgctcggagccggagcgggagccacaggggtggacggcgccgccaccggaacgggagcgggtggagaactcaccggcacgggagcgggaggagagctcacgggaaccggcgccggaggaggattcgccggaggaggagaggctgcaggtggcttggtcgctggagcaggcgcggcgggggtggtggtgggagatgccgccggcgacgaagcaggggttgcggttgcgggcttaggagacgaagctggtggagatgatttgggagaagcaactggggctggtgaattcggtgtggaaggtgcttgggcgggagtggcggcggcgggggttgccggagtgttcgagggcgctgcggcgggagactggcctccgacgccggcgactacaatgcagatgaatgcaagagagagaacaccgttgcgatccattggtgaatgaatcgcactgtggagagtgtgattcgtgtgaatgagagagagagagagcggacgcgtgg

SEQ ID NO: 96441 - DNA, 348 bp, Glycine max
  unsure (1)..(348): unsure at all n locations
  Clone ID: PAT_MRT3847_58099C.1
gcattttaaatcactaaatcgatcaaaaaatgtaaattgataagacaaatagattaaaaaaatcacttttttctgttgagatttgtctttgtttgcaattcctagtgtgaaaattaaaccaaacaacacataataatttcattgattttttttttatctcaaatatataatctcattgtcctaagatataacttaatttcggttttatgtgttgggtagtttataagtttttgatatttttttcataagattcaaattcaaatatcaagagtttacaaaacctngcacatattgtttaataaactaagctagatgtttttatggtttttttacattgacaattaattt

SEQ ID NO: 96442 - DNA, 188 bp, Glycine max
  Clone ID: PAT_MRT3847_5809C.1
actttctctctctttgtaacttgtaagcatggagtcctcaaagatctatgcttacctcttcctttgcatgcacttcctctcctccgcaactcccattctcggttgtcgctactgtggcaaaccccctaaaaagcacaaggaccgtagaacatcagagacaccctcagtacccgttcttaagccaccag

SEQ ID NO: 96443 - DNA, 385 bp, Glycine max
  Clone ID: PAT_MRT3847_580C.1
ccggaccgttatacccgggacgacccacctctcttcccacgcgaacggaaaccaccacgggggggtttaaagcaagtatccgcagggaccgacaaactcaggaacatgctctgctcacatgcaccctaggtgtgaaacacatgattcgaggctgaaacaaaatggatgcaactacacccaagtattccaaggccaggcatgatgaaattgagaaagaagtgtcctcctacttgaaaaaaggaggatacaaccctgacaagataccttctgtactaactctaggtttgagggagacaacatgattgagaggcccacaaaccctgactggtacaagggtacaactctgcttgatgcacctgaccaaattaatgagcccaagaggccc

SEQ ID NO: 96444 - DNA, 370 bp, Glycine max
  Clone ID: PAT_MRT3847_58100C.1
aaaaacactgtcattgcattgttgacacgtttctgcactccagcacagcgatggacaagggccgcgtctcccgccgggccgaggtcctcaccaaccacctccttcgtcgcacacccgcacccttcgaccttttgcacccgcacccgtgccttatctactcccccccggagctgtccgacacccatgtccttcgacactcgtgaaatgcgaaaactaacggattgccacaatctggatgagcgcgactggatcttgtctctcatccttcagagccatgtgcttaacccccgccaccgacccggaagggtgttcgattaccccgactacgaccagaccatggaacaccagcgcctggacaacatgaagcgca

SEQ ID NO: 96445 - DNA, 399 bp, Glycine max
  Clone ID: PAT_MRT3847_58101C.1
aaattaaggcgtatataggatatatagttactataaatatatgttcgaggatcatccaggccaaattttaatgcacaattagttgggaactaagaaataattaaaatacatagtcttagccatgaaagccaatcaagaaagaaaattaaagaaattacctggggaattttttgaacttgaaccatagaaatttcaaatgatcagatccacagttaatctaaaaacgactgtggtcgccctattttggggagcttacaactacatcatgggggggggggtatattatactttatacttatacactaaatttagggtttttgatggcgcattagggagcttgtagaagagtaattatttagttattaaacaacgggaaatatttgactttggaggggtaac

SEQ ID NO: 96446 - DNA, 171 bp, Glycine max
  Clone ID: PAT_MRT3847_58102C.1
ctattcgttcgtttaagaaaatcttgatgctctatgaattgaatgatcgcacgatcggacgagcgatacaaaaacatgagggggcaacatgcatgccacacaaatatgaaaacatacaacttgaatcatcatcttgatcatcaccatctacactacattactccaagcttc

SEQ ID NO: 96447 - DNA, 387 bp, Glycine max
  Clone ID: PAT_MRT3847_58103C.1
tacggctgcggaagacgacagaaggggcctcgctgcgtttctattgtgcaaaatgcccttggctgacagtaattacacaccacatgcggaattagtccctcactagtgggttggaagacacacgtactctatgacttgggacaaaaaaaagacgacctaacatacttaactcccagcttcattaatttttccaatgtatttcttgcacgatttgtcaaaactcctataactaacccagaatatgtagaacagtatgtgcaatactctttgggaggaaaggaccaccgtaaccaatttccttggcaattcccaaccaaaagaaaaagggttcccaccccacccccataaaaaggcggtttttccaggagaatttaggagggaatttta

SEQ ID NO: 96448 - DNA, 520 bp, Glycine max
  Clone ID: PAT_MRT3847_58104C.1
gagagaaaatctataaatggtaccaaaaatgccaaacagtgaggtacagaactgcaaatggacaaagtgagcatagattgggcatgaaaatactgggacaagttgagtggcggtgacagtggccagaactggctgctcatgtgccacaccatatgcaaaggagtggtacaaggagagaaaaatgcaagacacgtgtgcaaaggagtggtacaaggagagaaaaatgtgacactgttttctgcgcgacccatcctccaacaacctccccatcatgctttttcttcttcggcgaacctgttttggtttcgtttgtttcggtacgcatttgtttggcactgtttggttgctttggctattgtatctacacacccagtatccaaacagctgtggacaccttttccggtgtgacccaccgtccggctactgtgccatcctcctcctcttccttcagcgaccctattttgctgttgtttggttctgttttgctgctgtttggctgacccccagtccagcgaccgca

SEQ ID NO: 96449 - DNA, 933 bp, Glycine max
  Clone ID: PAT_MRT3847_58105C.1
ggatcagaactaagaagaagacatggcatcgtccaaggtagcgacgacgacgacgacgacgacgaattcggatatttcgagccagcaggtatgggacggcgccaccatggagatggagtctcaagacaacatgaacatgagcatgagcctccaggatttgttgaccgaaaacgacgccgtgccaccctctcatagtcatggaaggggaaagagaaaaaccctagtggaggaacccctcgtcgtcgataaggtcactcttcagaaacagagaaggatgataaaaaacagagaatctgccgctaggtccagggaacgcaagcaggcttacacagttgagctagaatctttggttacacatctcgaggaagagaatgccatcttgttaaaacaagaggccgataggaaaaggcagaggttcaatcagctcatggagtgccttattccagttgaggaaaaacgtaaaccaaaaccaatgcttcggagagtgaattcatcccaatggtgatgtaatatgttgcttgtcctaatggactagttttcaagtcctggtgtatagataccaaacaaatgatgcatgatagtgttgaaaggataaatatgaaaaagagaggaaaagattttttttatatatacatatagctttgctgattattttccaggatcacttggagttacattgctgcagagagaaaatagatgcagccaaataattcaactaatttgattcaagctgaagcttattattggaagatccttgaattgatggatattgcggggatagatctttattgggggaagggagttgaaattagaatttatgtttaatgttagattgtctgctttttgatatttcagggagggaacactgataaaccttgaccatgtacaaacaagtatcgataagtggtatatacatgtgttatctatactgct

SEQ ID NO: 96450 - DNA, 502 bp, Glycine max
  Clone ID: PAT_MRT3847_58106C.1
aaaaaaaaggaggaaatttttttttttagctggccaggacaaacaaaaggcccgctcacagaaaggcaaaatttacatcctccgggaagccttggggacggaaacggaagtgtgggaaaacaccctaaaaccttaaacatctacctcaaggatatagacgggtcccacccccaccctaataggcgggcatcaatatatatggcccactaaaaagtttaggcccccccaatctcgtttatagaattatccggaaaaaacccccgggttttataggctaaaagggggcctcccctctttcgggattaaaaaacaaaagcctcccgcattgccctagctaggagcgacttttgcccttttccagggctttaggggccaccccaattgcttaaaaactttttattatcctcagccttttgcaaaactcagggaactttccccccgggacatcaccaactagcctccattctccctccttggcttcaagggaaaaaacattttctga

SEQ ID NO: 96451 - DNA, 527 bp, Glycine max
  Clone ID: PAT_MRT3847_58107C.1
gtaaggacttcatttctcacctgaattctttaaagacaggaatcaatattttctttattcgagatgtgggaatgccattattggtgggcctatgggatggggattttttgcttcttttcctaactaaaatccttttgcttttacaaaatgacaaaaaaaagttctctcgcacaatgtaccccaaaatttcgagtagttttacaaaaattatgtgcctttgccttgtttcctatcaataactatttttaaagtttgacccaccgtatttggatttgagtgccattgagttttagtgcaactgcagcccatatacttgaacttgagatactggttaagttagaagttgccacctatttaagggacacacagtgagagagggagcttgtggataattttggtattgttgcaattgttctacctggatttcatcttgtgactttctgaattttacattgattttcagaaatatgttatgtctactataactagatcctcttttattctggccacttccgttatgtggctga

SEQ ID NO: 96452 - DNA, 478 bp, Glycine max
  Clone ID: PAT_MRT3847_58108C.1
gaactagtagcagaagtgttagcagcagctgcagttataatgctcgctctctctgcctcctatgcagctttcacaaaattttcaaagataaaaaaagaaaacaataatctcggtcagatttcctcttccataagcaaatctagcttgaattacaagtacgaaactcttgagaaggccacagattatttcaactctctctagaaaagtaggccaaggtggagctggttcagttttcaaaggtattctcccaaatgggaaagttgtagctgttaagagattgatcttcaataacaggcaatgggtggatgagttcttcaatgaagtgaatttgatcagcggaattgaacacaagaatcttgtcaaactattgggttgtagcattgaaggccctgagagcctccttgtgtatgagtacttacccaaaaagagtttagaccaatttatctttgaaaaaaacagaactcagattctaaactgg

SEQ ID NO: 96453 - DNA, 312 bp, Glycine max
  Clone ID: PAT_MRT3847_58109C.1
ccccccccggaaagcggttttcttttttaatctaaacctttccaaggaaaacctcccttggtaattgaccccgttaaaattttgccaaagtaaaacccaaatagggcctcccaacaattttacctcccaacctgtaaaattaaaggcccccccccccttccttttttagcctccccgggatgaccaaaaaacccttctccatcctgttttctaataggggggtttatcatccccggcacataaataaaaaaaactactttaatggccctcaaaacctattttccgattttaacccccccccccaattttttc

SEQ ID NO: 96454 - DNA, 410 bp, Glycine max
  Clone ID: PAT_MRT3847_5810C.1
caaaaaacccctttacctttttggaaaattggccatcaaagggcccccccccaaagttctttaagggggaaaaaacggccccaggggctggataaaacctaacccccccagggggggggggggtaaaaaaaaaaaaaaggttttttaactgggttccccccccccaaaaattaacaaccttttcctttgaaaaaccaagtcccaggaaatataaataaaccggcccctaaagggctgatgcccccaaggaaccaaaatcttggtttatcctcgggccacaatcttgggaccaaacccccccccagctgggaggggaggaccccgtttccccccaacattgggaaccaattgttggaccccccccctagtgggggggtcttcacaaaggcaagggctaaaagaaccatttt

SEQ ID NO: 96455 - DNA, 182 bp, Glycine max
  Clone ID: PAT_MRT3847_58110C.1
ctgactcttgtgtgtacgcgcgggtcatttttgctgctggagcttcgaatgattgatgggcatgtaccgtgactaacgatatctgccaattgtgtttcgttacttcctcatgtaaagggtgttattgcttttaaagggtatacaagaacaatttggacacgttaatttctctcctggtgatc

SEQ ID NO: 96456 - DNA, 2224 bp, Glycine max
  Clone ID: PAT_MRT3847_58111C.1
cgatttgacgcttggtgagttgcttaagtataagtctgaggaaggggtgagagtgttgttgctggtttgggatgataaaacttcgcatgataaggttttcctcaagacggctggtgtgatggggactcatgatgaggaaaccaggaagttttttaagcattcttctgttatgtgtgttctgtcgcctcggtatgccagcaataaaatgagcttcttgaagcaacaggagcagggtcttgcagcgaccgcgtgttccctcgctcctcacgcgacaccccctgcttctcgccccatacgctctccacttgttggaacggtcttcacacaccaccaaaaatgtgtgattgtggacacacaggctgctggtaataaccggaagataactgcttttataggaggtcttgatctatgtgatggtcgctatgacacacccgagcatcgtctgtttcgtaatcttgacgatgtatttgatggcgatttccacaatcctacatttcctgctggaacaagagttcctagacaaccttggcatgatttgcactgtagaatagatggacctgctgcatatgatgttcttattaattttgagcagcgatggagaaaagcaactaagtggaaagagtttgcaatccttttcaaaaaaacctctcaatggcatgatgatgctttaataagaatagaacgcatctcatggatattaagtccttctggtgctgctaccttaaaggataaatcggattattatactgttccagaggatgaccctttagtatgggtttctagtgaagatgatcctgaaaactggcatgttcaggactcgatccctgaaaggatttcccaaacgtgttgatgttgctctgtcccaggttcattaactagtgttttacttgcttgttcatcctatttcttctgtacagaaaactcaaaatatgttgagtgaactctgtactagcttgcaaaccaaacctagatattgagtttagaatcttatacattgaattgattagaatcatatcctgcactttctagttaacataattttggatgcagaatcttatctgtgttaaaaatttggttatagacaaaagcattcaaacagcatacattcaagcgatcagatctgctcaacactttatttatattgaaaaccaatacttcattggatcatcgtatgcatggccagcttataaagatgcaggggctgataatctcatcccaatggaattggcactgaaaattgctagtaaaattagagctaaggagagatttgctgtctacattgttttaccaatgtggccagaaggtgatcctaaaactggggctatgcaagaaatcctcttttggcagggccaaacgatgcaaatgatgtatgatgcagttgctagagaattgaaatcaatgcagcttactgatgtgcacccacaagattacctcaatttttattgccttggtaatcgggaacactttaatgaagatagttcaagcacaaatggtgcacaggtctcaacagcatataaatatcgccgttttatgatttatgtgcatgctaaagggatgatcgtcgatgatgagtatgttataattggatctgctaatataaaccaaagatctatggctggtactaaagatactgagatagctatgggtgcatatcaaccccattacacgtggtcagcaaagaaaagacatccacatggccagatttatggttacagaatgtcactttggggagagcatcttggcatgttagatgaaacttttgaagaaccagagagattggagtgtgtgcataaagtgaataaaattgcagacaacaattggaaattattcgcttctgaagatttctcacttttgcagggacatcttcttaagtatcctgtacaggtagattccgatgggaagattagatccctacctgactgtgagaatttcccggatgccgggggtaagatattgggagctcactcgacgacaattccagatatcctaacaacttaaactcctgaattcatgttgttgaagatttgtaaagattgtgatttgttgcctgccccttcctgagaaagaggacaaaaaagaagttggggtaaagttatgtagctttctgtacttaaaaatgattgttcagatcacttgtaaatctttcacacagaattgattcatattttgaaaggatcaccagtttatagaaaaaaaaaaaaaccctgtcctcctttatttggtc

SEQ ID NO: 96457 - DNA, 1096 bp, Glycine max
  Clone ID: PAT_MRT3847_58112C.1
gttgggagttagggtagaatcaattgagaatggggatccgattcgtactgatggtgaacaagcaattgaaaacatataataagaaaaattacgaataacaagctctcgtggctcgagatccacgactatgggtgtcaataaacaaaccaggtgaatttccaaattgccaaattcaatcagtacccaaaatcccttgatttccttccttcaccgcacccacttatatctcttaaattagttttccaatgcagaaagcagggtacggtggcgatggaatatacaggtctctaaggccttgtttggttctcccaaatgaccccaacctctccctcgtctcattcctcttccaaagcgtttcctctttcccatccaaaatcgccctcgtcgattcccactcttcccaaacacttaccttggcgcacctcaaatcacaggtcgccaaacttgcccacggtttcctcaaactaggcataaacaaaaacgacgtcgtcctactgctcgctcccaacagcatccactaccctatatgcttcctcgctgccaccgccatcggcgccgtcgtctccaccgccaatcccatttacacagtcaacgaaatctcgaagcaagtcgacgactccaaccccaaactcctcatcaccgtcccagaattatgggacaaagtcaagaacctcaacctccccgccgtaattatcgatacggaaacagctcaaggactcgtgagtttcgaagctggcaacgaggtgtcgagaataacgagtcttgacgcggtgatggacatggctggaccggctactgagctgccggagagcggcgtgaagcagggggacacggcggcgcttctgtactcctcgggaacgacggggttgagcaagggcgtggttctgacgcaccggaacttcatagcggcgtcggtgatgatcggaatggacgacgacctcgccggggagcaagacgacgtgtacctgtgcgttctgccgatgtttcacgtgttcgggctggcggtggtgacgtacgcggcgctgcggctagggagcgcggtggtggtgatggataggttcgagctggtagcgctgcttgaaggctattgagaagc

SEQ ID NO: 96458 - DNA, 2005 bp, Glycine max
  Clone ID: PAT_MRT3847_58113C.1
cttaagtataagtctgaagaaggggtgagagtgttgttgctggtttgggatgataaaacttcgcacgataaggttttcctcaagacggctggtgtgatggggactcatgatgaggaaaccaggaagttttttaagcattcttctgttatgtgtgttctgtcgcctcggtatgccagcagcaagatgagcttcttgaagcaacaggagataggattctttgtgagctagttttcagtggagtcaaatgtgaaatgccctgtattttgtggcctaagctctaaacagtgggttgttggaacagtcttcacacaccaccaaaaatgtgtgattgtggacacacaggctgccggcaataaccggaagataactgcttttataggaggtcttgatctttgtgatggtcgctatgacacacccgagcatcgtctgtttcgtaatcttgacgatgtatttgatggcgatttccacaatcctacatttcctgctggaacaagagttcccagacaaccttggcatgatttgcactgtagaatagatggacctgctgcatatgatgttcttattaattttgagcagcgatggagaaaagcaactaagtggaaagagtttgcaatccttttcaaaaaaacctctcaatggcatgatgatgctttaataagaatagaacgcatctcatggatattaagtccttctggtgctgctaccttaaaggataaatcggatgattatactgttccagaggatgaccctttagtatgggtttctagtgaagatgatcctgaaaactggcatgttcagatcttccgatccattgactcaggatccctgaaaggatttcccaaacgtgttgatgttgctctgtcccagaatcttatctgtgctaaaaatttggttatagacaaaagcattcaaacagcatacattcaagcgatcagatctgctcaacattttatttatattgaaaaccaatacttcattggatcatcgtatgcatggccagcttataaagatgcaggggctgataatctcatcccaatggaattggcactgaaaattgctagtaaaatcagagctaaggagagatttgctgtctatattattttaccaatgtggccagaaggtgatcctaaaactggggccatgcaagaaatcctcttttggcagggccagacgatgcaaatgatgtatgatgttgttgctagagaattgaaatcaatgcaacttactgatgtgcacccgcaagagtacctcaatttctattgccttggtaatcgagaacactttaatgaagatagttcaagcacaaatggtgcacaggtctcaacggcatataaatatcgccgttttatgatttatgtgcatgctaaagggatgatcgttgatgatgagtatgttataattggatctgctaatataaaccaaagatctatggctggtactaaagatactgagatagctatgggtgcatatcaaccccattacacgtggtcagcaaagaaaagacatccacatggccagatttatggttacagaatgtcactttggggagagcatcttggcatgttagatgaaacttttgaagaaccagggagattggagtgtgtggaaaaagtgaatgagattgccgaaaacaattggaaattattcgcttctgaagatttttcacttttgcagggacatcttctcaagtatcctgtacaggtagattccgatgggaagattagatccctaccagactgtgaaaatttcccggatgctgggggtaagatattgggagctcactcgacaacaattcccgatatcctaacaacttaaactcctgaattcatgttgttgaagatttataaagattgtgtgatgtgttgcctgccccttcctgagaaagaggacaaaaagaagttggggtgaagttatgtagctttctgtacttaaaaatgattgttcggatcacttgtaaatctttcacacggtattgattcatattttgaaaggatcaccagtttat

SEQ ID NO: 96459 - DNA, 413 bp, Glycine max
  Clone ID: PAT_MRT3847_58114C.1
ggctcgagataataacggacacaatagggctacattacttttgatagcctcttgcgagcatgcggactcctcggaactgagctccgactgacagacatttgtctggctcatcactcactgatgcctttgccagcagtatgtgtagctcgaataccaccaagatttgcatacattgcgttagatgatcgcgggatactacttgatgcaatagacgccttggtaggaaaagatggttgccttgtagagcactatcataacttctagggaggcggacgataacggcgtgacctcaggggcaaaggcgctacctgctagaaatgtggttaacctagacactgcgatagggtacgaccactgagcataggatcacagggcctgggagcttaatggaggcgcggcccaacaacttattg

SEQ ID NO: 96460 - DNA, 540 bp, Glycine max
  Clone ID: PAT_MRT3847_58115C.1
taaagtaagcctttgcagtctcaatttctttctttatgctcccttttattgtttaatatttctgcctactcttattaaaaaaaaaacaacagccttgaaagttgtatgttaattctgttatgaaaattcagctttgagcctgtgacactgcttaaaaattcttctcatgaaagacaatcgtatgtttactgaattatatattcagcttagattagcttgtgcttgtttcatgtgcatgccattattgttattaaataggtatttggttttcgaaccctaagttgatagaggtgccaatggctagaaatactagggccattgattcacttcgaggtgttatctcaattttttttcctttctataatccaatatttagcctagtctttcactggttaaattgtaaataaattttaaccacgagagtgtattcagctaagaaaactatgatattagtatacccttatgtttgcttcctttttctcattctacaggatgtactgtttaccaaatacgtaaatcttcagttttgtttggaattat

SEQ ID NO: 96461 - DNA, 398 bp, Glycine max
  unsure (1)..(398): unsure at all n locations
  Clone ID: PAT_MRT3847_58116C.1
tcctctagatctggccgctgggggaaaagcctttttttttttttttttggacacaaggaaggaaagacgcaagaaccaagagcaggaacggggcgtgaacgagaacaggatcttgagcgcaaccaacagcacagggacaggagcacaaaccaagacaaacttgcggaataccttccaaagggaaggggagtggggaccgganagaacctgtatcaagagaaaaagccccgataccggggggggggagccggcacaggattggaccgttggagacaggctgcagaggtacggatgacgccacttccggtaaaggaagagacggcagggtagaccccacaaggattacaccgataaggccgagagtggcccaacaaggaacccagagaggaaccctcacc

SEQ ID NO: 96462 - DNA, 1002 bp, Glycine max
  Clone ID: PAT_MRT3847_58117C.1
cggtccggaattccccggtcgacccacgcccgtccggcgaataaaaccaaagtttcgtttggtcgaaaacgcacgcggtttgacccactttcaccttcaccaagaagtggtttcatcacttggtggttacacaccacaccactgtgaagcgtgaatatgaacgttccttttagcctctctttcatttacccttttccatataccgcataaaaaacgttccttttagccttctttgttcctagtttttatttttaagggagtggtgctgaaactaccaagagggtagccagaaattaaaatggcacatttgcaagaaatagatcgagtcaagaatgaagttatacgtttagagcgcgaatctgtcattcccattctgaagcctaggctcataatgacactggccaatcttattgaacatagttctgaccgggctgagttcttgaagctctccaagagaatagagtacacaattcgagcttggtaccttctacagtttgaagacttgatgcaactttactccctctttgatcctgtacacggggcacaaaagttggaacagcagaagttatcttccgaagaaattgatgtgcttgaacagaatttcttgacatacctatttcaggtcatggaaaagagcaacttcaagatagtgacggatgatgagattgatgttgcacattcaggccagtatcttctaaatcttcccataacggttgatgaatctaagcttgacaagatacttctgaagaaatattttgaagagcatcatcatgatgaccttcctgatttttctgataagtatgttatctttcggcgtggcattggaattgatcgaacagctgactactttgtgatggagaaagtggacatgcttattggacgcttttgggcatatctattgagagtaactaggttgggaaagcttctatccaggaaggtaaaaaggcgcaataagaaagatccaaagaaagacaatgaaattaactctgaagcagatgggca

SEQ ID NO: 96463 - DNA, 539 bp, Glycine max
  Clone ID: PAT_MRT3847_58118C.1
tcaaggggctatacagtttgccaggtctgaagggttgataccagctcctgaaccaactcatgccatagctgcaaccattatttaagctattcgttgtagagaggctggagaggccaaggttattctgacagcaatgtgtggacatggccattttgatctgccagcttatgaaaagtacttgcaaggtaacatggttgacctctcattctcagaagacaagatgaaagcttcactggccaatattcctcaagtgattacctgagttgaggctcattctattgtagtacagtgaggaacaaggaagacataatagtactttacttgggaccaaaatgtatggttctctgaacacatatatgtatctgagtttgttttaggcaacatttgatccatgccaaggaaggtgcaactagtagtttttatgaattttttttctttcaagattgatgtgaaaatatagagtcttgcattttcaacgaaaaaaaaaaaaaaacaaaaaaaaaaaaaacagaaaaactaactacgcacacaaaaaacat

SEQ ID NO: 96464 - DNA, 878 bp, Glycine max
  Clone ID: PAT_MRT3847_58119C.1
aacccgcccaagaaatagaagtgagtggtttgtcttgtttgagattggagagaaaattgaattgcgtgagtgaaagttacatcaaccccttacgcgcaaaccaattccaattccctttgcaagcaagcaatctcagatagctgattcacacaatccctttctctgctgctaattggaatcggcatggtccaaccggcgccggcgatgactcagttcctcaactccgtcctctcccagcgcggcccctccgccgtcccctactccgaggacaccaagtggctgatccgccagcacctcgtggccctcaccaccgccttcccttccctcgagcccaaaacggcgtcgttcactcacaacgacggccgttccgtcaacctcctccaggccgacggcaccatccccatgacgttccaaggcgtcacctacaacatccccgtcgtcatctggctcatggaatcctaccctcgccacccgccctgcgtctacgtcaatcccacgcgcgacatgatcatcaagcgccctcatcctcacgttaacccttctggcttggtttccgtgccttatttgcagaattggacttaccctggcgatgactcagttcctcaactccgtcctttcccagcgcggcccctccgcggtcccttactcagaggacaccgagtggttcatccgctagcacctcgtcgctctcaccactgccttcccttccctcgtgccccaacgccgtcgttcacccacaacgacggccgttccgtcaacctcctccaggccgacggcaccatcccgatgacgttccaaggcgtcacctacaacgtccccgtcgtcatctcgtccccatccccttgccctgctccttcttctagggttcagtccactga

SEQ ID NO: 96465 - DNA, 1828 bp, Glycine max
  Clone ID: PAT_MRT3847_5811C.1
ggtgataggtcccaatgccaattcttctccgctaactcttcttgggaactatgctggccctccttgtaaatatactacaagacttcaagcctttcgtcactatgttaagaacgcgttttatcatcccggctgtgatggtggacccaagtgttcttccgctcaaatagaccaggcagtggaagttgcaaagaaagtggattatgtggtgctggttatgggattggatcaaagtgaagagagggaagaacgcgatcgcgttcatcttgacttgccgggcaagcaacttgaactcattaacggcgttgctgaagcttctaagaaaccagttattttggtcctccttagtggagggcctttagatatcacttcagccaagtataaccacaaaattggaggaattctctgggctggttatccaggggaacttggaggcattgcacttgctcagattatctttggtgaccacaatccaggagggagactaccaactacttggtacccaaaagattacatcaaagtaccaatgacagacatgaggatgcgagctgatccttcaaccggctatcccgggagaacttaccggttttacaagggtccaaaggtgtatgagtttggctatggactaagctactcaaagtattcctatgagtttgtttctgtcacacatgacaagcttcacttcaaccaatcatccactcatttgatggttgaaaattccgaaaccataagttacaaactagtttcggagttggatgaacaaacctgccaaagcatgtcactctcagtcacagtgagagttcaaaatcatggaagcatggtggggaagcatcctgtattgctgtttattaggcctaaaagacagaaaagtggaagtcctgtgaaacagttggtgggtttcgagagtgttatgcttgatgcaggggaaatggctcatgttgaatttgaggtaagcccttgtgagcatcttagtagagcaaatgaggctggtgcaatgataatagaagaagggtctcatatgttgcttgtggatgatctagagcatccaatagatatatatgtttgatgctacagatttattcttcaacgatgtcaagataattttagcgaacatgtctctgaaacacgctgcattttgggattatgagaccaagaaatgtactataatttgatttgaatcttggctccatggtatttgcatctgaaattcagatgaacgaagaactatttgagtgttgcatgtaaaagttggtcctcgtcgattattgatcgggataaacctggtcactaaatagaattgttgtatgcatcatcttatagtgtgtttttttttttctttctaggaagaatgccaaagaaatgggcaaggttttcagttccacggatcgtcaaagacgatccatggacgactgcattgttgctcttcaaaagtacaagactcctaattccaactgttaagcacggctattcatgccagcaaggattccactccagtttcttctctgtttttgttttgcaattaagtttttcttttatttctgcaaatgcttgaacttttatccttaaatatttccaatcttcaatcatcatcatgtgtacgtttagttttgtaataaagaaggtaattacctataaccttgcttattacaaaactaaacgtacacaactccatgattgaagattggagcacggctaggaatgcaattaaggattttgctccagtaaaatctctgttttttttttgcaattaagttgagaagaaactgctgtggaatcttgaacttttatcattaaatatctccaatcttgaatctaggagttgtgtacgttt

SEQ ID NO: 96466 - DNA, 389 bp, Glycine max
  Clone ID: PAT_MRT3847_58120C.1
gagttcaaaacacaatgggcccaagtgtacttagggtatggctttggtccataaattagaaagaacgttactaccgtcctattcatggtatagtaaccgtattttgctctcgccctaaggatggccatactagttattatcctgagctacgtaagaaaattagggtatgtgtttgccccagcacactaattgtggaacgtgctttgcccgtgcccggctaccttctgttcattgacactattatctttggctacctgttgacagccgctaagggctgaggcgaatcaagggcctcaatttgctcctcacgatcaaaagaacatactgtgtggggccgtgaaaatgaacacctcgatgttcacagtagatagtgctcatccacctccttt

SEQ ID NO: 96467 - DNA, 153 bp, Glycine max
  unsure (1)..(153): unsure at all n locations
  Clone ID: PAT_MRT3847_58121C.1
gtcgcntgcacgcgtacgtnagcncggaattcggcncgagcnagtncnagancgcgagcggccgccgacnagtgaagcncgtacgancccgggaaatnaaattaccggaaccggtaacctgncaggcgtaaccagcntnncccnngggggagt

SEQ ID NO: 96468 - DNA, 1582 bp, Glycine max
  Clone ID: PAT_MRT3847_58122C.1
gtatgactcatgagcttgattcccctataatttgcacaattttgtatatcccccttgttcttatagattggcactaacgtgcttctcctccattcctccggcatgcgttttgacctcataatttcattaaagagtttggtgagccactccagacctctatctccaagagttttccacacttcaataggtatgttgtctggctccaccgccttaccgttactcattcttttcaacgtttcctttacttcctgtttctgaatccgacgataatacttatagttccggtcctcttctcttcatggtcaaattttccatcagaaacatggccctcatgatacttattatgtgcaataacattagctgtattgagacagatacattacctggagaatggctcagttgagatttacagtagacatgcagaacggaatactgggaagtttcctgatgttgttgctgctgtttcaaggttaaagaaaccaactgtatcatcattaattcttgattgtgaaattgttgcatatgatcgtcaaacacagacgatccattctttccaggcgcttagtactcgggctcgcaagaatgtagaaatggaagatataaaggttgatgtttgcatatttgcttttgatttgttgtatcttaatggccaagcacttcttcaggaaaacctgagagtccgtagagagcatctctatgcctcttttgaggaagagcctggatttcttcagtttgcaacaacgataacatcaaatgatgttgaggaaatacagaattttcttgaccaagctgttggtgctagttgtgaggggttaattattaaaacattaaatgaggatgctacatatgaaccttcgaagcgatcactcaactggctaaaactgaagaaagattatatggacaatataggggactcactagatttggtacctattgctgctttccacggtcgtgggaaacgtacaggagtttatggtgccttcctccttgcttgctatgacaatgacaacgaagaatttcaaagtatttgcaagataggaacgggattctctgaagcagtgcttgaagaacgttcttctagtcttcgttctaaagtgattcccaagccaaaggcatactatagatttggagaatcaatcaatcctgatgtctggtttgaagccagtgagggcatatctcttcgatttccacgactacttcgagtcaggcctgacaaatctcccgaacaggcctcatcatctgagcaggttgctgaaatgtataacgctcaaaaacaaaatcacacgatcaaccaaaatgacgatgaagatgatgattgattgagtgaaaaaattctgtttctcacgctgagctataagatctcagtattttttgctctgatgatccattagagtgtaaatctgaattctttaccttcaagcataggtcagagagcataactgccttttcaacatgattgaaaattcggtgtaaaacgtgaaagaacctcatggagggtccgaaaagtagacatttgcgcttaaaccatgtttagtttgacaatttttcagtagaggcccccctgttcccttaattcttgtgt

SEQ ID NO: 96469 - DNA, 1826 bp, Glycine max
  Clone ID: PAT_MRT3847_58123C.1
aaataaacgttggtggcgactccacgcatttttctcatgagaagatgcatctttgagtcttgcgtcgccctcccgtcgaagggtaggttgcgatagttggcgactccactggggaacgacgtgttagagagttaggctattcagtcagtgtgcaatgcttttatcatgacttcttctttatttattttcctttttcccttttatcttttgttttgtccatatttgtatataatcttttccatgttgttgtgtttggtgtgtgtttgtttatcgattacgttcatagttagaaatattttttcaacacacacatggcacctacaccttgcacacacattgagatattaggccctgtacccgggtctatgtgagccataaggagtggaggtcgatttgtggtcatgttgggtgttcaactcgcttgatgacagtgaaatctcatctaaatacagaattttcttgaccaagctgttggtgctagttgtgagggattaattattaaaacattaaatgaggatgctacatatgaaccttccaagcgatcactcaactggctaaaactgaagaaagattatatggacagtataggggactcactagatttggtacctattgctgctttccacggtcgtgggaaacgtacaggagtttatggtgccttcctccttgcttgctatgacaatgataatgaagaatttcaaagtatttgcaagataggaacgggattctctgaagctgtgcttgaagaacgttcttctagtcttcgttctaaagtgattcccaaaccaaaggcatactatagatttggagaaacaataaatcctgatgtctggtttgaagccagtgaggtgtgggaggtgaaagctgccgacctgaccattagccctgttcaccgtgctgcagtgggcatagtagatccgaacaagggcatatctctacgatttccacgactacttcgagtcaggcctgacaaagctcctgaacaggcctcatcatctgagcaggttgctgaaatgtataaggctcaaaaacacaatcacacgaacaaccaaaatgacgatgaagatgatgattgagtgaaaaaattctgtttctcatgctgagctataaaatctcagtaatttttgctgatgcaaatgcgaattctttaccttcaagcataggtcagagagcataactgctttttctacatgattgaaggttcggtgtacaacgtggaagaagctcatggagggtccaaaaagtagacatttgcgcttaaaccatgttaattagacaatttttcagaagtagacgtttgttctttgtaacatgatgcagtagttaaggcctgatagcatcgacgaaaacagttttaaatatttttcgcgttaatggatctcaatattagtccatgtgtcaaatgatggttgtgttgtgagagagcttttatctttcggtatccaatagtaaaattgttgtgttgaagttgctatcccaaaaatgtataaaataagaggatgatatctctagaagccagtaaagttacatgaaaccacccttgggaattattgcttgaagtggacttttggatcctttccattaggttcctgaattggggggcacatagcaaactcactctcgcatgttccttgattgcatcatacatctcttcatggcatcgtaatgggcatatcattcttgcatttatcacattcatgcattgcatttgcatgagtcattgcattatcatgcatcttcatttaacatgcttttgttatgcaaaatgcatacattttattttcattgttcgcatgttatgcatgatccttgaattttcctctccc

SEQ ID NO: 96470 - DNA, 648 bp, Glycine max
  Clone ID: PAT_MRT3847_58124C.1
cttccggttttggaatgacctttatggatttcagttagacaccaatcgctggtatcctctggagttaagaaaggagaagtcgactaaagataagctaaaaaaaattgaacaaaattgtcctgatgatgtcaacaagataaatccagcatgtacaacaagagaagaaactgaggagtcagaggatgaagaaaacaacatcgacgatatatccaagaatatagcatcaaacatgtctatcgatgatggtgaaacacttaccaaatccgaaggaaaggccgaggaatccagtgctaaattggacattcaaagttctttgcctgaggtagtgaagccctgtggacgtattaatgcttgcatggccgttggaagagatacattatatatatatggtggcatgatggagattaaagatcaagaaatcactcttgatgatttgtattctttgaaccttagcaaacttgatgaatggaagtgcattataccggcgtcagaatctgaatgggtggaagcttcagatgatgatgaagaagatgatgatgatgaagatgaatctgacaatgatggttcaactgatgaggatgaagatgatgaggcaacaggaggaggcaacaggctcagaatgcctcacttcaagtggtagatgccgtt

SEQ ID NO: 96471 - DNA, 478 bp, Glycine max
  Clone ID: PAT_MRT3847_58125C.1
ttccaataaggtttcccgtcatcactgtatgacgatcctccgtctttgggcgtgggtggggggggggggggggggggggggggggggggggggggggggggggcgggaataaagcggagggggggggtagggatgagcagcagcgaaaatagcaacacctcttaataaggccccaaaaaggatatagtgttaggtatagaagaataaccggggtatatatagggagggctttaaaggaccttagggaagaccctttagtaaacccccctaaagatttaaatagtaaaaaaacaaaaaaaagcgttgggccagggaaatatttgggcaagattccccccaaattcgcaaaaagccccatatttatagggggaaaaaccctgggcatccccccccaacatatttccatacagaggaagggggtttccccccccccccttaaaaaatggagaagcccccttggggggggtcccaccccaaa

SEQ ID NO: 96472 - DNA, 549 bp, Glycine max
  Clone ID: PAT_MRT3847_58126C.1
aaaaaaaaaaaaaaaaaaaaaaaaaaaaaaaaaaaaaaaaaaaaaaaaaaaaaaaaaaaaaaaaaaaaaaaaaaaaaaaaaaaaaaaaaaaaaaaaaaaggggggaacagttataggggatccaagattttattccccggggctggcaaggttttatttttttgtttgggggttcctaatttaatttcctgggctcgcggttgtcccccgtcttttattgggaactccttggggttcccccttttaaccgctttgcttttcttccccttttccccagttggcgtatttgcgaaggggcccgccccctgtggcctttccaaaccgttgccctgcccggttggattaggggccgcgccttgtacggttctttaagggcggcggttgggtgggttccccccatggcgcccgttcccttggccggccccctagggcgggctccttgggcttccttccttccctttttagccaggttggggggttttccctttcgggctttaattcggggtctcctgttggggttccctttaagggcttttgggcccctggccc

SEQ ID NO: 96473 - DNA, 759 bp, Glycine max
  Clone ID: PAT_MRT3847_58127C.1
ggctcgaggttaccattccactgggcgcacgctcttcccaaaaccctagattccctccaaacagaaagctacgatgccaaccctcaccaatttctactccatcaaagatttatcccagcacactaccaaagacgattgctggatcctcgttgatggaaaggtatacgacgtgacacagtatttggatgatcatcccggtggagatgatgtaatcctcgccgcaaccgggaaagacgcaacagaagaatttgaagatgctggccacagcaaaagtgctagagaacatatggagcagtattgtattggtgagcttgacacatcttctccaatttccaccaaagaaaagttcatacaactcactaagcaatattgggttgttccggcaaccgtcgtcggtatctcggtggtagtagctttcttatacttacgtaagaagtagcactacacaagtctgcaattcaatttttttgtcattgttacaacaaactttgtattgctatgaaggataatttggcttatttcaaaacagtaatgattgattatatgcatgatattacattggaggtttgataattaaaaaaaggtctttaggatcacatttgtgtactgtgttttcccctattgtttggccaagatcttgaccaagaataattaacaactgacaactggcttgcattatcaaaaaaaaaaaaataaaagggccctaggggtttccagagatcgcacttccacgatccatcaacccttatcttaatttta

SEQ ID NO: 96474 - DNA, 490 bp, Glycine max
  Clone ID: PAT_MRT3847_58128C.1
gagggtcgcggcagcctcactgtctacgcctcgtactacgatctgtagcaggggtggcgacctgtgcctctgataatcgttatgctgcgttcagaggaactctctgatatcagaggatgctcactggatctctcaactaagctgctcgttgctctctgtctctgtgcatgacaagatctatgtcacgcatcggtcgggtggtggcacataaaagacatatcggattaatggctagatgcatggttgcttaagatgagactattcagaactcaccgcatatggcacgagtgaataaaaacaccgagaatgtgttcgggaaaaggactgagtttaacgttcaggcgatgggatcccaaaaagacagtgggagacacttttaatggacagacttcaaaaacccagatccttgccttgaaaaaagttcacggccagagggtgatgcctgctcttagcatagctcaactgggatgctctgaccttgcttcaggat

SEQ ID NO: 96475 - DNA, 401 bp, Glycine max
  Clone ID: PAT_MRT3847_58129C.1
gggcaagctactttaatttacacctttaatgagggctgtaatttcttgaattgcctcaccttgctctcgtacaaaaaggagttacactttcagtcctcgtggtaaggagggacccccagtttttcatctgtccacttagaaggatctggatataaaaagtgacccaccacagcttccgagtcatgccaaaatctccaaagaatccaaacccacctgagtgagcttaaaacctcaccatggatcacctgggactgggtaagctggggaaactccttgtaccggggctgaatgggtccaccattgccaacatgacggacttcaccgtttccagctgcccgcgcccggaagccccaaagcaggcggccttcaacgcgaccgaaaggggccaggggggccaccgc

SEQ ID NO: 96476 - DNA, 1650 bp, Glycine max
  Clone ID: PAT_MRT3847_5812C.1
gggggcattgattttgtttctgtgctctctctcgaggcgtatgagatggtgggctagataggaaatgccggtaaagagagaagagaggagaaagcaatgggcattgatagtgaatacgtgatatctcacaaggcctatgcgagggtgggattgcttgggaacccgagcgatgtctactacggcaaaacgatagcgttaagcgtcgccaacttcttcgccaccgtcacgctgcgtccctccgaccagttaatcctccaaccccaccccctccacgatctccttcatttctcatcgctccctcaattggtcaacaggttgagctcccaaggttactatggaggcgtgcgattgcttatggctatttgcaatgtcttctacgcgtattgcagagagaacgccatcgatcttggcgacgacaatttcactctctcctacgacaccaatatccctcgccaggctggtctttcgggttctagcgggatcgtgtgtgctgcgttgaactgtttgttggatttctacaacgtcaggcatctggtcaaggtggaggtcaggcctaacctcatcctcgctgccgagaaagaactcgggattgtggccggtcttcaggatcgggtcgcacaagtttacggtggccttgtttacatggactttagcaaggaaaacatgaatgagctgggccatggagtttatgtaccagtggatttgagtctcctccctcctctgtatctcatctatgcggaaaatcctagtgattctggcaaggttcatagtaaagtacggcagaggtggcttgatggtgatgagttcattgtgtcttccatgcttgaaattgctaatatcgcccaagaaggaaagactgcattagaagaaaaggactactccaaatttgcagctctcatgaatcgaaattttgacctgcgaaggttaatgtttggagatgatgccctcggtgatttgaacctaaaaatggtagaggttgccagaaaggttggagctgcgtcaaaatttaccggtagcggaggagctgttgttgcattttgtcctgaggggacttctcaagtgaagcttctcgaggacgaatgtcaaaaagaaggatttgtgatactacctattgaacctcttccttctcgtctaaatgaaattgacttgaaaaccttgcaaataaagtaatctatattgagggtttgaaaaatagttctcaacaaaataaaaatttccatttactcaagaacgcgggtttaaagctggtgggagttggcatactcaaagcgcaatgtaagtttgttccgtttcgttgagagaggatcaaactttgaagttgcttttgatgagggtggatctgagagtttggtttgtggtatattgcttttggggtgtttctaataccgtatatgagacgtacatgttaccttcgtatcacttgtctggtcaatttcgtaaatcttgtgcgcaagttggttacgcggaataagaattgtttttacctatcaaaaggaaaattcaatcaaaaatttgttttttgcgaaaaacaaaaaaatggattgaatttgttaaataaaaacatacttttaatgtacggagatgtatgttccacccccgtttttttagttgaaccacctttaaatgcaatgaaaaggtctgtttgttttt

SEQ ID NO: 96477 - DNA, 244 bp, Glycine max
  Clone ID: PAT_MRT3847_58130C.1
ctgatctagcataacgcgcattatagaaccccgccagctacagagcaattgttataccaactaatgcgaacccgtgtactgatgcatgaaatttggactttttgaagcgtaccggatttcactgtgagatcatttgtgtcactgcatggactgccaccccaatggatgaggttcaggttacaaacctttcgttaatttcctctcaggaacttcttcccatgacttgccgagtgttcaatcccca

SEQ ID NO: 96478 - DNA, 446 bp, Glycine max
  Clone ID: PAT_MRT3847_58131C.1
gaaacaattaacatatgagatgggctattcattgagtgggggttttaagcttacatgcgtggggagaataataatgatacaatgtgagctagggaggagggggatacaagatatgattatgagtatgattattctagggaggggtaacaaaaaaaatactcaactcaggggcgcttgagcagtaaaatcaggattaatcatataaaaggggtcggaatccttggagccaacaaccctttaaaacctgggcctcatgggggggatttccccatcgcaatccttataatccggtgaggggggggagcacccccggtcccatggaaacccctttcaaatgcgggatgacgtgaaactcatcggccctcatttgcttcctccttatgggggaaccaactttcctcccattggaatacacagcccacacgtactcctccaaaagctttttc

SEQ ID NO: 96479 - DNA, 356 bp, Glycine max
  Clone ID: PAT_MRT3847_58132C.1
gggttaaatgttctcattcaatcaagggaaaaattaacactcacgatcattatggtggagacagacacactatggatgatattacgatcatcagaaaacgcagacataatggcaatgattctctgagagtatacaatgtacgttataagtgataacctttccggaccaaatatcccacgctttagggaaacacttgtttgggccgatagaccggggtaagaaaaaacttgtgtctttcaggacatataggaacatgggaccgcctttactatctgcttgatggcgaaggggactatcatcatccacgctgaaaacgggtgcctgagggttggccactccgtcttaacctctactga

SEQ ID NO: 96480 - DNA, 343 bp, Glycine max
  Clone ID: PAT_MRT3847_58133C.1
ggtgaaatcaacccatactacatcggaatggactgagtgggacactagattactgagtaaggtcaacgatattctgtgttgcgagtatgctagatttgatggcttgattaccaatcaagttatgagcaagatggaagacatgatatacagtctttcgaggtggtgatgaaaaatagatgcatgaaaagacacacctgctggtggcttgttgttcaagaatggcaatttgtaagagagatgtttggaaagataaatgtgaaatcccttctggatttccactcacaggtatatgcaatagcatttttaatgagaagctcattaaatatagctatgaaaaattact

SEQ ID NO: 96481 - DNA, 311 bp, Glycine max
  Clone ID: PAT_MRT3847_58134C.1
atcaagtacctacgcacagatagatcttgttttttttctgcctccatcattttctcgagagctttcagtttgtgtggctcatctttcttcgtctccttcactcgcccctcagtaacagcccgcctctctgaatcgctttccgtgattcatctgtcgttcaagctaagattttcgggcatgtctaggacgtcaccaagaagcaaacttacaaagatgtttcgaaagctacgtgttttcaggaacgagatgcaagttttattgtcgactttcgctagtccaattaagtttcagaactacatgtttcattgaaa

SEQ ID NO: 96482 - DNA, 196 bp, Glycine max
  unsure (1)..(196): unsure at all n locations
  Clone ID: PAT_MRT3847_58135C.1
ctcntttgttttttttttatattcaaccatgagggtttttatcatgccaatatgaattagcccaagtggcaactgaccaacttggggttaatttgccttggattggacataatctcctcctactaaaattttggaaaagggaaaataatggtggttataattttcataaaaccttgggtaaaattaatcatacaaa

SEQ ID NO: 96483 - DNA, 213 bp, Glycine max
  Clone ID: PAT_MRT3847_58136C.1
aacttgtgattgctcataaggggaatgaaggttacatactaggatttttggctcatataaaccctcatgacgccaaaaatatcatttataggaataaaaatatttttaagtgggaacatggcgagtacattggttctgagaagtttgaaaattttttctcaccctgcgtatttgaggtggactactaattatattgctagggccgattggctt

SEQ ID NO: 96484 - DNA, 280 bp, Glycine max
  Clone ID: PAT_MRT3847_58137C.1
ggcaccaggtcagtgtcattactccttatggtatagctacacatatcaacatccttttggtgtatttaccttttagtccttgtgatgttggagaaattaacctacatagtgtagctgggtcgttaactccgttaatcagttatctatatatattatgttccttcaattcaaaaaaaaaaaaaaaaaaaaaaaaaaaaaaaaaaaaaaaaaaaaaaaaaaaaaaaaaaaaaaaaaaaaaaaaaaaaaaaaaaaaaaaaaaaaaaaaaaaaaaaaaaaaaaa

SEQ ID NO: 96485 - DNA, 263 bp, Glycine max
  Clone ID: PAT_MRT3847_58138C.1
tctggctttttgttccgagggggttaggatgcaagccaactgtgtattatgtttttgctttttgctcattttggaatatccgccataaccacttagtgtccagggttgatactacagtcaaaattgccttggccaacatagttgctgtacaattgcgaatgtgcagcataggttgctgtggctggccaagcttcccagtgaaagcacttctatttattggaaagctgataaagaaacatgttagatgtttcgacataaatttt

SEQ ID NO: 96486 - DNA, 506 bp, Glycine max
  Clone ID: PAT_MRT3847_58139C.1
cggctcgagaaaaaaacgaaatggaagcgcatccaaacgcggccatgctgagaacccgaactataataccttctcctccaccatcactcgccctgagtaagaggctgccgtcaccgtcaccgtcaccatcaccgttaccgttactgtcaccgtccgttatcctctccgaacccgtgaaaccctcgttccaccggtttcctctgttctcgaatcctcacactcttcgaaccatgacgctctccaagtgtttctctcactccgggcccaaacccgaatccgaacccgaaccggaacccgattcacctcacactctcgttgtggtttcattctacaagttcgcggatttccccgaccacgccctcttgcgaaataccttgaagcaactgtgccaacgcctgggtgtttcattcttgcaccggaagggatcaatagggatcaatggcagcatatgtgggactcgtgagtcagtgcaggaagttcttacgtttgtggagagcgatgatcga

SEQ ID NO: 96487 - DNA, 592 bp, Glycine max
  Clone ID: PAT_MRT3847_5813C.1
gtcccaatgccaattcttctccgctaactcttcttgggaactatgctggccctccttgtaaatacgttacaatactgcaaggctttcggcactatgttaagaacgcgttttatcatcccggctgtgatggtggacccaagtgttcttccgctcaaatagaccaggcagtggaagttgaaaagaaagtgggtattgaggtgccaaggagcgagaaagatgggtcctttactcgagacgatgtggccaagacattaaagttggcaatagtagatgaggaagggagtgattataggaagaatgccaaagaaatgggcaaggttttcagttccacggatcttcatagtcgatacattgacaactgcattgttgctcttcaaaagtacaagactcctaattccaactgttaagcacggctattcatgccagcaaggattccactccagtttcttctctgtttttgttttgcaattaagtttttcttttatttctgcaaatgcttgaacttttatccttaaatatttccaatcttcaatcatcatcatgtgtacgtttagttctgtaataaagaaggttatgagtaattacctaaaaa

SEQ ID NO: 96488 - DNA, 414 bp, Glycine max
  Clone ID: PAT_MRT3847_58140C.1
aagtcaaagcattaatatgctagagagcccatggacgagcacgtataaagcatgctcaaaaaaggaacgtttctctcgctgataatgaaagctttcagttgtttaaactctactacctaactaaatacatgtctttatggtactacaacgggctcatgaatggctaaaaaggggtcattattccactttagcttcattacaacggtaacaacaatggacattgcaatacacgggtgccagaactttggcagccatatttgttgaatggtaacctgagattaatttaagcatttttaaaagaagaaagtgcagttgctctacttggccaatatattacttggacaggcaactgtggttgatgcacctttatacacagaatggtttaattgatctaatatagaaaaaatggtgcat

SEQ ID NO: 96489 - DNA, 372 bp, Glycine max
  Clone ID: PAT_MRT3847_58141C.1
aagaacatgactgcacacgcacgcgagcgtaaacttcgaatccagctcgaggcttggctaaaacgcactacatacaagggttttgtttatggtgcgacgcagcaatctaactccacaatgccgtctacgaccttcccaacttctttgccaacgaagaatcgtcatggccagtaaagaacatcaacatatgccccacaatggatgctaacgtcaatactagcgcacaccgcgggaaacactagcgggacaagtgagaatacaactttgacggtgaaaaacactcgactgagaataatacttactatgaagatcttcaacgactgaataaccggtgccgtggttctgttgactattgtatatcgaatcttaccg

SEQ ID NO: 96490 - DNA, 184 bp, Glycine max
  Clone ID: PAT_MRT3847_58142C.1
gagggccaagcccttttgaagaccattcggaggcccacccggtgatcgccctatgggcccaccttgctgtgaccgacagaggagatcccgaggagaccgagatggataccgtggaggttcacgcggacgtggcggtgattactgtgacagcggcggacctcctgctgaataggtgcctatcttt

SEQ ID NO: 96491 - DNA, 2749 bp, Glycine max
  Clone ID: PAT_MRT3847_58143C.1
gattctgctaatgaaagattctttaacattattttatcatttatactcataaatatcctgctgattggaggggaatcttccttgcgttttcaatttgtcttcagaagaacatcatttagtcttttacatatccttttcgttttttttttcattttctctgatgtatctgaatgttgaggacctgagaaactgggtaacacgtgattcccaaaataagaggtgatatggtctttatattccatgatctgtctgttggtcatgttgcctatttcttgccttgcaaagcttataggaagtacctcaaatccgactggattgaatcccttttggcctccctgtatttgcgtgtgatccaagtactccccttttcactctttgcactcaaaaagctattccaagaatcacataacaaagagagagagagagagagagaaaaagctattactatgtggttgactatgcgtaaaaaagaatcagaattcagaaaaaaaaagtgtacttgaactgggattcatctgattccttaacttgtctctctgctgattcataatctcttttaaggaagaggttttgccaaccccaacctgcagcaaataatattgcatgggttggtttactaagttgcttaagggatccaaccgtaaatcgtcaggaggaagatatcatgggaaatatgaagatgacagaatatcggacaatcttgattgttcagcggatgatttgatggatattgagaaagaagaaattggtcgggcaatagcactctctctttcagaggcagataagaaagggaaaaaagttattgaggacgactctgaatctgaagatgatgaactgtgtccacttagcgacgaggaagctgaatctgttggtgaagttcagcaagatgaagatgaccatcatgctaaaattcaacaggatgaagacaaacatcttgatgaagttcaacttgaggaagatgaacaacttgccagggcaattcaagaaagtttgagcattagttctcctcctcgatctgagactgattctttatttcaaccttttgcacacttatttccacctgtatacagaatctgttctggctgtaatgctgagattggccatggaagatttttgagttgcatgggaggttattggcatccagaatgcttttgttgccatgcttgcaaacttccaatcactgattatgagttttctatgtctggaaatcgtcgttatcataaatcctgctataaggagttgcatcatccaagatgtgatgtttgcaagaactttattccaccaaattcagctggtctcattgagtatagagcacatcctttctggctacaaaaatattgtccatcgcatgagcgtgatggtactcctcgctgttgtagctgtcaaagattggagtcagtggataccaaatatctgttgcttgacgatggtcgaaagctgtgcctggagtgtcttgactcagctatcatggatactcatgaatgccaacctctctatgtcgaaatacaagagttttatgagggtttacatatgaagatagagcagcaagttccgatgcttttggttgagagacaagcactgaacgaggctatggagggagagaagaatggtcatcatcacttacctgaaaccagaggactttgcttgtccgaagagcaaactgttcccactattttaaggagaccaaggataggagcaggataccagctcatagatatgataaccgagccttttaggctggtccgtcgttgtgaagtgacagccatacttgttttgtatggccttcctaggttattgactggatcaatcctggctcacgaaatgatgcacgcatggcttagacttaaaggctatggcaatctgaggccagaagttgaagagggaatttgccaagtcttggctcatatgtggttagaatcagagattattcctggcactggggatgaaggtgcatcatcatcatcatcctcatcatcctcatcgccttcgtcttcttcatcatcaaagaagggtaaacgttccgactttgagaagaaactaggtaagtacttcaaacaccagattgagtcagatagctcagcagcttatggagatggattcagagagggtaaccaggctgtggctaagtatggacttagaagaacccttgaccatatccgattgacaggaagttttccatattgaaaaatggtatttgacccttttagagtgagtaattcactttaaagagcaaagtaagggacctcaactgttgatgagataattaaagagttgtttgttaaactttaacaaatccatgaaccgttgatttttcatcaatggttgaaacttacttttctctgtaaagtaaagattcactttagagaaatcaaatccagaaatatgatacaattttctttcctttacaccaaccaatatatcaactttgtcttttaaattatgtaggattcaaaggttccaaaattatatagttttcacgctactccggactagtaaggaatgaaaaatgctcctgttagtctgcggttgccgaaatctttcttttccttttttttttctttttcttttaggggggtgctgatgaggagtgatgaaatgtgcagtttctgcaagttccagataaatgtaggcagataaatgtaggcacctcagattcgatatgtattacaaaataccttgcaacagttgaaaatgataaaacagttgaagtaattatagtaaaagtttgtatattttgtattttgctgat

SEQ ID NO: 96492 - DNA, 331 bp, Glycine max
  Clone ID: PAT_MRT3847_58144C.1
tgtactcgtcttcactgtggctagggccacatatgtataaggaaacggaacccccaaaactaccaaacacccatctgtgccaaagccaacttcaccaaagcaagattcatgccctaaggacactgacaaggttggtgtgtgtgcggatgtgtaagggttgattaacgtgaaactagggaagcgacaaaaaaccccatgctgaagcctcattcagggtcatgctgatgttgaagctgaagtgggactgtgcacgggtctcaaggctaatgtgatgggcatggacctcaaggtcaaggtgaaattgaacttgattctcaactacagtggaaag

SEQ ID NO: 96493 - DNA, 584 bp, Glycine max
  Clone ID: PAT_MRT3847_58145C.1
gcattaagattgtgatgtcctaacaaaaaggtctgctaaatcggaaaagaattacaactaccaatcccctcacatcacacaccacctcaaagaaagaacaatgtttatgtcgatgcagtaatctcaacctccataacctcttccaccatctctttctaattaaaccccgtgtgatgcccttgagatgcaaaccattctctctttcatttcctcatgtagcttctctgcaatttccttatcctaagccttcaagcagagagattgtatcaacttttgatactcatccacactagggtggactccaaaattattcaagctgtaatcaacatgtgctttgtaaaataagagcaaattaagacaaagctatatgcatagaagtcagtctcaaaacaaaggaaaactaagggattaaaaatgacaaaaagaagagctggactaagtagttcatatggcaatgacagaatttgtgttttagctttaatatatgaattggagtattggacaaagaaagcacacaaaactgaaaatggcatagccaaaataatctaaactagtcttctcttttgctcggacgtttcattgga

SEQ ID NO: 96494 - DNA, 387 bp, Glycine max
  Clone ID: PAT_MRT3847_58146C.1
gttcgactatctcaaacgcccatcatgaaagagggcaacgcagatgattctaatatagaaaaacaagatttacaaaagagttcgatcatatgaaggttagggattttctacgcatcgaatagtcactcaaattcgactcatatttattaaattagataaacttaagcattactacctatttaagtatagaatgaatgtgtgacatcatacgacttaaagcactgtaaatacttggaaaataaatagtttaatggaaatgaatatattatattttaaaatctaatcactttacatttataataagctccccattttcaagtccatcaaggactttgatgatgatgaggcaccagcttctactactccgaattcacaaatacttcattc

SEQ ID NO: 96495 - DNA, 268 bp, Glycine max
  Clone ID: PAT_MRT3847_58147C.1
caatatcctagtatactttctacatactttacgatagtatgatgagagcacggttcccattactgtgctgagagtgtttacctggcttcagtttctgtctcatttggcattgcttactgggtcaaagtgaacccgcatccataacatgtgtctgcatagttgtaatgacgagcgagactcgttcagggaccaagcatgccatgctcattataacctccttaatgtcgatgttgagtctgtgatgacagtgtcattcgacgagcacgac

SEQ ID NO: 96496 - DNA, 675 bp, Glycine max
  Clone ID: PAT_MRT3847_58148C.1
gacataaaactattattaattacctaatgagagacctacattctgcattcaatttaataatacctaacaaatacacagaagtacaagggggcagtggcggcattctacaatctcaccgctcataacaataccccccccttctcataaagcacggacacaagaaagaatatacacaacattgaatcctaggagtcaggctgctctgatttcaatggtgcacctgatgatgatgcacagcttccattctgcagatagaggctgtttgcaaccatagaatcactcaccaaccccacatcaacatcatcaaagttgaggggacctctcaccttccggttgccatttaaacggttattgatggctgtcaggtcttttgaagggctctgatatgcatgagtgctttccccaacacatgcataatagctttttgagctgtgtgatattagggcttccatcttggatgatcgtaatggagagacatatacattgtgtgtggctgacactttttttggagacatatcaggaagggttgggaaaggtgatattttaggagatcctggacattgagctaaatggccttcatttttattattaacttcaggtatgcgatcacttttcgggggttggtccagcagggccaagttcaccagcagtggctttacagaaggaatgaatatt

SEQ ID NO: 96497 - DNA, 230 bp, Glycine max
  Clone ID: PAT_MRT3847_58149C.1
attaattattctggatctttatctttgtacaatattggttttttcaaaaacattagttcgtgttttgaactaatttagtattttttattacaataaacaatatctatgtttggaaaattttagaaaaagtattataatattcaatgttttacttgaaatagtaaaaaatgggaattaggatagataaaatatgtggctaattaaagatatgtattttcataaaaatggct

SEQ ID NO: 96498 - DNA, 332 bp, Glycine max
  Clone ID: PAT_MRT3847_5814C.1
caggcaaaacttacaccaccccaagaacaacataggatataaggataaggcaacactagaaaaccccgcaatttactcagagagcgaacaaccataattgggaattagcgcaataaatacttataggaggaaaccatagcagttacttatagagcacactttcaataatggcaacgaaagcatcatatacttataggagtaaaccatggtactgcgcgcgaaatcttaaaaacagaaaaataccggataacgctgacttccaccgagggggagggtgccaccgaatatagagccgtcgacactgagaaaacaatgatcggaggggaaggacc

SEQ ID NO: 96499 - DNA, 2489 bp, Glycine max
  Clone ID: PAT_MRT3847_58150C.1
tttaaagacttgatggaagaatcttctctaccttctagtttaaatatgctagaaaaggactatgattacatgattcgaaataagagtgaattggatgagaggttattcattaatgaggatgacagcctattagcttcagtaagcttgtctggaggttctgtttcagtaggtggcgtcaagaggaaatttgattcaatggcatcacctgctaagaccattacaagtcctctctcacctcaccgctcccccgcatcacatgctaatggcatcccgggtagtgcaaactcaaagatggcggccacccctgtaagcacagcaatgactactgcaaagtggcttcgaactgtcatttctccacttccatcgaagccctcgccagagctggaacgatttttgacatcatgtgatagggatgttacgagtgatgtggttcgcagagcacagattatattgcaggctatatttcctagtagtcctctcggagaacgatgtgtaactggaagcctgcaaagtgcaaacgttgtggacaatatatgggctgaacaacgaagactggaagcactgaagttatactacagggtattggaagcaatgtgcagagcagaagcccaagtacttcatgcaactaatttaacctctctacttaccaatgagaggttccatcggtgtatgcttgcatgttctgcagagttagtcctggcaactcacaagactgtaacaatgttgttccctgcagtactagagaggactggaattacagcctttgatcttagcaaggtgattgaaagtttcattagacatgaagaatctctcccaagagaattgagaagacatctgaattcattggaagaaccgtccggtcttttggagagcatggtatgggaaaagggttcttcaatgcataactctttggcagttgccagaccttccctttctgcagagataaatcgtcttggactgttagctgaaccaatgccatcattggatgaaattgcaatgcatattaacttctcttgtggaggactgccaccagtgcctaccttgcccaagcttgaaagttctccaactcagaatggggatatcagatcaccaaagcgaaatgttttaatggaaagaaattctttcacttcaccagtgaaagatcgccttcttcccttcaacagccttaagtcaaaactacccccacctcctttgcagtcagcatttgccagccccacaaagccaaatccaggaggtggaggggaaacatgtgcagaaactgggatcaacattttttttggcaagatcattaagttgggagcagtcagaataagtggcatggttgaaaggctacaattatctcagcagataagggagaatgtatactgtcttttccagcggatccttaatcagtggacatctctctttttcaaccgtcatattgaccaaatcatcaaaaagctattatacatgtgtgcaaagatttcacaactcaaactaagattccttcagaagacctgacagcaatcaataaccgtttattgcaaaccacaaggttttcgtagtgtatttgctgattggtcattggctcggcgtaattgggtgattctatagaacaggacaggatcatattgacataattaccttttacaatgaaatattcattccttctataaagccactgcttgttgaacttggccctgctggaccaactacaaaaagcgaccgaatacctgaagttaataaaaatgatggccatttagctcaatgtccagggtctcctaaaatatcacctttcccaacccttcctgatatgtctccaaaaaaagtgtcagccacacataacgtatatgtctctccattacgatcgtccaagatggaggctctaatatcacacagctcaaaaagctattatgcatgtgttggggagagcactcatgcatatcagagcccgtcaaaagacctgaccgccatcaataaccgtttgaatggcaaccggaaggtgagaggtcccctcaactttgatgatgttgatttcgggttggtgagtgactctatggttgcaaacagcctctatctgcagaatggaagctgtgcttcatcatcaggtgcaccattcaaatcagagcaacctgactcctaggatccaatgttgtgtatattctttctttactcctctcttgaatccatatatattgtattaggtgctttatgagagggggagggcggtattgttatgagcggtgagattgtagaatgccgccactgccccttgtgcttttgtgtatgttgttaggtattattaaatgcagaatgtaggtctcattaggtaataattaatagtttcatgtcctagttcaacttgttttcatcatagtttgtaattttatgtttccacgtgtggccgattaatctatttagggataggccatccatggggggggggggggggggggggtggcggccgctctagaaggagccaaagcttacggtacggcggtgcagtgcga

SEQ ID NO: 96500 - DNA, 233 bp, Glycine max
  Clone ID: PAT_MRT3847_58151C.1
ggccgccctattttttttttttgggggggttttttttattattattcttttaaaaaaacctcatatgcgaataatgacatatcccggaaaggaagattttaaggctacaacatggaacccttacctagtaccccattttaaacacaacatccttggatttaaatcaacaagggtttttttatttaaaaatatatttttactatatatatatatatatctatatatatttatat

SEQ ID NO: 96501 - DNA, 365 bp, Glycine max
  Clone ID: PAT_MRT3847_58152C.1
acaggggttaatccttgctaccctttttcccggggggggcaaaacccagggaggactcaaaacccgacaacgggaacactggcaaggaacagacagcccgggggcaagcccccggcggccctaggccttggaggggaacaaggccggaaaagcccacccgggggcccacacccaccctgggaggggacagaagggccccaaaagcaggcttgccaggggcaagggcccacaaaaaggaagcagggcttgtatggagcccaattcgccccaaaccccacgcgggaaacaaggggagggcggaaatagaggggcccccaagggggggacgccggccaagggacaaacatgccgggaggggaaaaacc

SEQ ID NO: 96502 - DNA, 391 bp, Glycine max
  Clone ID: PAT_MRT3847_58153C.1
gctgcgagaagacgacagaaggggacccgtcaagcccaatgtaggttaaaagtagtcgtataaataaaaaaaataaattttctcacgacaagttttaacataacaaggtcctactaaaatcttatatttatcattatcttgaccaaatataattcatgaaatagacccttctaagtaatgtaatatgctggggtgttgtaagagatcattatggcggcttgtgcttgcaacctggggagatgttcagtggttcaggccgagcttggtttgggtgatctatcatgggatcatatcagactcattaaggataaaggcatcccagggcaagtattgattgaaacacaagggttgctacaaaaatcactcgtgctattcgttctcatatttttag

SEQ ID NO: 96503 - DNA, 461 bp, Glycine max
  Clone ID: PAT_MRT3847_58154C.1
ccgggactgaggatccctctaaagatgttacagtgcttccaagtggactgctgatgataacaagaaattgaggatgctattgaacaggctatccaatggctcgaaggaaaccagcttggtgaagctgactagttccaggacgagatgacggagttggagagcatttgtaaccccatcatagaaaagatgtacccaggagctggcgatgatgcgatgggagccctggatgaggatggacctgctgctgtatgtgaaaaaatagctggaacccctattgaagaagtcgattaatcagaccagttgtcttgggtagctcttgtttttgcacagacccttttgaaggagacatgataacctgtcccgtcctgatgtattggattccgagattactaatgccggctttttatcgcctgtttccccgattcaacttaacaaggccctaaggtcgctatggccctaaa

SEQ ID NO: 96504 - DNA, 310 bp, Glycine max
  unsure (1)..(310): unsure at all n locations
  Clone ID: PAT_MRT3847_58155C.1
gtgtttttttttttttttntttttttttttttttttttttttttttttttttttttttttgggccccagccaaaccgnngggagccggactttatgttataacccaaggaaggcatccccaaggagtctaagagggggtggaaaagggaacagaaccccactaagaaaagaaggccttctaaaccccgattaaggggggcgggttggctaggcgaatatccaaggacaggagaagaggagagagccccgctgaagagggggagcccgccaagaataaaaataggagcctgaggagagggccccctcccgg

SEQ ID NO: 96505 - DNA, 509 bp, Glycine max
  Clone ID: PAT_MRT3847_58156C.1
ttcccgggtcgacccacgcgtccgcacatcttttcccaagtttctaccaaagcttgagcaaagatgagagccaagtggagaaagaagagagtcagaagactcaagcgaaagcgccggaagactcgagcccgatccaagtaaacaattgatcgcttcatctcagtaaagctctcgacaaatgtcaacttttctcaatcaacatctgaaccaagacaacaatcattcaatcgtgttttctacaagcggagaggtcatcgcaagaaggtcaacgaagctgcagattgctgcatgatgggatggctatgagaatatggccctagatatgtcaaggcatatcaaggaggagtgaaactggtctatcatatgcgaaatgctatgaagctttacgactgttcgtacttgaccgcagatctatcaagtcaaaaggaaaactttgcgctatcagtgaggatctatcacgcacgagaaggatttcgacagcgatcaaattgatgtgagactgccacaat

SEQ ID NO: 96506 - DNA, 262 bp, Glycine max
  Clone ID: PAT_MRT3847_58157C.1
atcactgtatactgatcagcacaaacactgccgaccaccgtgatccttacatagtcatctgtacgggttactctacatccgcatatgcctctcaccaggatagatgatgaaaggctttattaaccccaaatggaccgaacctctacactcatcaatgtggaggtttccaatcaacatccgatgtcagaggcaccattaatacacttcaatggtcgcgaacccgacggccgaattgtacttgaggctcccagccaagttctct

SEQ ID NO: 96507 - DNA, 314 bp, Glycine max
  Clone ID: PAT_MRT3847_58158C.1
atctataaactagctaatgcatccgccggtcggtgctaccctaaacgcaaaggggcttaccacaggaacaaaggagtgctccgcaacatgggagcacaagtggctttcatactactaacgattaacaaatacctgcgtatgcacggtatacggcagaagatctaccgcaagttgcgccagcgcctccgtacccaccgtccggaccagacacgcgccaaaacctcaaaggctcacacgtacatggccaagctcctaagacacaaatcgcgctaactccgcatcggcgcatagcctaacatgcatgatcaccggcc

SEQ ID NO: 96508 - DNA, 263 bp, Glycine max
  Clone ID: PAT_MRT3847_58159C.1
ttccagggcgcgccgacgcctacctgctctccaacgccgaccgagtcgctgagtggcccgatctgctgcagatggccgttgtggatctcattcgcaaggtctgtcgatccaagaaccgcgccaacaagggaaggtatatcaccatcattacctcgctgctctccacgcccagcactgcggtagtttatgaatgcgctggcgccctggtgttactctcttcagcgcccacggtcgtgcgagccgctgtcaacacctactgccat

SEQ ID NO: 96509 - DNA, 442 bp, Glycine max
  Clone ID: PAT_MRT3847_5815C.1
ttctattaagcctttttttgttgatacccaaacacactctattagcttaaacaatattcaccaaatttatgagagagtgaaaaaacacaatagagatgaagtccaagaaaaaagttcaatgatgaatccacccaaaaggcccaatatcaactacggtccacttgtctgtcatgaaagagagatgctacaaaagaatgaatcacttttttctaccaaagatgccaagcttaaagctataggtgcaattgtcttcaatgatgaaggaaagattggttctacttcagagagcaaaaataatacaaaagaacaagaagatgatgatttggatctttcccttcatttatagatatgtatttctttgttatgaatatcatgcatatgagtttaaattaatctagtaaaatttttctcttttttatgtactcaataatgaaatatttag

SEQ ID NO: 96510 - DNA, 294 bp, Glycine max
  Clone ID: PAT_MRT3847_58160C.1
aaaaaaaaacaaagcctgcataccctttaaaaggctttacccactttacattttacaaccccaagacttttaacacgatcccgaaaaaaaggagcattggtctttttgcttttttaaagcacaaaactctcacttatttgtttttttttaaaacacaaaataataataaagctcccccggttgataaaggccaaaaaaaaaaaagaacgaaagatgcttcaccccctgcttaatttcaaaacaaattgggcttaggaccatccaaaaaaaacacaaatttttcggacccgtggg

SEQ ID NO: 96511 - DNA, 436 bp, Glycine max
  Clone ID: PAT_MRT3847_58161C.1
cgacgggaacttcatgaatggactaacaacacttgttgggaaggcaatgcccagtttagtgacacaaataatttagcttctccactagtcgtctgtagctctgtggatcagagaatggaactccatctgcggtcaacttgatccctggctccataggggtttcacatggtttggctcccatcaaacctgtctcattcaacaagtccaaaacatacttcctttgtgataggaagatccccttctttgagtacataacctcaatacccaagaagtacttcaaggccccctagtctttagtctaaaactaaaattgaagaaaactcttcaagtcgtcaatgcctttactatcacttgctgcaagcacattatcatcaacatacaccacaagtaagatgctgccaaggttagtattctataaaacactgggtgatcactc

SEQ ID NO: 96512 - DNA, 283 bp, Glycine max
  Clone ID: PAT_MRT3847_58162C.1
ttggtggtttttttttttttttttttttttttttcttttttttttttttttttttttgagattggaataaattttacgaccgaattcatatttagaacattttgggggggcaaaaaaaaaaccggggcgaattttttattgaaaaagaaatttagtccccaaactgaatcggaggcacatttttaaaggaaaaaaaaattctcaagtttcagggcattaatgcgcccctcaaaaaaatacccaccttttggagggaactaccgaggatgcccccccaaatatt

SEQ ID NO: 96513 - DNA, 614 bp, Glycine max
  Clone ID: PAT_MRT3847_58163C.1
ccacgcgtccgcactaacactcatcactcggaggatgtttgggctgggtgtttcttcctcctccttcgccgccgccgccgcctccgccgctgcaaccaccaccacctccactcaccaccttctctgtggaacccttcactctgcttctttcctctcaactacccatccctttcccacaacttcgttgcggtcatcttcactgcacttcaggtgtgttcccatcagagccatggctgagattgatactatatcagtgtcaaaatctgcttcttcttctgctccaggcagcaagcaagccttgatatcattgtcagacaagaagggtcttgcatttgttgggaatgggctccaggaattaggatactctattgtttcaactggaggaacagcttctgcattagagagtgctggagtagctgttactaaagttgaacagcttactaagttccctgaaatgcttgatggtcgcgtcaaaactttgcaccctaacatacatgggggtatcctggctcgaagggaccaaaaacatgatatcgaagccctcagtactcatgggattggtacttttgatggtggggtggtgaacctgtacccattttacgatgaagggacat

SEQ ID NO: 96514 - DNA, 543 bp, Glycine max
  Clone ID: PAT_MRT3847_58164C.1
cggtctcttgggaaataggtggatggggaaactgactttccctgagggcacttcccgaagtgttaaaagactgcccatttctatagggggaggagctggtgcaaagaatgctattatcatgaatatgccaaatgctgttctttcaatgtggagatatgtcgacggagatctcgcctatgaagttaataagatgactcctccctacattcaatgtacagtgtctttctatatagcattcggagattcggctgatgacaccatcaattttgaggcttttccccacaagctggtgggctttggagagattcacgcacacagtttgttatgaaattacacaagagggaatttgtttcatccttggacaactcaaggtgcgttcctgctacaacttttgatggctgatgggtgcgcatatttgcatgctatggtgcatgatagttcagtgtgtacaataccaggtgattctgtcattggtgttacgctgacacccatggacaatatgtgtgcatatgggatcaatcctggttttcaagatctcgtttt

SEQ ID NO: 96515 - DNA, 2281 bp, Glycine max
  Clone ID: PAT_MRT3847_58165C.1
cggaagtcccacactgacactcatctctcggtggatattgttgtgttgtttgtcttacataacttcttggttgtgtcacactaacacatacacactcgcctccggtttgtgttgggtgtttcttcctccgccgcagccgctcctgctgctgccacctcctccactcaccaccttctcagtggaacccttcactctccttcttccctctcaacttcccatctatttcccacaacttcggtgcgttcatcttcactgcacttcaggtgcgttccaatcaaagccatggctgaagttgatactatagcagtgtcaaaaactgcttcttcttctgctccgggcagcaagcaagccttgatatcattgtcagacaagaaggatcttgcatttgttgggaatgggctccaggaattaggatatactattgtttcaactggaggaacagcttctgcattggagagtgctggagtagctgttactaaagttgaaaagctcactaagttccctgaaatgcttgatggtcgtgtcaaaactttgcaccctaacatacatgggggtatccttgcccgaagggaccaaaaacatcacattgacgccctcagtgctcatgggattggtacttttgatgttgtggtagtgaacctgtacccattttacgataaagtcacatcagctggaggcgttgaatttgaggatggaattgaaaatattgacatcggtggtcccgccatgattagagctgctgcaaagaaccacaaggatgttttggtagtggttgatacagaagactaccctgcccttctggaatttcttaaaagaaaccaggatgatcaaaagttcaggctaaagctcgcatggaaagcttttcaacatgttgcttcctatgattctgcagtatctgagtggttgtggaagcagagtgtgggagataaattcccacctagcttgacagtgcctctttcactcaaaagttctctccgttatggtgaaaatcctcatcaaaaagctgcattctatattgacaaaagcatttctgaggttaatgctggtggaattgctacagccatccaacaccatggaaaggagatgtcatataataactacttggatgctgatgctgcttggaactgtgtatgcgagtttaggaaccccacgtgtgtagtggtgaagcatactaatccatgtggggtagcatcgcgtgatgatattcttgaagcctacagactagctgttaaagctgatcccgtgagtgcatttggtggaattgtagctttcaatgtggaaattgacgaggcacttgctaaagaaattcgagaatttagaagccccacagatggggagacaaggatgttttatgaaatagtggttgcgcccagctatacagagaagggacttgagattctctgtggaaagtctaagactctaaggattcttgaagcgaaaaagaatgaagctggaaagctttcactcagacaagttggtggaggatggttagctcaggattcagatgacttaaccccacatgacatcaagttcaacgtagtctctgagaaggctccacaggatgatgagcttcgtgatgcagagtttgcatggttgtgtgtgaagcatgtcaaaagcaatgctattgtgatagctaagaacaattgcatgttaggtatgggaagtgggcaaccaaaccgtgtcgagagtttgagaatagcaatgaggaaagctggagatgatgttaaaggagcagccttggtcagtgatgccttcttcccatttgcttggaaagatgctgtggaagaagcatgtgaaagcggaattggtgttattgcagaaccaggtgggagtatcagagaccaggatgccatagactgttgtaacaagtatggtgtttcactgctctttaccaatgtcaggcactttaggcactgacttaatttttgctttggaataacttcctgcctccattatccaagcggtgttgctggaacttgtgcttccaataggtagcactgaaacctgtttttgaagtcaagtgactgtatgagtaaggattgttctatccaatttatatagaaaaataaattgatgttctcctactttctaatgtcttatgtacattagaataatgtgatggaatcatcttttgcaatgaacagaatcaaattagacattcttgctgcaactattcaattatgttcagttgaaaggaaaaaacatgtaggattttgaatgtgagaaagtctacggttgtttatggaagaacttatccaaatagggccttaatggcgaaggt

SEQ ID NO: 96516 - DNA, 411 bp, Glycine max
  Clone ID: PAT_MRT3847_58166C.1
atggtgatgactgatgagcacgggttgaacatgcatgcaagcatgaataaaggaaatatgtctattgaagctatggcaatggcaggcatggattacaaagaatgtgccatcactttggaagagtgttacccacaacagcaacctcctatgtaccttgtggccgagcctaataatgaattagttaacgtggctgcagtggagatgatgaaagcaaagatccgagagtgggcaaaagccgttgcttcaacttccaagcaacaaattatcgctgatgagaagtgcaaagtgcatgtagttagctagtataacattatggtgtttataatgtacccaagacttctatatgttgttccaataaatcatttgccagttttctctcaacccactgactactgcatcatggccaactga

SEQ ID NO: 96517 - DNA, 211 bp, Glycine max
  Clone ID: PAT_MRT3847_58167C.1
tgatgtttcaaaaaatttgcaaggtaaaaatcatttgatgcttagctagaataccccaaagggttgctaacaacagccccgctgtggggacatcatagaacgaatactatgctatgatcgccaaggctggagtgcataattacacatgggacaatgtggatctgatcattgcatgctcaaaatattacagagtgtgctgccttaacattct

SEQ ID NO: 96518 - DNA, 287 bp, Glycine max
  Clone ID: PAT_MRT3847_58168C.1
gttttgaatcatagggaagtatagcaaacagttatatcataaagtcaactgttcttgccgttgttctgtctttcagttatgtgtttcagctggccctgcccttggcctctggccccaagatatcttcaaacttcaaagtttctcttgttttgtcttcttgaattccaccttcatcaacctagagccccttaaaacttaaaagtgtcctaatttagttaattgatcccataccatagtctattccattaatgtcaggtggtgaagacactgagggctacaagtactgg

SEQ ID NO: 96519 - DNA, 707 bp, Glycine max
  Clone ID: PAT_MRT3847_58169C.1
aggaaccaatctattcaaattttgcaaccttttcacaattcaaacataggaaccttggaattttgctgtttttttttatcaatgtctcataccttgcaattttcatttcttttcaagtgcattcaattctccaatgaaggtagagaagatgaacagagttaggcctcgtggctttcaaattctatgctcttctgagcattccagtttcaaagatgaagatgatgctgaaaatggagggtctgatacttctttgtttggttgttttgttttgctgagaaaacttcaaaggaggtcaagtttcatcgcgggtgatacaggtggagagatatagcaatggcttcaactatccctcttgtgagcagatgtgtattaggtgatgatttgcagttgcaaacctttcttgttgaggaggatacgtctacgccaaaaaggttccaggattcatattcccctgatgaaagcctatcctggcttccagacacaatcaaagattttatcctaccagcaggctttcctggatcagtttcagatgattacttggattacatgttattacagttccctaccaatgtgactggatggatctgtcacaccctagtcacttcaagtctcctaaaggcccgttggtattggctctttctctggaacctcagcaactgcttctgcttctgccatcagggtgggtctctaaggatggcattggagct

SEQ ID NO: 96520 - DNA, 363 bp, Glycine max
  Clone ID: PAT_MRT3847_5816C.1
aattcggctcgaggcgtatttttctcttccgatccatttcctcactcatttctctgcgatcttccaatagtcattcaattctgcgtttctccttctcattgtttcgcccaaatcttactatcaggtcttcatttgtctgcttcaaaggtttttgagtaaccaaatcccaagatgggtgtggctgacaacattcccgatctggaggagggtaccttggagattggaatggaatacagaactgtatctggagttgctggaccattggtcattcttgacaaaggtcagggacccaaatttcaagagatgggtgctattcgtttaggagatggaactactcggcgtgggcaagctgtagatgttgat

SEQ ID NO: 96521 - DNA, 305 bp, Glycine max
  Clone ID: PAT_MRT3847_58170C.1
cctaaagcaaaaaaacgggggctattccatacggaaatacgaaataccatctgcatatattgcgggatgaaaggaaaatgaccataccgaccccttctaatcactgtttgacactaaacacacacacatctactatatataccttttacacccaacctgtacgccgcctctgaggaataacgctaactaatacttttatcttggttacatcagactgaacttgtcattttgaaaaggacacatcttgtgctacaacagactgtgcatctgctctgtaccacgccacaatcctggccatgtcatac

SEQ ID NO: 96522 - DNA, 692 bp, Glycine max
  Clone ID: PAT_MRT3847_58171C.1
ctcgagccgctcgagccgccaaaataagttgagtctgagatgactagcccaatttttcaaggttcttttttttaaagtccatattatctataagtgttttaaattgaaactttcacggtctaatacataaaatttggtacataatcatctcagtttgatatggttgtagcaataacagataaaaatgaaataaatgcttaactgtttgaattgaactgagcgcccaaaattgaagtcttgattagtgtctttagaaactgttctagaatcaaattctactaaagtgactttgcctgtcttttattttattattatcatcattcctacactggtcttagacattatttagtatttattaacctccaaaaaaagaagaattttaaacaaagttagtggctggctcagttagccattgtgcaatcacagctgaattcaccctggtttcccgttttgaccccaatccgcctgaactttgttatggcacttacaaaagacgtttcaaaggctgtgctgttggatgcaaataagttcactaagtgtcttggtcctttatgagtaaatagagtttgattaaaagcaagagtccatttcctttctgaagattctcgtggtattggtaatcaaatgtcctaggggtaatagggtccatgtcaatggctgttccgacacacttgttggagctgttttgcata

SEQ ID NO: 96523 - DNA, 260 bp, Glycine max
  Clone ID: PAT_MRT3847_58172C.1
gccaacaatgggtattaatgaggcccaaaagtggactcaaacaacacacggaaccgaactccaaataaaaggggaacatgcacatctaaattctgaaaaccagtattaccaaacgggggaaaaaggaaattacaaaatggggaaaaagtcagttatccaatgcagagaacatctgattattctacaaaaaaatacagaactatcctcgctgaaaaaagggatcaaacccatatggccaatggtgaaaaaaacctcgagcc

SEQ ID NO: 96524 - DNA, 250 bp, Glycine max
  Clone ID: PAT_MRT3847_58173C.1
gacggacgagcagaagaccataactgtgacacggcacaagagagtgactgtctttctgggtgtcatcatgctttctatcgcagaggagttcatcatctttaacgacgaagtcaaataacaatgctaactaattgtcctacatatgatggccatttcaaatcatcagctacgtatcatcatattctgtggaatctctacttggctctcgcaaggagtcatcgagggacacccaccaccacaggctctttat

SEQ ID NO: 96525 - DNA, 214 bp, Glycine max
  Clone ID: PAT_MRT3847_58174C.1
cccacgcgtacgacaatgcacgctttgttttacaatatcgtactgattatggtgctagagggagggatcagatcatgcagaggcactactgacaatatagctgattctattgagatatctcttgaacgtcttcaccatagactaaagctatgggaagatacggatgcaaacattgcagacaagtctgagcttgcttgtcctacactttgaatac

SEQ ID NO: 96526 - DNA, 1906 bp, Glycine max
  Clone ID: PAT_MRT3847_58175C.1
ggtccggaattaccctgcgagaagacggcggcaggggagatcttccatagtaagctgttgagtggaaccatatcgagcacctgagttgacttgttttgtcccttgtccatctccatggccactccacagtcccacttccgttttctcgctttctcactctctatcatccatatctctctcttcctctccacaaccgcaacccaacaaccgctcctcgaagaacaagacactcccatcacgcacttccagcgctacctccgcattaacacagcccacccaacccctgactacacctccgcggtctccttcctcaaagcccaggcccaaagcctgggcctcaaaacccaaaccctcgagttcgtccaaggcaagcccgtcctcctcctcacgtggccgggctcaaacccctccctcccctccctccttctcaactcccacctcgactccgtccccgccgagcccgagaaatggctccacaatcccttctccgcccaccgcaccgcctccggcgccatcttcgcccgcggcgcccaggacgacaaatgtatcgctattcagtacctggaagccatccgcaacctcaaatcccaatccttcactccacaccgcacaatccacatctccctcgtccccgacgaggaaatcggcggcatcgacggggccgccaagttcgtggagtccgaggaattcaacggactcaacgttggattcgcgctcgacgaggggcaggcctcgccgggcgatgaatttagggttttctactccgatagggttccgtggaacgtgaagattagggctaaggggaggcccgggcatgggtcgaggatgtatgatgggagtgcggtggagaatttgatggagagcgtggaggtagtgagtaggttcagggagagccagtttgatgtggtgaaggcctggaaagctttgaatggtgaggttgtgtcggtgaatccggtttatgtcaaggctggggttgtttctgaagatgggtttgcaatgaacgtccagccttcggaggcggaagctgggttcggtctgcggctcgcgccaacaacagacccagaggaaatgagaaggcgaattgcagaggaatgggcgccggctgttaggaatatgtcatacgagattatagagaaaggacctcttagagactacatgggacgtccgttaatgactgcaaccgatgattccaatccatggtggtcagttttcaagcaagctatcacatctgttggagaaaagctttcaaggcctgaaattcttgcatccacaactgatgctcgatacctcagacagaaaggaattcctgtgctcggtttctccccaatgaaaaatactcccatcttgcttcatgaccacaatgagcacttaaaggatactgtgttcatgaagggaattcaggtatacgagtctctgataagttccttgagtacatttacagaagcttcacattaaaggcctgagttgctgatctcaataggagaacaatgcctaacttttgtagggaaaatctgagcgattggataccccacctccaaataataagtggagtaaaagcataaatagcaacgttgttatcggacaccatgaaaaaaggaagaaaaaaagtcctctgttgttccaattcgctcatggtggggactgggaatggtacaacttattaattattattgtacctttagaaattgtaatgatcaggaattattttctgtgaagtttatttggtcctttgtgttaaatcatcgatggttgcctatcatgggccaaggattcaactctctactgttgtctataagttgcatccttaaatgctatgtaagatcttaaaaagtaaacattggttaccacgataaatactaaataggtgaagttgtggttggactgtgttcgaccaaactttaaattg

SEQ ID NO: 96527 - DNA, 161 bp, Glycine max
  unsure (1)..(161): unsure at all n locations
  Clone ID: PAT_MRT3847_58176C.1
ctctgttgtttctcagctgcctcggctnaggttcggaaaancgagagggttctgttttcttttcgcgatgatttccaagtggaataagaagcgtatgaggaggctgatgaggtcgcgcctgaccatcatacttactttcgactaccgcccccccccttctc

SEQ ID NO: 96528 - DNA, 284 bp, Glycine max
  Clone ID: PAT_MRT3847_58177C.1
caacaaagtgatgagtaaagacccgcacttcactatgcaaactgtcaaaccaagttatgattgacaaatccacacttactgtaaacgtctacactgggaacaatgggggatggactattagaatccctgtagagacatattattccattctgtttgatcttgctgtgtgtggtcccagacgtgactgtaactatatgtccatactgtttgctcgagccgaatttcgagcgcacgttcccgtgcctgcaacgacctagcttgtctatcgggtcacctaaagctaa

SEQ ID NO: 96529 - DNA, 2242 bp, Glycine max
  Clone ID: PAT_MRT3847_58178C.1
aataattcgccggcctgtttgtatctgttgaagaggggttcttccacgttacatccaaattgcagggacatacacaagctccgaacaagtttgcgtttaccttaaaaataaacgcacaacaagtaattcattaaaatatcacgttaggaataggaagtgaaatttctagagcaacatctgattatcggcttccgaccaagcagcaacaacagtccctttggattgttgggaggacaacgagaaaaaacgtgtagtcttggcttacttctgccattgggaactatcgtccggcttgggatccactttcaacaatcggtacagattggtagcatcaacaatctgtacgagagtgtgcaaaatttgagtcctgatgttttctggaaatgttgctttctccacgcaacccgttagaagcctcttaccagagactaaaagtgaaggtggatgacacagagcccacaaagtatttcatttgtcacagctgttcaaaaggaagtgatttgttgctgagtagttttgatggggcaaggtgttcctgtagaaaattgatgcaaaaaaaaatggagctgctggaagagtccaaggacgaggcttctgtggtagacggtatttttgttaaaggggatgccatgttcttgatctttgatgacttgacagtgctccgaagctccccaagtgactctgtacaacgatccctccaacttggacgcaaaaacttcggcagcaagctggaagatccctacaatttctaaagatgttgacatgaaggagatatttagcatactaaagcaagcattaatctccaaatctcctctaagtgaagtattcttcaaaaaagaaggatctaagtcatgctcttgcccatactcttgcccttgctcacgaaataccaacccaattcattggaaagattctataaaaatcaaggtaatggtgaacaaatcaaataataagattgtgttggccgaagcagatggagattttgttgattttcttttcagcttcctcacaacaccccttggatctattctgaaccttactaacggcaaatttcccttgggaagcattggtaacttgtacagaagtgtgaagcgtctcgatccatcatggttcaaagggtcatctaaggaatccttactgaatctgagggtggctcctcattttggttgcaagagcagcccatttcaagaagaccacactcctaattattggtatggcactgtagcagggaaagataataatgaggggcgtacaatgatttcaaagaaaaatgatatgttacaatatccagcaaaaaaactgaaactttttgagccaaggtgttctgatggagcaaaagaagctggtgtgggatttatgaagaggccgtgtctatttgttgtgatggatgatctgaaagtgataccaatgacaactacttctagcattgagtatctgcaaaagctggaggaggagaatgtcgagttggatgatttggtggaaatcaggaagagactcgaggcactaaacctgttgagggcttctttgacatccgacaaagctgctttcacacgcagcttgttctacctattgaagaagtggaaatgccaaaggtgcattcccttttatggtgtatatgtatgcaagaaaaagagaagcagaaagaaaaaagtaatggaagagaaagaaagtgagagataataataacgtttaattattttcaagtctttgaatttttttatcaaatttttaattagatctcttgttttttattttaatttagtccatgaacttgtatttatttttaaactagtgatgacccatcccatgcaatagcagattgtttttgacctattttggtgttatcatgcacatcagtcgttatagaagatttatataaacttttagtaagtgtaatatgtgtgtatttaatgctattaatttcatattcatatgcatattaaatagtattagttattataataaattaaatataatatttgtgaaacacgatgtaaattattttatgtttgttttatatgttttccccctttcctctaaaaaatttggaagagttgtctccgcttgcctcctcttccgcttctccgtggctttctccaatctgtccaacatctcgttagaaccagcgtggagggcatttgctccggaaagtaccatcttcatattcagaattagtaacttgagctgcttgttcaataaaggtggaaggagttatatcattagccgaatatatatgccactt

SEQ ID NO: 96530 - DNA, 661 bp, Glycine max
  unsure (1)..(661): unsure at all n locations
  Clone ID: PAT_MRT3847_58179C.1
gaatctcaacccatcatggttcatcgggtcatgaaacaaatcctttctgattaatccaagggtcgctcctaaatttggttgtaagatcaatccactaaatgttttacaagaagacgacgctcctaagtattggtgtggcactgtagcagataaagataatgagggacgtacaatgatttcaaagaaaaatgatatgctacaatatccagcaaaaaaactgaaactttttgagccaaggtgttctgatggagcaaaagaagctggtgtgggatttatgaagaggccgtgtctatttgttgtgatggatgatctgaaagtgataccaatgacaactacttctagcattgagtatctgcaaaagctggaggaggagaatgtcgagttggatgatttggtggaaatcaggaagagactcgaggcactaaacctgttgagggcttctttgacatccgacaaagctgctttcacacgcagcttgttctacctattgaagaagtggaaatgccaaaggtgcattcccttttatggtgtatatgtatgcaaganaaagagaaacacanagaaaaaagtaatgaaagagaaagaaagtgagagataataataacgtttaattattttcaagtctttgaattttttatcaaatttttaattagatctctta

SEQ ID NO: 96531 - DNA, 396 bp, Glycine max
  Clone ID: PAT_MRT3847_5817C.1
taatttaactacacctctaaaagggggggttcattaaaaagcagaaacttttcaattacaaaagttttacaattttattaccacctaacctattcatgttatacataaattaaaatcttttttcaatcacgcgaagagactcaattacatatttatattccttaaatccatcatatttttaatcaaagaatttaattatttaaaacatttgttgttaacattaaatacggccccataaatatttaatttattccatattttgtcaagtttctttattttataaattaaaaccactccttaataacttttatttcctcataatatcaattaaatattctgtaaattcgattataattaacttacatcttgattaaattttaataaatatacattaaa

SEQ ID NO: 96532 - DNA, 601 bp, Glycine max
  Clone ID: PAT_MRT3847_58180C.1
ccacgcgtccggatcattcgttggattaacgttgcttggaaactgatttgaggttcaggttctaactctatcctcattattccacaacattttccaagttcagcgttgaagttcttatttgaaaaaaaaaaaaacataaaagttccaaaggataaataaatacctcttccctagccttcagtactcctttgcttgtagaaaatgtacgaggaatccacaaatataaaagattacctcgagcctatgcaattactgattcattctatgttcatttctttttctgctaaaccatcaactgtaatatagaaaaaagcatcgtgcgtgagctagaaatctgtgtcagctatgatggatcgtggtcaagagaaaaccgtacctgctggctgtgacttgtctctgaagaagaaggagcttctttctagtgccatgaagagaacaagtgaatggattttttctcaggagattccaagtgatgtcaacgttcaagttggggaagcttccttttcgttacataagtttccattagtctccaagtgtggatacattaggaaactcgtctcagaatctaatgatgcagacgtttcattcattgaacttcctg

SEQ ID NO: 96533 - DNA, 885 bp, Glycine max
  Clone ID: PAT_MRT3847_58181C.1
ttcctttcaaccatcagcaaaaacaaacagacaaactaagggaaaccatcaatagttcaacatcaagctcatccatcatatggctttggcacgtttggctttgaaaaacttgcaacaaagggtgtgtgcttcctctttcttgagtggcaatgttcacaagcagaggtggaacaatgagttgctgagaaggtttggtactgcagctggggacaagggaaaatctgaaggcactgaagttgctgtcactgaagggaaaaagtctaataggatgttcccaaggaggaggggcagaagatgggcttggagaaatgaggatcatgatgacttccctcctgctctttatgagttgtttccttcagggcttgggagtgcactgatgcaggcaagtaataacatcaacaggctgtttgagaacatgaatctgacaccttggtctctgactagtgggcgtgtgaaagagaaggatgaccattacaaactacggtacgagatgccggggatcgccaaagaggacgtgaagatcaccattgatgatgatggggtgttgacaataaagggagagcacaaggaagagaaagatgatgatgagcaatattggtcatcaagtagctatggatactataacacaagcctgattttgcctgatgatgctaaagctgatgacattaaggcagagttgaaggatggtgtcctaactctaatcattcctaagactcagaacccccaaaaggatgtgaaacaagtcacaatagaatgatgttggagattttttttatttatttataggactatggtgaggctatgaactttgtgactcctgttgtgtgtggtttttggacataatgtaagaaaaccaattaattaaactccgacctgttctgtttt

SEQ ID NO: 96534 - DNA, 1437 bp, Glycine max
  Clone ID: PAT_MRT3847_58182C.1
gtggtaattaggtcaaggaagaaaagagattttaagggtttgaggagtagagaccaggcaagagcaaaatggacttctcaaattacttcaagccaagaagcaacaatccctttgagatatagggtggacaatgaacaaaagcgtgtagttatggcagaagcaagtggagactttgttgatgttctctttagtttcctgaccccttccattgggaactatcatccggcttgggaatcaatttaaccaaccggtacagattggtagcatcaacaatctgtacgagagtgtgcaaaatttgagtcctgatgttttctggaaatgttgctttctccacgcaacccgttagaagcctcttaccagggactaaaagtgaaggtggatgacacagagcccaaaaagtatttcatttgtcacagctgttcaaaaggaagtgatttgttgctgagtagttttgatgggacaaggtgttcctgtagaaaattgatgcaaaagaaaatggagctgctggaagagtccaaggacgaggcttctgtggtcgacggtattttcgtttaaggggatgccatgttcttgatctttgatgacttgacagtgctccgaagctctccaagtgactctgtacaacggtccctccaacttggacacataaacttcagtagcaagctggaagaaaagtttagtgacgttggcccgaacgaggtaatattgctttatatacatttcagggcagcagcccatttcaagaagaccactctaaatggtatgtgtagcaggaaaagataataatgaggggcgtacaatgatttcaaagaaaaaggatatgttcaaacagcaaaagaactgaaactttttgacccaagatgttctgatggagcaaaagaacctggtgtgggatttgtgaagaggccgtgtctatttgttgtgaaggatgatctggaagtgatacaaatgacaactacttctagcattgagtatctgagagatgagaaagtcaaggtgggtgatttggaggagcatttggtggaaatcaggtcaaatgaggtaatgaacctgttgagggcttctttgacatccaatgaagctactttgacacggagcctaggctgcctattgatgaagtggaaatgccaaagatgcattccattatggggtagattgcaacggatgaaaaagatacacaggaagaaaaaagaaaacggagagaattcctgcaatatattatgttgttgctctgtgtgtgataagtgaattcgatggtcatgtaatatttcattctcttgtttctcttgattctacaagtgttattagaatattaggtctctagaattgatctattttggtgttatcatgcacatcagtcgtgttagaacaattatataaacttttagtaagtgtaatatgtgtgtatttaatgctattaatttcatattcatatgc

SEQ ID NO: 96535 - DNA, 420 bp, Glycine max
  Clone ID: PAT_MRT3847_58183C.1
ggcgaaaaggccacacaaaccgaaacagacactcttaggcccctattttgagcctaatgcgggccacacatgcgcccgagtgctcacaagcaaaaggcctgcaaccttattgagaaaaaaccagcttttaaactttccccatcttattactacacaaaactggggaccggggaacggttccatatgtaaaaacccgcctgaaaaaacccagatttgggaaaaaactgacctttttttaaaggacctctgactaaaggttcttccgtcctccggtttgatttccaccaaaaacaaacctgtggagaaggggggggaagacctgccttgacgccttttactcacctgagaaaacaaaatggggctgaacacctcaactcgagggaagaattatgccctcataaaccttacaaaaggatactc

SEQ ID NO: 96536 - DNA, 1050 bp, Glycine max
  Clone ID: PAT_MRT3847_58184C.1
cccacgcgtccgtacggctgcgagaagacgacagaagggtacggctgcgagaagacgacagaagggtacggctgcgagaagacgacagcgggggagggtggtaacagtgtgaaagagagggggtcccaagtggaatttattgtttctacctatcgcatgcatccgttttgttttctttttattttagatgtggtgttgtgaaatctaatggcatgcttagaaatgtacaacaactcagagcacaacaagaacaacaagggtgataatcatcaccatcatcatcaatgcgctccaatgagcccaagaatctctttctcaaatgattttgtggatgtgcaacaagccatgaagctgcaagaacaaagaggtggctcatccagatcagacacgccagtgtcttcagacttcgagttttcagtggcaaactacaccatgatgagtgctgatgagcttttcttcaagggaaggttgatgtcgtccacttatgttaacacggacaacaacaaccagcagagggccaccaccactctcaaggaagagcttcttataaatgatgatgaatatgatcataatttttctctcaggcctcccaagccttcctcaactaggtggaagggacttttgggtcttagaaagtctcacattggctccaagaagcctcacaaaagtactgaagctagttcttcagaagcatcaaggtctgcattcgtcaacgagggacctccaactagtatcactttctcagggggtgttgaatgaaggaagctcaagttgcagagatttggagattggcttataagttatggttggtggtagtgttgaatatttgtagaggaattaatggaccctttttttttctcctctcctttctttctttttgtttttcttgccttgctgatgacaaggtggagggggaaaaaggtcatgctcttttttgtttaattctctcttcttcattggaatgggatgagttaagtaacttaatttgtgacaggaatttgcttgtcaatgtcgattcttcttttcttctctcttctaatttctcttgaa

SEQ ID NO: 96537 - DNA, 254 bp, Glycine max
  Clone ID: PAT_MRT3847_58185C.1
gccaaaacctagtacgagccttagcttacaacccactgaaaccatggacacacgtacaggggaaaccgagctaaacccaagaaggggtcaacaaaccctcaaaaaagaagatgataagctgagagacccgacgcggcaccaaaacaaaccaaggaagaaacagaactacacaaaaaccaatgcagatctaaagctcaaccacatcgaacattgcacgctcgaagcaagcaactagcgactgaacaaaagtaaaa

SEQ ID NO: 96538 - DNA, 342 bp, Glycine max
  Clone ID: PAT_MRT3847_58186C.1
cggctcgagcttccagagtgatcaacataagtgaggacatctttgctggatttaattgtactcttcggggaggtaatgtcactcaccatgagtacattcaggttggaaagggaagggatgttgggttgaatcaagtatcaatgtttgaagcaaaggttgccagtggaaatggggagcaagtcctaagtagagatgtgtacagattgggtcataggctggattttttccggatgctctcattcttctacactactgtggggtccttcttcaacactatggtggtggttctgactgtatatgcatttttatggcgtcgggtattcttgctcttaatggtgtgag

SEQ ID NO: 96539 - DNA, 213 bp, Glycine max
  Clone ID: PAT_MRT3847_58187C.1
ggctcgagtctacatttcagtaacgtactaaaacatcccaatacactttcacttctatattcctacttctcgatctctggtttctcctcttaaacatgaagcttttcgtgtttttacttgcatgggctatggctcttcttgcttcttcctttgattcagctgctgtagtggaacgcactttcaaagttcaaaacaagactatcaaacgcttgt

SEQ ID NO: 96540 - DNA, 330 bp, Glycine max
  Clone ID: PAT_MRT3847_58188C.1
gttggaagcggggttacacgcgcggggggcccctcccccccgatcctctctctcagaacgaaccctttggcttttcccagcggggggcggaagccttttatccccgcgcgggggccccacgtgacacgccccttctcttggagcccccggggggggcccgaccgccgccgggggggcttgttttcttctgcggtctgccggcgccccccccgccttgcttggcgggcgggggggggggttctgctggcgcgccgccccccgcggggggcggcccgcccccgggaagaaccctgcggcgcgggggggggggtttttttttttttttttttt

SEQ ID NO: 96541 - DNA, 956 bp, Glycine max
  Clone ID: PAT_MRT3847_58189C.1
acggctgcagaagacgacagaaggggagatttcgcgaaaaatatcacgtgctgacgacacggtatcgcaagtccacctttcggctaaaggtcaattccaattcccacaatcttaaaccttcaaattcttcacctttccttcacttcagagagcgagtgtgagacagacaacaaaacagaatgggtgtggtggtgatcgacggcagcaccgtgcgcgacttcgtgaacgacgaggcggccttcgcgaagagcgtggacgagcagttcggggtgctggacctcaacaacgacggcgtcctctcgcgctcggagctccgcacggccttcgagtccatgcgcctcatcgagacgcacttcggcatcgacgtcgccacgccgccggatcagctcgcgaagctctacgactccatcttcgacaagttcgacggcgaccggagcggcgccgtcgaccgccgcgagttccgggatgagatgaggaagatcatgctcgccatcgccgacggcctcggctccttccccatccgcatggtcctcgaggatgatcccaatagtcttcttcagaaagctgcagatctcgaagcttccaagacctgaatccaaaacggcgccgttttcggttcggtaaacttaatagtaattgatcgtgctttcgtgagttcactttgttttttttttccttaataaagggtttatgtagagagcgccctgactgtgtttcgaagctgaggatctgttctgtgtgtaatgtatgtgacactgttattattatggagactgttgatcggttatgtaattctaggaataaagattaaagactcataccggttgctgataaaagaaaaaaaagagtttaaaaagttacggttaaagtttgttctttaagtttaattatttatttattctttttaactaatggaattatgagataaaaaaaaaaaaaaaaaaaaaaaccccaaa

SEQ ID NO: 96542 - DNA, 486 bp, Glycine max
  Clone ID: PAT_MRT3847_5818C.1
gattgatcatccttggacaagccctccccaacaagcaaggctaaacaagaaaatggattgtaggaattattcgggtattttataatacattaaaatttgctattcacaaattaagacctgaaaaaagaataaaggaattaatttacagttatcaggttggaggaaagggggagaaaaaacaaaatattatgttgcttatcctaaatagggggaaactgaactttgtctaaataactgtccaatctttccagagagagaggctgctcaccagggtataggtttccaggcttaggaggcttctttgaaaataaaaatgacttgctgtcaaagaaacttgagaaagaaagacgaatctgctttttcttcatcgattacctcatctttcctgacaggcgtcaacagtttatctttgccaccaaagatatggctatatatgttaaaccgatgcttttggttaccagtggaaaaacctgcgctttgggtcat

SEQ ID NO: 96543 - DNA, 259 bp, Glycine max
  Clone ID: PAT_MRT3847_58190C.1
ccaaaatccaaatgctgtttttgacgaatttggggaagttttagttcttgatgtttataactgttagctaagaaattaatgttaatgacccttccaatgaagcctatttttccttggtcatgcaacagtccaacctactctttgggctgatgattattccagctgtcttgctgagttatatatatatatatatatatatatatatatatatatatatatatatatatatatatatatatatatatatatatatatatat

SEQ ID NO: 96544 - DNA, 363 bp, Glycine max
  Clone ID: PAT_MRT3847_58191C.1
caaaccaacccgaaacttgccactctcgatagagggttgacattgaatacaccgctgcatcacgacaccgcaaagtcctgaaactcgctgcgcaaaacaaaaatgcagtcgggggttcctgatgcacacatgacattaccccaccgataaataaaagcagttgagcccccgtcgatcaagaacccagtgctgggaacaacagacgcgagacgatggcggaaacttcctactttgtccgatgaaccagctacctagagaagatgacacactagttcacaaaaggcaccaccatttattgtgaccactatcccctgatgaaccagccacgccgatacactgattcttatgggcagccttggggac

SEQ ID NO: 96545 - DNA, 543 bp, Glycine max
  unsure (1)..(543): unsure at all n locations
  Clone ID: PAT_MRT3847_58192C.1
aattcggcacgaggttgattcaattgaagaagcccacttgtggagtctaattcaacaatattttggcaaaaaatatgactcttacgttcagtcacactccatgatcagtactgaaatttgagaagtacgtcacattgacaatgtacaatagatacctaaatgattaccacggatttttcccctactttcttcctccatcttcttccatcattcacgtcatactagtggattgtttttgcagacttactagaggatggtttggattgcacttatatttgacatttcaaaatctgttggtgccacttttagaatctaatctttcanagcatataatgttctttaaaaaagcaaaagtctaaatttttatattaaaataaataaccattatcaaatgaaagagagttcatcatcatttgcatcccacttactaccttactagacaatctgggatttcattttctaatatttccattcaagtcttatgagtttaattgtggcttatttttaatgttcaatctaagctnttttttttttttttttttt

SEQ ID NO: 96546 - DNA, 1624 bp, Glycine max
  Clone ID: PAT_MRT3847_58193C.1
gtccggctcgctggatcactcaatcctaatattttatattccaattaaaatagtgagagtactagaaggtagtgagatcgcatagggaataatggaaacagaagtggttgaagatattgtgattgtgggagctggaattgctggccttacaacatccttaggacttcacaagttgggtatcagaagtttggtgctagaatcttcagacactttgagggtcactgggtttgctttgtcaatatgggaaaatgcttggaaggcattggatactgttggtgttggagacttcctccgccaccaacatctccagctcaatgggattgtcactacttcattggttacagggcaacaaacatcagatatgcctttcacagaaacaggaaatcagcaaagaaaccgtgaaattcgttgtgttaaaaggaagttactgttggaagctcttgccaatgaacttccaagtgacaccatcagatacttgtcaaaggttgttgctattgaggaatctggcttctacaagattgttcatcttgctgatggcacaaccatcaaaaccaaggtattgatcgggtgtgatggagtgaactccatagtagcaaagtggctaggcttcaagaatgcctcttttacagggagatatgcaattaggggttgtgcagaggttcaaagcaatcacgggttagaacccaggttcatgcagttctttggcaaaggttttagagctggtgttattccttgtgatggaaacgttgtttactggtttttcacttggacacccaacaaccaagacaaagagctagaagagaaccctgccaaactgaaagaacatgtgctaaacaagcttgagaatatgccaagtgatgttagatactacatagaaaaaaccgaaatcgatgccttccaattagctccattgagatatagacacccttgggagctgatgtttgggaatattagtaaaggcaatatttgtgttggtggagatgctttccaccccatgactccagaccttggccagggagggtgctgtgccttagaagatgggattgttttagccaggtgcctagctgcggccttctccaaacatatcaaagagaaggatgaagaggaccaattcaaaaggattgagggaagcttgaagaaatatgcaaaggagagaagatggagaagcattgatgtcattgctacagcttatatggtgggttctattcagcaggctgagtccaaattggttacctttttgagggacaacattttggctgcattcttagctagtcaattgttcaagaagtcgggttatgattgtggaaaactaaatagctcttagtgagacaataaagtaattttatatgtattgctcaaactttggttgctacttactgtcataggtggctaaaaaaagtatggtaagtcttatgattgagatcttaccatattgttttgcttgtctttacatcttaaggttcactgtgaaattgatttgaatggctgtgggtagggtgcgagtaaaatagaaggatgggtgatcagtaaggcaaacaaaaagcaaaagaagcttttcgaaatcccattattctgtttcattttcaaactttcaaagctgatagtcatatgtcattatttattc

SEQ ID NO: 96547 - DNA, 228 bp, Glycine max
  unsure (1)..(228): unsure at all n locations
  Clone ID: PAT_MRT3847_58194C.1
acgggatctcaatactcactatccncccttcttttttttttttttttttttaaatactaaaacttaaatctgccggggattttgtcataatggctgcacttatattaattaaaaatataacaattagttttctaacgtacctaacggaaaatgtgaaaataaaatccttcacttgttaacatataatcttggatatattaattataggttccataaaaaccattttat

SEQ ID NO: 96548 - DNA, 1365 bp, Glycine max
  Clone ID: PAT_MRT3847_58195C.1
aagaaaagcaatgaagtcacgaatgaacccaagctatagcgatccaatgaccctcttgaaatcatcagcgacccggcgcaaagtatggaagggcctccaaaataaatagcttgtataccttgaggaatcaaggctttcatcttttttttctccagccttgcattatagtccatcagagccattctcttaaccttggtattctcacatgactgtgcattgtttgctttcacaaagagaattgttacatgtatctaattgagataactcgagagagcatcaatgctaacatgtgcctctttgcatatcttgcgaagttcttgaccaagaaaggtaacaactagcaccatgcaaggaacaatcatggctgaaatcaaagaaagggtataagactaacatctgcatcatcattgccgacaactgcagagtacttggtactatagtctgccagatgcaaattttgaagagagagaagctaagattctagagagagaagttgcattgctttgcttcccgcgttggtgcattaattttcttatgcgtgcaagtcattcacacaccacaaagctcccacatttgttgataaatagaagctctaattgtcttcaagatcctcactcgtccacctttagcctcactcaagttctttccctttttttagaaagagattcaaagggtgaaaccatcatcggttgttagatcaagctatttattctcttaatcactgtctgggacctcttatcttcttcaatcactttcaaagatcatttgaattgaagaaatggggggccatatgagcaagaagacccctgaaacatcatctggtattaacatcaatgctgatatggcaactgaattgaggtcatatgaggctgcctgcaagcttgactctgatttgcagtcctttaataccaccattcaagctcgagcaaatcaagtcattaatactcttgctgttggagttgaggttcgatccctttcgtttgagtctctcaaacaagtcacagaatgccttctcgagatgaatcaggaagttgtcaaggtgatcttagactgtaagaaagatatatggaagaacccagaactgtttgagcttgttgaggaatactttgataatagcctgcagactctagatttctgtactgcattagagaagtgcctgaagcgagctagggataaccaattgcttattctcatggcccttcagcagtttgaagaggaaaccagcttgggagagacacgctatacgaggacattacaggaactgaagaatttcaaggcagctggtgaccctttcactgaagaattcttccaaatgtatcaatctgtttacaatcaacagatactcatgcttgagaagttgcgagt

SEQ ID NO: 96549 - DNA, 873 bp, Glycine max
  unsure (1)..(873): unsure at all n locations
  Clone ID: PAT_MRT3847_58196C.1
acaggtcttcaaacccacctcttctctcttctttctctcttacttcctcctcaggctttcatacgccatgtttgtcttcaaacccacctcttctcttctctttctcctcctcagtatttcatactctgcttcttcagttacctcactcaccgtaccgccgcgagggggggccccactcgacctcaccactactccgcaacaacaaaccgatggcgatgatgattccctcacctacctctggcccctccccgcagagttcacttccggcggcgacactctctccgttgaccccgcgctcaccctctccgtcgccggaaacggcggtggctccgccattctcagagaggccttcggccgatacagagggatcgtgttcaagaacaccgctggtgtcgggtttagtttcatcagaaagctgagggaacgattggtgtcttctgtttcggcattcgacgttgacactttgaagatcacagtccattcagacaacgaggagcttcaatttggagtggatgaaagctataccttgctggttcccaaagccaaggaatcttcccaagtcacgattgaggcaaatacagtttatggtgcattgcgcggattagagacattcagccagttgtgttctttcgattatacaactaaaacagtaaaaatatacaaggcaccttggtccatccaagataaacctagatttgcatatcgtgggcttatgctggatacatcaaggcactatttacctattgatgtaattaagcagattattgaatctatgtcctatgctaaacttaatgttctacattggcacatcatagatgagccagtcatttctcttgagaacccaatatncaaactgtgggaaaggtcatatac

SEQ ID NO: 96550 - DNA, 284 bp, Glycine max
  unsure (1)..(284): unsure at all n locations
  Clone ID: PAT_MRT3847_58197C.1
tttaanngaatncangcntacgnagctcgcnattcgnntcnannncnnctnaactactangagtactgncnttacnntcnanagnatccagnaactatttcagatttctncaanagnnctagcgatnntcagggtcgcattgtcattcgagtntggcaacnttnngangnaaaccgannantacgggcaaccctgttcntgntgctagtntgcanctatgtagnnaccagaactggctgnctggtggttacagtgatgacattagtaagcaacatgatacnacc

SEQ ID NO: 96551 - DNA, 330 bp, Glycine max
  Clone ID: PAT_MRT3847_58198C.1
cgtaagctagcaatgcggctcgagcaaaaaggctttgagactcacccaccagctgctgtgaacatggcgcatcagtggatgtgaccgtgccatagcctggaaggattgtctgaggccttaagtgtcttaagacagaatgcgtttttactgaccgaactaccctaatgtatgtctagcctagcatccactcttagtggcactggctctcatgcggcgaatttggatgcaagattcactctcaatgttgttgccaatgtcactggctgtggaagacatgaactctggttttcgagcagcatcaaacgagggtgatcatgactactactatac

SEQ ID NO: 96552 - DNA, 653 bp, Glycine max
  unsure (1)..(653): unsure at all n locations
  Clone ID: PAT_MRT3847_58199C.1
aaaaaaaaaaaaaaaaaaaaaaaaagggcggcccggacgcgtgggcggacgcgtgggcggacgcgtgggtggccttttacctcggggctcgtcttaaccgcaatgaaaggaaacgtttatttagcttgatcaatgatcttccatctgtttttgaagttgtgactgacaggaaaccagttaaggacaagccaactgcagatagtggaagcaagtctaggggaagtgccaagagatctagtgatgagcaagttaaaagcaacccaaagtttgtagatgagggttatgaggaggatgaagatgagcataatgaaacactttgtggaagcttgggctgaaattacaatgctgatgagttttggacatgggaaatgtgtaaaaattactcctgcaaaatcttaaagcataaaccaatccaaatgtccttcgtacagcttaaggcggggcagcccctaacccgaaggcaaaatgtgaagtgaataatgctgtttcatggcggacaaaatcctgtaaaattgttatatctctaacaaaagttcttgtaaacggtatagtatctatgtccgatcataatctttcagtttaagctaatttcttccccccaaaaaaaaaaaaaaaaaaaaaaaaaaaaaaaaaaaaaaaaaaaaaataaanaa

SEQ ID NO: 96553 - DNA, 405 bp, Glycine max
  Clone ID: PAT_MRT3847_5819C.1
ggggaaaaacataagggccccccgaacccatctttaagggcccccattttttaatttctaaccgggggattaattcaaggcccaaccccaaaaaaaccccccccttttaaaaaaaggacttggtctttttttaaaaaccccccccattgctaacctcccaattcccggaacgggggaaatcccccacctttcggaaaaaccttgccccaaaaaaccctgcccttgggccccgttctcaaaaaaaaatttttaaggccccctttttttttcactaaaggaaaccttgggtgaaacctatcataaccaaggggcggaaatccccttgccccccccgaattataaaaaaaaaaaacttccccccaaaaatccccccccaaagcaaaaatattcttggggggggaaaaa

SEQ ID NO: 96554 - DNA, 195 bp, Glycine max
  Clone ID: PAT_MRT3847_581C.1
ggccgcccttttttttgtttttaacctttaaatagcttcccaatttctatatttgctcaataaataggggacaaatggggcaactttattctgaattccttgaaactgccgaaatcctttaaaaaaattttaatagtccgggcaaatccttacaggtgcaatttggacccccattttggctggaatttccggctt

SEQ ID NO: 96555 - DNA, 367 bp, Glycine max
  Clone ID: PAT_MRT3847_58200C.1
ccaggcgtcagacagctacaaaagggggacacaaaggggtctcgtggaagtgtaagcaagcaaaaccctaacggcgcctgctttcattgtacgtgttttgcagcaggatggagtcacatgtgaagcacgcacttgttgtcaaagttatgggtcgtactggatgtataagacaagtcgaacaggttagagtgaagtttttggacgatcagaagcctcacatcatgacgaatgtgaaaagacctgtgagagaaggatacattctcatcctacgcgagtctgaaaaggaagcacgaagattgcgctagatggtctctcttttttggcttgcctccaaattcgaacaaaatcaatatttttcttgatattt

SEQ ID NO: 96556 - DNA, 235 bp, Glycine max
  Clone ID: PAT_MRT3847_58201C.1
aaaaaacattgcttctaggtacttggtgtccaaaactcgaggatgtccacagcattattcaacaccagacgaacaatttttttttttttaattaaaaataccaaacacactagttttctttgtaacttcaaccgaacattttaattaaccatctttcataatctttgaccccaagcattcttcctgatttttatacatgctcaatggttctattttttcggttcatgatttattg

SEQ ID NO: 96557 - DNA, 434 bp, Glycine max
  unsure (1)..(434): unsure at all n locations
  Clone ID: PAT_MRT3847_58202C.1
aaaaaaaaagnccnncaaaacttaaacgnannnncnccccnnannnaaaacngaaccangganngnaccnnnnccnggaanaacnaacntcacngnngnncacanattccacgacgggcntaacccccaccgacagcgggctcacgancgncagacgcagcacanncacacnnannacnagtnncacannacacctccnacacncactcaagcacagngcnaaganaantagatnnagctacaaacacncanactcaatgctannnttcaagacgacccaagagcaagtnaaccgantnncncnannaanntnngcgcnccnacanacnggnnnnnaagagcctnagtcnagccnacacancnagaccaaacnanacgcgnnnccnataccnanacnacnnaanganncagacgacangacangncnacacngc

SEQ ID NO: 96558 - DNA, 287 bp, Glycine max
  Clone ID: PAT_MRT3847_58203C.1
agggatagcaaccacagcacgcaatattttcagctgggtcaggttctctctttgtgcgaagattggaaaattgcacatctatgtttcactacttgctgctgcatttgtatttgagataggagtagctgaatgcacataatagaaagtaaacccttttgaaaatggtccggccttttatatgttcccagccttaataccacatcgttcgaatttgataactctttactgggtatgcaaaattcaatttaactgtccggcgttttcaaagtgatgtcttgaaataacct

SEQ ID NO: 96559 - DNA, 436 bp, Glycine max
  Clone ID: PAT_MRT3847_58204C.1
ttgttcttttttttttttttttttttttaaattttttttttttttttttttttttttttttttttttttttttgggccaaaaggaaatggcccccaatgtaaattcagtggaccttttaacttaaaaatgtgggggaacaccaccccatgttaaaaatatgccaaaaacttttcaaaatggggcttttttttttgcgcctaagacattggtaattttaagaatgttacgcccaagatccacaataactttttttgtttgggacagggcaacctttgggaacggaaattttttcttgcccaggttggtttgtcccctagtccatagtgtaaaaaaaatgcccatgcaaaaacccatttgctaagatttaccaaggtgccctgggcaaaattcttttacccccattggaccttcctgacattttattggacttggaaa

SEQ ID NO: 96560 - DNA, 103 bp, Glycine max
  Clone ID: PAT_MRT3847_58205C.1
tgtggatctaacaatattcaagaacgaatagggcggcgctcaatattaaaatagatttggctgacttatgctcttcatcactaccactgaatcaacttcttgc

SEQ ID NO: 96561 - DNA, 510 bp, Glycine max
  Clone ID: PAT_MRT3847_58206C.1
gtgaattattataaaattttgtatcttcaaattagggattaatattagtattggtattcaaattatgaaattacgatagacaagtaggatctgaattaattaattggtacgtgggtatgggttcttcttacttaatcagtcttaatttcattgttggtccaacattatggtttgaacagaattttctcctgtcaaatatgtatatgtttgagaaaccgttaggggtggtcgaaacggcgtttcccaatggatcaagaacctatcttatgtgttcgtccgtttgattggcatggagacgtgtgtcaccgcgcaatggacgtgaactcaaacatactctataaaattcaaatcatgaaattaccatttgaaattatgaatgtaggatatggtttaattttgtgtatactatggaaatactatagaatgatagaaagttatgaatgcaggcatatatagtaggggagcatggggatagttcggtggcgttatggtctagcattagcattgggg

SEQ ID NO: 96562 - DNA, 244 bp, Glycine max
  Clone ID: PAT_MRT3847_58207C.1
tccaccacgccttcggaagaaatgaatataccctaccgacggtggaatcaagaggcggtttctatttctctattgcgggcggtcaccaaaattgaagaccaagagagcgcgagagagaaaaaccttccctttatgtcaatggccccaagcccgggtttttaccaaaattagccaccacccccgatattagaaaagtgaggttatttcccgtcctaattgtaaaaagagggtttgtaattatacc

SEQ ID NO: 96563 - DNA, 425 bp, Glycine max
  unsure (1)..(425): unsure at all n locations
  Clone ID: PAT_MRT3847_58208C.1
aactacaaataatttaagtgaatattaaaaagacctgattaaaattgggtntaaatataccatcgggcgaccgtggatatcatagtatatgtgnggacgacatttctattccaagcaatactgtagaaagtaactctgcactattagggcatggtcttagtcatgtatnacggtccaactagaacctatagtaacaaaagggtacccagaaaatagaccaatttacaggatcctgcaaattctagaatcaatgatattgttgtgtgaatcaatagcattagctagagatagncaagggtgtttncatagagactggggcaagttgttgatgttgtgcgcttgtgcctgtgtgttttgttggacactaagtacttgtggatatgcacctgttggaagagctgctatatgacttgtatgtaggaatg

SEQ ID NO: 96564 - DNA, 1003 bp, Glycine max
  Clone ID: PAT_MRT3847_58209C.1
aattattctacctccaaaattgaagtcattttctgacagccagatatgctgttcatccaaaggagatcttgttttggtgaatggtggccaagaaatttttgtcgtctccctgttggtccaaagaaatattttcaggctttttttttctattagctgcatctacaggaaagaaatgaagctgtcacaagaagagcttgtccctagcccagtcatccataaggaaaagaaaaagggtatattcagctctgttatcaaagattttactggcagtaaagaaaagcatgctcccattttggaaacagaagatactaaagaaagcatcctggaactctcagctatcttctcaaatgaaaattttccatgtgatgctgataataatgataatctgactgttgatgaagatgagattgaattaaacatagatgacattgacctagatgatcatgaagaaaaacgcaaagatcaaagtatattgggagctcttaataagaagaaattgactggaaagtttcaggctctaaaaggtagattgaaggagatgaagggcaacatccagaaaacatcaagtaaggaagagcagcaagatgagcaagctggtgcagtcgatcaaatcaagaagaaatatggattttcttcttccaacgaaacaagctttgctaaattggcagaaagcaagctgcaggagaacatgaaaaaattgcagggtatcaaccttcgaaccacagaaatgcaagataaagcaaaatcattttcaacattggcaaaccaagtgctgcggactgcagaacaggaaagacgaaattaggaagcacctactcatcgattacaccaaaaattacaatgactttttacccctcctattgtacttaagcttctttattttattgtatttatttttttgtttcaccgtggaagactggattatcatctcagttttgggttgatctttacatcgagtgaatataaattaagaacaatgtattctcttttttgccaattgcat

SEQ ID NO: 96565 - DNA, 259 bp, Glycine max
  unsure (1)..(259): unsure at all n locations
  Clone ID: PAT_MRT3847_5820C.1
gtcgcangcacgcgtacgtaagctcggaattcggctcgagntttgaagttattttatgtatgaagagatttattcataaaaaaaaaaaaaaaangnggggccnccgattantganctcgtcgnccngggaattanttccggncnggnacctgnngggcnnccagttttcccnanagggnntcgtnttanngctnggggnaatcagggccanagntnttnccngngnnaaattnttancccccnaaaatnccncnnaana

SEQ ID NO: 96566 - DNA, 455 bp, Glycine max
  Clone ID: PAT_MRT3847_58210C.1
gagccttgggtatttagctgccaatgctgtcccaccacaagtccacttgtcctcccaaaatttaatttgatcaccgcatcccaacttccactccaagccgttgtgaaaagccagctcttgttgtgggtgatggagtgccaatttcagatcccttccaccaaaaagaatcattagaacctctagattcttcatctaagctcctccaacctccatactttgattccagtactttagcccaaagatctttgtggttttggaataagctccatctccattttcccagcaaagcaaggttaaagctgttgacatccttgattcctagcccccctctttcttttgggaggcacatcgtctcccatttgacccatgaaatcttagattggtcatggctgcctccccaaaggaattttctttggataccctgaagtttttttatcacctttgtaggaaccctg

SEQ ID NO: 96567 - DNA, 606 bp, Glycine max
  Clone ID: PAT_MRT3847_58211C.1
ttctgatttggttgtgacgtgtctcgattgattgatcaagcggtgtgttcacgtggtttctttgcatatacggttttgtgcatggttgtggttgttgctgatccttatttcactacatctttggctatatatgacttgtttttggttttgattgtgatatttgtgcattaaggatctaattttttgttttgctgttatcacacttgatgaaaggtgatggacgattcaagtcctgaaagatcttagttgtgcttccccatcacaaaatagagagtcacatgaatattgatctgaagcccatcaaacttatctgaaaatttgtatcttcacctttttttttatttgctctttgctattctcttgattttccacctttattttatttattatgaatgtggaaggatcttttgccacctttaattgcttctgcttaccatatattgcagaacttttgttctagacaagatactattttctgtggagtttttgatggccacggtccatatggtcacatggttgcgaaaagagtgagggattctcttcctctaaaactgaatgtccattgggaacaaagtgcatctggtgaagaagtcctcaaggagatta

SEQ ID NO: 96568 - DNA, 429 bp, Glycine max
  unsure (1)..(429): unsure at all n locations
  Clone ID: PAT_MRT3847_58212C.1
tctaaggtttcttattctttctncaaattacctttcattgagctcagtgtcatgagttcacctaatgaataaataatgtaacctattacatatgcggaaaatgacatccataccatatcgaataaatgactaaaaataatttctccataaagtataacgactaaattaaataatatacagctatcagatacattttaacatttcatgtaaatatacagactaaaaatacatatttgactttcaattaatttacaatacttaagattctctttatgaaaattaaactcatagtcaattaaccacaatttatcatgtacaataaatttattaactcttccaataattattttaaaaattatataaataattatttgttatctgatgaaattatatgatgatgttactacataggcattaaacatatgattt

SEQ ID NO: 96569 - DNA, 1382 bp, Glycine max
  Clone ID: PAT_MRT3847_58213C.1
accatatttcgtgtgaccatatttgctatggctccaatgcttcatatatttaaatgaaggaattgagttcgaaagtggttgtcttctgaagagaatttttttttttttttatcattcatgggtttttttgtagcacatgtagtgcaaggatcagcactagcccttcttggattatggcacaccatccacaccatcagatcttacctggtgaagggccctgccaacttcactgtaagattctggtaccagtttaacactacccctcagtctagacttaaacacttagaacttgtttctattttatccttttccatccttgcatttttcgatcaaattctagacttccctcatttccactatgcctttaagcttgacaactttgagcatgcaactatgttcatacaccttgctttgtttgctggtttctccctctccactgagttgactgattcacttgacctcttctccggctttgttgggatacttgcatcctcggtgtttagtcaagaactattccttctccattttcactccacagaccatgttggacttgaaggccattaccactggctgctgcagctcatagtgcttgtctcactagtatcatctttggctgcaactatttttcctaacaatttcaacgcggctctcgtgctttctatttcactcatcttccaaggatgttggtttataaacatggggtttatgctatggattccatcttttgtccctgaagggtgtgcggtgaatttggccaagccaagtggccatgaaatcattggagcagtgacttgtagttccaaagaggctgatttcagggccaggggattggccaatttgcaattcagttggatcctttcttcaattctgatatttgcaggaatcatttgcttgaaactttctaggaaatgtacaattacaacaaaccggttggagtatgagagaattcaaactaaaggtgcaacagactcagctttggccaatgaaggtttcaagcaggccatataatctactagcacagtttgttaaacaggtctgttgcttgcacttttaaggtctcaagtgtacatgagacctgagttatgcaaatgaaataagctacagtgtattttattatataccaagtttaaatatagatgtccaacaatctgttaggttttataacctgtcaggaaatccttagctagctatataatgttggtagagttcaaaactatcaagttactaaatgtaagaagcataacatctccagatcttgattgcttcatgaattcccttaaatttcaaacaacattctgctggtattggacttgtaaattataaggatgtttctgcgtatcaattgagagtttagttttgttggtttcattgatgaccctaaa

SEQ ID NO: 96570 - DNA, 451 bp, Glycine max
  Clone ID: PAT_MRT3847_58214C.1
gaaggtttcccgtcatcactgtatgacgtcctccttctttgggggggggggggggcgagcagaataagtgttggaaggcaataccccacccaacaaacaggaacagaaacacaaatgcggaaaagagcgtttgaaagcgcagcatcaatggagtaacgaagatcggctaaagaggagcgggctcgaaagatgaattacgaattaccttatagagagaagaacagcgatttgaaataacagagtaggtagggtgacacaccagaagagtaattatgaccaaggatgccatacaggaaagacggattaatgatgatttgtgcggttgttatagttatgcttaggattacacctacgcgtaggtggcttttagttgcacggtgtagggttgcatttactagggttcaagttttaatgcattagggttgcgctgtgtgggcgttggcggttgggt

SEQ ID NO: 96571 - DNA, 199 bp, Glycine max
  Clone ID: PAT_MRT3847_58215C.1
cccacgcgtccgcccacgcgtccgtccaattaaggcacttgcaaatggcttcggtggctaactccaccaactctttttgttcacaaagcctcgcccttcctcaaaaaattcgcatttctgcccatggaaaggaagaccagcagcaaaagcggtagcaattccctcccagcggacccgtcgaagacggagcgtataaaat

SEQ ID NO: 96572 - DNA, 427 bp, Glycine max
  Clone ID: PAT_MRT3847_58216C.1
gcgctcaggaaattcctgctcttaccaggcctcagggggctgtcacgcactgaggcagaactggtactgctgtagccgccatctaatgtgatcaaacaacggggcactgccttggtgactgatgaacaactagaatgagagatgcttgctggcgagaatgcatgcctaattgagcgcctgaaggatatccctacaatgagcatgctcctgcccacagagtatactgttcaaacaaggtcactcgccccatggcacttagagagcaagcttgcaggcctctatgtggaacatgcactgacaggggccataacggtcatgtgtggaacaccatgatggattcatcgaatatactgggaagactgctgacctgacgactcgaaagtcttatgccacatgggccatcctttgctctaaagacgatggcccc

SEQ ID NO: 96573 - DNA, 265 bp, Glycine max
  Clone ID: PAT_MRT3847_58217C.1
tttttactataacaatcaataacagggtcaggggcatgtttgcaagccaagtacatcagcgtgtgtataaaaatccaaaaacttgatcccccttcacaagagaaaacatcaatagtccaaaaaagagctaatgcttcttcaacaagtaacaccactggttatagaaaccgatttattcataccttttactttttgcttcgagcaagacactaaatctcagttaatcatattcatactgttatgatgtgtagacaagcttcttaga

SEQ ID NO: 96574 - DNA, 642 bp, Glycine max
  unsure (1)..(642): unsure at all n locations
  Clone ID: PAT_MRT3847_58218C.1
ccggaataaacgcgtcgacccacgcgtccgtctagatcgcgatctanaactagtggggcatgtgtttcttgttctttgaaactttttctacaatctgccaaagcttttggagtttggattctcttgaaccatggctaacaatacaggacacttgaggattcatgacagtgtggatgagcttacgactgatttggcagactatgttgctgagttatcagaggcatctgtgaaagaacgaggagtctttgccattgctttatctgaaaactctgtgaagctccttataacaagacagtggactggtccaagtggtatatcttctgggctgatgagcgtgttgtggcgaaaaaccatgccgatagcaattataatcttgctaaagatggccttttgtccaagttgatggactatcccctttttgtcttcaagtatgattacttacactagaaaactagaatgtgactatcacgcacgaaaaaggacgtgcctattatccccagtcatgtgcattctattaacgattccgtgtcagcataagaagctgccgatgattacgagtttgtcattcgacagttagtgaaaacccgtgttgtcagcgtgtctgagattagtgactgtccaaagtttgacctcattctgctc

SEQ ID NO: 96575 - DNA, 1440 bp, Glycine max
  unsure (1)..(1440): unsure at all n locations
  Clone ID: PAT_MRT3847_58219C.1
ccacgcgtccggggagcctctgattaaatgttttgatttgatgtgtaaaaataattctccttttctatctctccatgtctgtcttataatattccacgagattatttaatattcatttgtattcttctgcgagaagacgacagaagggggtcagcttcttctgtgtgccaccccctctttaattttttttttctttagcttttggagtttggattctcttgaaccatggctaagaatagaggagagttgaggattcatgagagtgtggatgagcttaggactgatttggcagactatgttgctgagttatcagaggcatctgtgaaagagcgaggagtctttgccattgctttatctggtggttctctcattggcttaatgggaaaactctgtgaagctccttataacaagacagtggactggtccaagtggtatatcttctgggctgacgagcacgttgtggcgaaaaaccatgccgatagcaattataagcttgctaaagatggccttttgtccaaggtgcctattgtccctagtcatgtgcattcgattaacgattccgtgtcagcagaagaagctgccgatgattacgagtttgtcattcgacagctggtgaaaacccgtgttgtcagcgtgtctgagattagtgattgtccaaagtttgacctcattctgcttggattgggtccagacggccacattgcctctttgtttcctaaccactcagcactcaatgaaagggaagaatgggtaactttcattactgacttccccaaacccccacctgagagaatcacattcaccttgcctgtcatcaattctgcatccaatgttgcagtagttgtcaccggtgaaagcaaagcggaatccgtacacttggcaataggcgatgttggacctgatggccccttaataccggcgagaatggtccaaccagctatggggaagttggtgtggtttttggataaactggctgcctcaaaacttgaagattccaatttaaacaagtaggacttgttgtaagtttgtatgtagtgttaagggatttcacaagtgttgaccatccttagaatcctgcctatttcttttgtcttggatagaaagtcttttttttttttttttttttttccatttcttgctttctcctaggaggttgtttggagaaattgtggtatagtttttgtaaccggccaataaaagttgtggagagcatcattccaagttccaacacccttgtctccttctaatttttaattgggttattggctatgatgatggtctcacctgtttgcaatttagaaagtgaaatcaggttcatgtaattccaagagttcactttcccacaaaaaaaaaaaaaaaaaaaaaaaaaaaaaaaaaaaaaaaaaaaaaaaagagagcactttcccnaaaaaaaaaaaaaaaaaaaaaaaaaaaaaaaaa

SEQ ID NO: 96576 - DNA, 625 bp, Glycine max
  Clone ID: PAT_MRT3847_5821C.1
agtgtcgattttattatttttattttgattttaatacaaatgtactagctagaaaggtttattgaatatgcctattgactattgccgaatgagaaaagacgagaaaaaataatttttaagccacgaaaataaacacaggagtcccaattggggaataggcagggtatttaaaaaaagaacatggggatcaccctgtagtgatatgcaacggggaaaaaaacattctaatgcaatgaaacattccgcaaaaaagccccgggggtaaccgggcgcgggggtggatcctggaaaaaattatcggcccctgcaaatgtaccaaaaaatcctatctaaagaaaaaatagaaaaagccgggggcaaaaaaagagcaggttactgtgtgtaaatggagtggggtccccggcccaatcaacaaaaaaaaaaccggcttaaaaagttgagtaaagggtgggggacgaccgagggaaaacccttttattttattgggcgcactggcggctttcttataaagaaaaaaaaccggccacatgtattatggaaataaacccccgcccccgggagagggaggaggagttttgaaagcccgccttgcccttttttttaaaaacccgaggggaagggggaa

SEQ ID NO: 96577 - DNA, 261 bp, Glycine max
  Clone ID: PAT_MRT3847_58220C.1
atcaaaatacaaaaaaacctggcttattctattatgatacagactaaattatcagctcaaactgctgcatgaaactaaatataacatatcgacccactcacacctacgtttaacacgaaaaccaccaaactccccatataaaaacttctaatctccattgcaacaaccacctaccggaaaaacgccaacacatactgctttctcaaccgcatacaaataggacctatcaaaattaaatactcttccctacaagcacaaaaa

SEQ ID NO: 96578 - DNA, 450 bp, Glycine max
  Clone ID: PAT_MRT3847_58221C.1
ctttgttagttattagactaggataacaaaacttgtttacaactcaaactctcttaccgttattatgtccaactctattacccatcttcaaaaccaatttgagaaccaagaccttgatacttatggctcttctatgaggcacaacaatgcatcatttcctgaggcatcattgggagcatttcctactagcattggagtagttgctgagggctctgagataagccacacaaggcatttgatggatcttcttggagcagcagcaaatgagagaaatcaccaccaaactgctcaagggctttctctttctttaggctctcacatgcttgttccttctgatgaatacaggcatcaccaaagacccttaaaccctggtctcatcaaccccaattacttcatgtctggacaagagccacgtgaggcttgtaacaacccacctgtggaacagcagca

SEQ ID NO: 96579 - DNA, 424 bp, Glycine max
  Clone ID: PAT_MRT3847_58222C.1
gggtcgaggtttctggctaagcctccaaatttaaaaaatcttgaagcgaagacgatgcacatgagcttctactggagcagaaaggtgaactctcctaatcgattggtggaagagcacctactgtacgtactatccactcactgtggtctcacgccccttcactagctgctgactgcagactcttgggaatcgtcggatccgcctcaagctaatcacgtgggtatagccctggccggatgagatctaagcccgtattgtgactcggatgctcgcctgaaaaccgtgtaatgtgggcgggaatgtctgcggagcgagtctcttatggctgagctgcgcagtcggatactcgtagatgtagtgggtgatgttcttgaactgaagggtgttatagggcatggtgagggcattcgctgtgggctacttc

SEQ ID NO: 96580 - DNA, 555 bp, Glycine max
  Clone ID: PAT_MRT3847_58223C.1
acaaaaacaaaaataaatatatacaaatttaattgccccaaaaactccaaaacaaaaaaaaaactaatgaaaatgaccttactgattaccattttctttgtttttttcccaaagggaacaataaatgtagttccctttacaaaatctccaaaatgaactatgcagctgttgctgtgaaaactctattgtaccaaatagaatgaagtatcatgtggaatatatcatacttgacagggctcttgttgtgccaaaggaaatgctgctgcacctttctcaccatcatctgcatttgaagatacctcttttgagggatggaaaggagtatattcttcagatttggaatatccttctccaagacaaaaacagcaaaggattcccaattcaacatctcaaaaaatggaggcacaaagttatccgataaaataactgggacacattcatataagatggcctccacaactcttggactattgacttcatagccctttgcgcaaatacagtacttgctgctcttcatgtactggatgtagttcctgttgcccttagactttggca

SEQ ID NO: 96581 - DNA, 142 bp, Glycine max
  Clone ID: PAT_MRT3847_58224C.1
gaggagagcacgggttcctttactgtggtggggagttgtattactgggtcaagttgatgtttcatttggaattgcttattgggaaaaataaaaccccgcacacaacaattgtgttcatagttgcaatagggatagagagtca

SEQ ID NO: 96582 - DNA, 229 bp, Glycine max
  Clone ID: PAT_MRT3847_58225C.1
agggaagtctcactaggacgagagtcatcatcaggggatgagaatgccgtgaacttgaaggtcatactgcagattgcaatcatcgtggacgtcaaatcctgagatctgataggctacagtctccttttgactacatagatgttgctaaggtggtgaaaccagggaattagaaactggttagaccatgtccgaagcgtgcttttaatgctagtgaaagtgcagcgacatt

SEQ ID NO: 96583 - DNA, 372 bp, Glycine max
  unsure (1)..(372): unsure at all n locations
  Clone ID: PAT_MRT3847_58226C.1
tcgaccatctcactagtacatgcggccgcgcctgcatggatttgagccatatgatgaatttacaccctataaagggttacagaagctataaaaaaaggcactgggacaaaccccaccccctaaatttttttttaaaaataatccctgaatgacctaaaaaccttggggctgttcccccccccaaatgcgggggaaggaatttaaaaggccttgtttcaaacatttatttttttaaaaaaaaatgcatgggggaaattacatgtaaattttcccgaactaaattttttttttaaaattgggggaattaaatttgttccccacatttgttccttgaaacactgggtttaatgnactaccactgccttaggagga

SEQ ID NO: 96584 - DNA, 693 bp, Glycine max
  Clone ID: PAT_MRT3847_58227C.1
aattcggctcgagctcgagccgaatcggctcgaggaggaattgaacctgacaacttcacctacccgtttgtgctcaaggcatgctctctattagttgctctcaaggaaggagtgcaaattcatgctcatgtttttaaggctggtcttgaggttgatgtctttgtgcaaaatggcttgattagcatgtatggcaagtgtggggcaatagagcatgctggtgttgtgtttgagcaaatggatgaaaagagtgtggcttcgtggagttccatcattggtgctcatgctagtgtggagatgtggcatgagtgcttgatgcttcttggggacatgagcggcgagggacgccatagggctgaagagagcattctggttagtgcactttctgcttgcactcatttggggtctcctaatcttggaaggtgcatacatgggatcttgttgaggaacatcagtgaactcaatgttgttgtgaagacttcattaattgatatgtatgtcaagtgtgggagccttgagaaagggctttgtgtgttccaaaatatggctcagaagaatagatattcttacactgtaatccttccggggcctgccattcatgggcgcggtagggaagctctaagagttttctctgacatgctggaggaaggtttgacaccagatgatgttgtctatgtgggtgtgttaagtgcttgc

SEQ ID NO: 96585 - DNA, 1051 bp, Glycine max
  Clone ID: PAT_MRT3847_58228C.1
gttggctcaggaagattcctttcaaggatatcttatcctctcgtacacattggacacgtccaaggtccaacttgcatgcttgacaacgcatgctggcgtggatcctaaaatgaaagcttcaaaaatcttatgcatgttcttgttcgtacatacgttacagctgtattgaactaattgtgatgccctccttcctctttctctcaacaacttgatgggttttttgatctctgattggcacacatttcaattttcctcgtggcttggttggttgctctaaattaaaattaagcccctggtgtgtcttttttttttttagctttatgggtaagagtggagtaatacttgtgtatggcacataataggaatgccaggccactttaaactactccttaggtgtgtgccaatgaatcatttgggtatcttgcatggcttgttttgaagcctatccataaaggagcagtgcctagcttcaactttgtttcttgttctttatatttggttgttattctattgcacttcacctagatctttggatggatacttgatgatcttgtagattgctttttagatggtcaccatggtcctaaggtttggaatgcaggccaagttgtctcaaatggctttccttttggccttgtttttgttgattcttcagatatcagatcatgttatatccagttacgttttgtgttctagtccaggtttgttaaacctagaactagaagattgtagagaaggtttattcgtgttttttatgcttgttttatgggtgaagttagcaggaaactatacaacttgtagtgtggaatcatcttggacagaaaataggttaaagtggggtgtacaaggaaagccatgggagacactggtgtaaaaaactagattgcatggtttttattttggtgaaaaggagcaaaggggaatcaagaagtacttaagcaaaagtctttaagggatatctcatggtaaataatattcttgaagctttaatttttaatcgaattgaatggtctcatgtgatctatatgtagcccactttgtctgataaact

SEQ ID NO: 96586 - DNA, 338 bp, Glycine max
  Clone ID: PAT_MRT3847_58229C.1
aatgtcttgaaatattcgttcgctatatgctattacctctactattctcccaagcgtaacttcataagtatctatatggacgtgtggacaggttatggagatgaacatcaacccacactatgtgtatcgaatgactatacttggggctatctctctgctagctcctagagatgggccctgaaaccactcgttcaaacttgctaccagtggtcgacgctgcatcaaaagacacgtactttgtattaccttttgaaagccgaggacatgccatgatttgcatacaggtgctttaagtgcctaaaagctgccgttgactcccttttaaagagcccaacatc

SEQ ID NO: 96587 - DNA, 497 bp, Glycine max
  Clone ID: PAT_MRT3847_5822C.1
aaaatctgaaagtgcgtgcgtgcatgtagccgtaaaaaaaaaaaaaaaaaaaaaaaaaaaaaaaaaaaaaaaaaaaaaaaaaaaaaaaaaaaaaaaaaaaaaaaaaaaaaaaaaaaaaaaaaaaaaaaaaaaaaaaaaaaggcaaaaaaaaataaaaaaaggggggcggactttaaaaaacataaaattttcatagctgttgtataaaggcaaaaaattttaataaaggtgaccaaaaataaacaacggggcgactggtaaaaacctggggaaaggaaaaaaaatggggttgcacaaaataaaacttttggaaaaaaaccccctattgaagagggggggaaaagaaaaaaaagccaacagaaacgcaccctcaaaaaagaatggaacccgaaatgtaaaagggcaccaccctcggcgggggtaattaatacgcggagtgtgagggttacactcagaagaaacctaaaaccttctcaattcactaaccccccttcctt

SEQ ID NO: 96588 - DNA, 258 bp, Glycine max
  Clone ID: PAT_MRT3847_58230C.1
aactttttatactaaatttctgtagaagcttgttgggtttgccttcaccagaaggtactttaaatacctaccatagctgatttgttataaagaaacaaaatgggtgttcttctgtttccttttgattatgtttactgtaattatttcattttggatttatacatttacaattgaataaggattataggttgataagctgtttattgtgaaaagatgtgttttgttacaaatacttgttttaaaaattaataagccccc

SEQ ID NO: 96589 - DNA, 346 bp, Glycine max
  Clone ID: PAT_MRT3847_58231C.1
gaaggggacttcaactcccacacattccaatctctctctgcattgcgctaactctcccttcgacatgcagatcctcctcaataccgtcaccggcacgatgatcagccttgcagtggagagctctgacacgatcgacaacttcatggctaagatccacaacagtgcaagaatccccccggaccagcaccgtctcattttcgccgcaacacaacttgaggacggccgtgcccttgctgactacagcattcacaacgacagtattcttcaactcgtcctccgtctccctgctggcatgcagctcttccttaagatactcaccggcaagaccatgtccctagatgttcca

SEQ ID NO: 96590 - DNA, 217 bp, Glycine max
  Clone ID: PAT_MRT3847_58232C.1
gttttaagccatagtgaattagcaagttatctgaaattgcaggatctggtcccataggtgcatcatcaaacttgcttccctcaggctatctgaggcagtgtggctgttttctgccctgcctagatgaccagatgaaccacttttgacaacactgttttcattagtttaaagtttaatgttgtcttttttctatagaaacaatgtatgatgactataa

SEQ ID NO: 96591 - DNA, 233 bp, Glycine max
  Clone ID: PAT_MRT3847_58233C.1
acggttatgatgactaagaaagactgatgtgaccgcagtggactgatatttaaaacaaatgatatatctgtggtcacatcattttgggaaatgcacgatgtaaagaaggggagatatctactttgacgttgctgttgcggccactctccgtggtgacacacatagcaccaggaagagagagtaataaaaaggtgatgaaggaaactgtggccttcaaatgatggtcgtcgtgt

SEQ ID NO: 96592 - DNA, 195 bp, Glycine max
  Clone ID: PAT_MRT3847_58234C.1
gggcaatgtaacctctctttctctgtgtcggtcctttcattgcggcgttttttgccttccaggcagcaccttctacaaaattagggttttttgaattctggatgactgatctccaaaaaaaattggtgctgtacctctggattaatgaagccgtatccaggctgttggttttcatacccaatcaattcttgaaca

SEQ ID NO: 96593 - DNA, 211 bp, Glycine max
  Clone ID: PAT_MRT3847_58235C.1
ggggccgtcccccactaagctgttcaccaactcgttcgcaagcagagaaatgatgatactgacggtatgactcgatgctgttggtccgacaaccatgctgtacaagctcaagctaggagacatggtgaccaccatcgccaccagggtatttaatgtccagactggggagagcaaaaacatgagctcaactgagtgggatggtgctggagac

SEQ ID NO: 96594 - DNA, 196 bp, Glycine max
  unsure (1)..(196): unsure at all n locations
  Clone ID: PAT_MRT3847_58236C.1
ttataggaaatgttttgatgaaaatgtgagtgatgaagtagttggatatgtaaaaattatttatggaggttatgtaaatggaggaaattgtaaagaattggtgggagagagngatgttgatggatttttggatggaggagaatgtgtgaagaatttttttttgtaaatnataaaagatganattgtgaagaataat

SEQ ID NO: 96595 - DNA, 626 bp, Glycine max
  Clone ID: PAT_MRT3847_58237C.1
tcctccggaagtcggcatgccagacaatttgacaccacggcaagtgtagcgtctcgttcgaccagacaaatgaaatgactcatgccagattaggtcctgaagcaggtgcccgagagacatctgaaatgactgataccacattaagtttcggagacgatggcctccagaccaatgaaggggctgagaccatcattacttgctgcaggagaggttggtcgagacacaaatgaaccggctgatacgcatcctagaatgccaggtgaggcttgctatgcatagacacattgaggactatggcctatgagctgttcgcgctgataatgattatgttaagtgcaatgatgtccactgctctccatatgcaacggcagctatttgcatgagaggatgtcgctttccatcctcggttgagaggttgcctgagttgctgcctcgcgtgaatgatctagatccgccctacatgtcatgactgctgctctatgtcatgaagaacatctctatgtgtgagaggattgtcttctcacgagtatggatgatggacagtaatacgtacgacactgtgcctgagagacaaggttatgagtcatttgtaaattatcttctgtgccgattttttgttttaaaaa

SEQ ID NO: 96596 - DNA, 467 bp, Glycine max
  Clone ID: PAT_MRT3847_58238C.1
atttttactctctttctttccacttcacaataaatacatgaataaattatttaaatattatgagacaagttagatataattgataaaataataactaaggtgaacttgaacttttcaagaagccacaaattctccaaaaatccaacaattaaaaaggagcaaaaaaggagcacacgtagtaataatttttgataattttgatgaattggataattaagttttatacttcatttgttcctaattattagtcaatttcaactaatttatgtcccttaagaaaaataggtgatttaattaatcatattaaatatgttaattatttatattattattttaaaatcattcttttttatctttttacccacttaattgtttttcattaatatttgaaaatacaataattaactaagggtatgaaagaaaaaaatcattaatatatttaataattaaaaaagagtcttataaaa

SEQ ID NO: 96597 - DNA, 214 bp, Glycine max
  Clone ID: PAT_MRT3847_58239C.1
acccactgcgactaactgtccccttaaacacatagagacagtctgcatcttcaactgcatgccacctgaggctacatgtatcacgcatgatcctctgcttgtgtatgaacaaatagtcatcaactggcagaatttttctgcttatcagtaactgcctcaagtcactgactgtgcttgcatctctaatctacagtgggatggtggcaccattaaa

SEQ ID NO: 96598 - DNA, 609 bp, Glycine max
  Clone ID: PAT_MRT3847_5823C.1
ggctcgagagaaagtttctttgcctgttgggtcctgcaatttggctctgcctctatgggaacaaggaatcgacaaggtgtacgacacgtggaacctggaacaaagcgttaaaagcgaagcgcgatcaaaacgtgagggcctatgcaacagtgctccactcctcagaaggctacgtgtgcggcgcaataacgctagcacaaaccctgctccaaaccggaaccaagcgtgacctaatcctcctcctggacacctccatctccgtcgcgaaacgccgctccctcgaactctccggctggaagatccgactcataacccggatccgaaatccgcgggccgagaatggcacctacaacgagtacaactacagcaagttccgactctggcagctcacggattatgagagagtgatcttcattgatgctgacatcatcgtcctccgcaaccttgatattctcttccacttcccacagatgtccgctactggtaacgaccagtccatcttcaactccggcatcatggtactcgagccctccaactgcacattccacgttctcatgtcgcgccgccacgatgtcatctcctacaacggtggcgaccaggggttcctgg

SEQ ID NO: 96599 - DNA, 113 bp, Glycine max
  Clone ID: PAT_MRT3847_58240C.1
tggaatttgaatacaaatggcgaacatatttgattgctgctgcattgcaaggtaatgtacagaacctgacaatccaacagcaatatttggatttctcccatattcacatgctt

SEQ ID NO: 96600 - DNA, 277 bp, Glycine max
  Clone ID: PAT_MRT3847_58241C.1
ttttacaaaatgtttccctaccacacatatacatcctcactccaatttaaataaacccaacaattttctcaaatacattattacatctcttaataaccaccaattttttttcaacctttttcatcttttacctcttctcaccaattctataccttattacatattaaccatttacaccacataccatattaattctatctttataaaaaaaattactattctcaattccccttatccccaaataaaatatatcataaaccatcttcctccccttttt

SEQ ID NO: 96601 - DNA, 212 bp, Glycine max
  Clone ID: PAT_MRT3847_58242C.1
ctcacacatcatgggtttcataaataaactttgaaatccattacagttatgagcacatgcaaaaagtttggaggagcttgaagtttactttactcaatatctcttagtgttatacagtgattatgtagataaaccgtgacaattcaacgaacaagttccaaataaaatatactaaataataattaattattatataaatatttataactaat

SEQ ID NO: 96602 - DNA, 191 bp, Glycine max
  Clone ID: PAT_MRT3847_58243C.1
gaaggattggtgctccaaattccatgttgcagaagcggcagtagagaaagtcattgaagaacggttcaagaaaaactaccaccctgcttgggctgctgcttacattcttgaccctctttatttggttagggacacgagtggcaagtaccttccaccgtttaattacttgacgccggaacaggagaaagacg

SEQ ID NO: 96603 - DNA, 1993 bp, Glycine max
  Clone ID: PAT_MRT3847_58244C.1
ggctcgagaacactcactcattgaggctcacacataatggaagaagcctggttcataatcctagtctctctctgtgtctgcgttctcataagagtcatattattattcttccttcacaaaaaaaccctagccaccccaccaggccctcctcacatcccaatcatcacaagctttctatggctcaaaaaatccttcatagaactcgagccattcctccgaaccctcgccgccaaacacggtcctatcttcactctccgcataggatcacgccccgtcatattcatcgccaacagagccctggcccaccaagccctaatccaaaacggttccattttctccgatcgccccaaggccctccccgccgccaaaatcgtcagcagcaaccaacacaacatcaactccgccccctacggcgccacctggcgcgccctacgccgcaacctcacctccgagatgctccacccctcacgcgtcatgtccttctccggtacccgcaagtgggtcctacacaccctcctcacgcgcctcaaatcagattcacaatccaacgattcaataaaagtcattaaccacttccaatactccatgttctgcttgcttgtgtttatgtgcttcggggaaagactcgacgatgggaaagtcagagacatcgagcgcgtgcagcgacaaatgctcctgcggtttagaaggttcaatgtcctcaatttctggcccagagtcacgcgcgttttgttcttcaaactatgggaggagttgctgagggttaggaaggagcaagaggacgtgttggttccgcttatcagagccaggaagcaaaggcgaggcactgaaggtggcggattaagagacgatgatggcttcgttgtttcctatgttgacacgttgttggatttggaattgcctgaggagaaacggaagctgaatgaagaggaactcgtgacgttgtgtagcgagtttttgaatgcgggtacggacacgacttcgacggcgttgcagtggataatggctaatttggtgaagtacccgcacgtgcaagagagggtggtggaggagattaaggaggtggttggtgagagagtgagagaagagagggaggtgaaagaagaagatttgcagaaactaccttatctgaaagctgtgattttggaagggttgaggcgtcacccacctggccactttgttttgccgcatgctgtcaccgaggacgtggtttttaatgattatttggttcctaagaatgggacagtgaatttcatggtggcggagatagggtgggaccctaaggtttgggaagatccaatggcgtttaagccagagaggtttatgaatgatgaagggtttgattttgatataactgggagtaaagagattaagatgatgccctttggtgcagggagaagaatttgccctggctataacttggctttgcttcatttggaatacttcgtggctaatttggtttggaattttgagtggaaggttcctgagggaggggatgtggatttttcggagaaacaggagtttactgttgtcatgaaaaatgcattgcaggttcagctttctcctaggatatgatctagactctgtacccccatttcatttgtctaataacttgccttcaatgataggttgaaaaatcattttctttaaaattattattataagattttctttaatgaggacctagtaggctatatagtacgtacacatcacgtggtattgagagaatttgtggctcttatccagtaagactttaccactgagatatcacgacagaggaaggttgtgtatagcaatagcatagtgtgagatttgtgcttagtgtttactgtttgagaagttatgttttgcattggtaagttgagtttcttataagaatttcactgtgaaatccatctcaatctcattgcttgcttccaagcatgggtagatagatcgtacagttaaaaaagtatgactccccaggattaaagagttgaccaaggagaactcc

SEQ ID NO: 96604 - DNA, 2886 bp, Glycine max
  unsure (1)..(2886): unsure at all n locations
  Clone ID: PAT_MRT3847_58245C.1
gaattcgagctctgtacccggggatcctctagagtcgacctgcagttaatcaactgggcctagatagtgagtttctgaaagaaaaaattttacgtttccaagttgtttgacttggtaccgtataatttcatacctcaaaatgagtactataattcctaatgtcaggtttattcaccttttattgcagaggctgttcccaagaaaatacttgacctaatgaatgttgaagggcttacaagggaaaatgtggcaagccatctacaggtataaaatcttggttttgtagttatcataattgttctatgcagtctttgacaaatcaaggaatgaaaatcttttagattggatgattccttaaattttttgtgatggaaatattaggaaaagatagtttgtagcgaaaattaataactctgagaactttatagcacatagtataagtattttagatatttctttttcttgtaataatatgtttcgataaaatatggatagataaaattaaaaaaagggcttgttactaatgggacatttaagacttctaacccaagtgtttgctaggtgatgngttgtgcacctgttcctgttcatttaatgcggcaaagtatatttttcattactggctcgaggttctacatttttttttcttctccctttatctcttgccctttttgttgttggtgaaagagtgccctagagaacaaagttcccgttttcaaaattgaagcttttgggtctctgaggtttgatctctgcacaagaaccttgttttctcatctgggtgtgttgcttttgcctctgctggctcgatatggctgtggaaaaccaaagggaagatgggggttgtgatcgttttcctgtgggtatgcgtgttcttgctgtggatgacgacccaatttgcctcaaggtgttggagaatctccttcgcaaatgccagtatcatgttactacaactaatcaggcagttgaggcactgacaatgttgagggaaaacagaaataagtttgacctcgttatcagcgatgtgaatatgcctgacattgatggatttaagctccttgagttggtgggacttgaaatggacctacctgtcatcatgttgtcagcacacggtgatacaaagctggtgatgaagggtgttacacatggtgcatgtgactatttgctgaaacctgttcgaattgaagagttgaagaacatatggcaacatgtggttcgaagaaagaattttgatagcagggatcagaacaaggcttccaatgaggagaaggctcctaattttgctgggggaggtagtcaaggcctaagatcagaaaacagtgctgaccagaataaaaggcttggtaaaaaaaggaaggaccaaagtgatgaagaagaagaaggtggggaagagaatgaagatgatgaggacccctcagcacagaagaaagctcgtgtggtttggtctgttgagctgcatagaaaatttgttgctgcagttaatcaactgggcctagataaggctgttcctaagaaaatacttgacctgatgaatgttgaagggcttacaagggaaaatgttgcaagccatctacagaaatatagactctatctgaaaaaggcagcccagcaagctaacatggttgctgcattgggtggtagtgattcttacctacgtatgggttcaatagatggatatggagatttttgcacctcgtctgggtctggaaggatcacaaacactactttaccatcatatgcatctacgggaattttcagtaggctgaattctccagctgccttgaacatgagagcaattagttcttctgcgcttatccggcctgttcagtctcaaaacatcaactgctccttaaacacacttggaaacattcagccatctatttttcctgcaaatcatcaagtccccggtattacatggaattccaacatcaatttagcttaaccaataaacgcatggcccaggagcgtttagcaatcagtcttctgtcagagcggcttctttgtgtgctgaatctacgtgggcttatgtggttcttctaatttggatcataatcgatgataactggaatgcgctcaattgtctaaatttcctccaattccttgccactttgtgaggctttcagcaatgaccaactcactagcatcaatgattcgaactcaagtactcatattggcaacaacagtccagttgatttttcttctaagcaaaacatgagctgtccctttaattctgtaaattcacgcttcctcaagatggggcatgttttaattcagcaatagagttgatgcatcatctttggttggccaactaaatggagcatccccatcaatcagccggtgcactgaagttgagaaattctcttcagacattcgactgaagccaaatgaagcctacattttggagcaaatgaagtcccaagatggatttatgcagaatacttttgggaccttggatgacataatgggtgtaatggtcaaaagggagcaaaatgagtcgacattgttggatggagaaatgggatttgatgcctaccctgttggatcatgcaactgatttcttcttaaccagaacgaatccaggagcaataaaatcgtgaaacttgctccagtctctgaaaccgattaatgtacacctatttttatgttctgctactaaatttattttcttggccaacattttgttgtttcacttatggacttttgttagccatctgatctgttccatcttttttttttttcaatctgtagtgtatccccataaaaattgtctttggtttagataaaataattgtaatatgaatgtttcttggtgctcaaaaaaccaatttttaaaaatttaaaaaaaccccccttacccgggaattaaccatgggggggggggttggt

SEQ ID NO: 96605 - DNA, 691 bp, Glycine max
  Clone ID: PAT_MRT3847_58246C.1
ttgagctgcatagaaaatttgttgctgcagttaatcaactgggcctagataaggctgttcctaagaaaatacttgacctgatgaatgttgaagggcttacaagggaaaatgttgcaagccatctacagaaatatagactctatctgaaaaaggcagcccagcaagctaacatggttgctgcattgggtggtagtgattcttacctacgtatgggttcaatagatggatatggagatttttgcacctcgtctgggtctggaaggatcacaaacactactttaccatcatatgcatctacgggaattttcagtaggctgaattctccagctgccttgaacatgagagcaattagttcttctgcgcttatccggcctgttcagtctcaaaacatcaactgctccttaaacacacttggaaacattcagccatctgtttttcctgcaaatcatagctcaagtttattacagggaattccgacatcaattgagcttaaccaatctaagcaaagcaactgtacaactggaatatcacagttaagtcaagttgagttatacttatggacttttgttagccatctgatccgttccatctcttttttttttcaatcttgtagtgtatccccataaaaaaatttctgtctatggtttagataaaataattgtaatatgaatgcttcttggtgctcaaccaa

SEQ ID NO: 96606 - DNA, 819 bp, Glycine max
  Clone ID: PAT_MRT3847_58247C.1
ctgacgcgtgggcgtttttcgtgggcggacgcgtgggcaatttttgccaacagtgtcaactgtactgtctcctgaggttattgagagagaggctgaatcaggaggaaagctcggggaattggattcatatgagattgaaggtggcgaaacaaaagctgaaattcttcagaatctggctgagttccagttttcttgtgtgatgtacaatgccgtgttggagaatgcctgtagtgagcaaggagcaagaatgtctgcaatggacagctctagcaggaatgctggggatatgcttgatcgtctcacgctcacctataacagaactcgtcaagcatcaatcaccactgaattgatagagattatctctggagcttcagcactggaaggctaattgcaggagagcaatatgtaattattcagcagtggcgatattataatatcattataatatcgttgtgttcttttgaaatttgttggtgccacatttttttgatcttacctcgacttctgtaataagtgttccaaggtcaaacccatgatgaggattttcctagttgaggctagatatttctggaattatgtttttgaattaaagatggagtctgtcttttttaacccgaaatgacccgccataggattttctaattttaataatgatgggctttctttactgatgcaagcaagggtgtgtttgagaaagagtcatgtaacccacgttctcttcaaagtaacaagtgagttttttctgtttattggcttggaatgcgtaaacttttgtgtaaagggttttaatgtacttatacattaaaaatttacttttct

SEQ ID NO: 96607 - DNA, 389 bp, Glycine max
  Clone ID: PAT_MRT3847_58248C.1
gatacaacagttatagtgtgaactcaactaagaataataataaaaaaagaagaaaaagaagcggaacaatggagctaactcctgcgagtgttgtttggtgacagttgaagtcgaacaaaagacggctagaaacgcggcatggcgtcgtcgaagcttgtctcgacgaatccggatctgccacgggacccttcttcttctatatctcccctttcttctcttctctccgatctgcaccccatggacgacctcctcaagtccatcacccccaattccgtcgacgacttctggaaggggatcgctgccgcctccaccgacaatgccggcggcgtgaccctcgaggatttcctcaccaaggccatccccgtcacagaggaagacgtcagaggtgc

SEQ ID NO: 96608 - DNA, 289 bp, Glycine max
  Clone ID: PAT_MRT3847_58249C.1
atctaaccaagcacacgcaatgccagtggcattgcatattgccagaatgcttcttgtggtacatcccacacacaatttgacatatctgtgagggatttttcatcagcatagacactagtactttgttcttcctcttcgccacactcacagtccctccagaagcctcctacgaatcgacgaacggtagatgcaatgttgccgttgcttagcaatgtctacgctcaattttcgcaatttcatcaacctctccgatattaagatacgcatcttcatcaggcttcgcgcaagt

SEQ ID NO: 96609 - DNA, 469 bp, Glycine max
  Clone ID: PAT_MRT3847_5824C.1
ctttctttttggtgccttcaccacctcatacctaccttcaaccatcgatgatttcgtgctagatcatgaaggataccctcttgaaagtggtggcacatattatatcttgtcagacataacagcatttggtggaataggagcagacccaacgggaaatgaaagatgccctctcactgtggtgcaatctagcaatgagctcgacaaacggattggaacaattatctgctccccatatagagtgcgtaatatcgacgaaggccatcctttgagccttaagttcgattcattagcagatataatgctgagtgaaggaattcctaccgagtggactgaggtggaggatctaacagaacgacctgctgttgaaatgggtgagaacaaagatgcaatggatgagaggcttagactagagagaatctgtgatgatgaatacggtgcaataagctggtgttctggacacggagagcag

SEQ ID NO: 96610 - DNA, 355 bp, Glycine max
  Clone ID: PAT_MRT3847_58250C.1
aaccgaacacagtttaggttatgacttctattctagatttgtttcgattttctccagagaatcaacctatttgttctactgagcaaaatgcttccaccatctttgtgaactcggatgatatgtctaccgcaccgtttgtgcttagaatgatcatcctatgatgttcgcctatcagcacagtgcggcatactcccttcctatctgaggactaggtctcatctagaactccctagccaaattaacaactgtacctgtaccttatgctacgctgtagactttctattactgaggccatctgcgcctcattatcaaatgactctgtctctggcgttgcacatctttgctcacacttaat

SEQ ID NO: 96611 - DNA, 1684 bp, Glycine max
  Clone ID: PAT_MRT3847_58251C.1
cgaaaagtccgtgggatttgtgacaacacaacgctgtaaagtactcctcaattcgaaaacgcagtgttttagcattgttcctcaacacacacacacaaaaaaaactcccttgtatattgttgcagctctagctagggtttcgcaagtgcgatcgaagaagaacaacgacgatggcgatggctgcagctctgcgtcgcgaaggaaggcgtttgacccaaccaatcaacgccctccactcttctctcaattcctccctcatctctcagtcagtagaccaagcccctcatggcgcgcgctccatttccactcaagttgtgaggaaccgaatgaagagtgtgaggaatatccagaagatcaccaaggccatgaagatggttgccgcgtccaagctgcgggccgttcagaccagaactgaaaattcccgcggcctctggcaaccgttcaccgctcttctcggtgacgatcccagtgttgacgttaagaaaaacgttgtcgttaccatctcttcggacaaaggtctttgtggtggaatcaattccacgtctgtcaagataagcagggttttgaacaaattgaattctgggcctgataaagagacaaaatatgtcatattgggagagaaggctaaggctcaattgttgcgtgactcaaagaaacaaattgcgctcagccttactgaattgcagaaaaatcccctgaactacactcaggtgtctgtcttggcagatgacattctaaagaatgtggagtatgacgcattaaggattgttttcaacaaatttcattctgttgtacaatttttgccaacagttgcaactgtactgtctcctgaggtacttccatttgtcaattttttttcccctacatttttcaaattttgtcccttgagcctaacatctaatcttggcaaaattttgggtttacagttgctttgcatgtagaaaggcctgaagggagttatattttgcaatgataggctttggtattatgctatttacttgttcaatcttatgaaggtgattttcatgtaggttattgagagagaggctgaatcaggaggaaagcttggggaattggattcatatgagattgaaggtggcgagacaaaagctgaaattcttcagaatctggctgagttccagttatcatgtgtgatgtacaatgccgtgttggagaatgcctgtagtgagcaaggagcaagaatgtctgcaatggacagctctagcaggaatgctggggatatgcttgatcgtctcacgctcacctataacagaactcgtcaagcatcaatcaccactgaattgatagagattatctctggagcttcagcactggaaggctaattgcaggagagcaatatgtaattattcagcagtctcccataccttcgcatagcgaagagcctctgggcaatggggtacgaagtttttttataatatcgttgtgttcttttgaaatttgttggtgccacatttttttgatcttacctcgactcctgtaataagtgttccaaggtcaaacccatgatgaggattttcctagttgaggctagatatttctggaattatgtttttgaattaaagatggagtctgtcttttttaacccgaaatgacccgccataggattttctaattttaataatgatggactttctttactgatgcaagcaagggtgtgtttgag

SEQ ID NO: 96612 - DNA, 699 bp, Glycine max
  Clone ID: PAT_MRT3847_58252C.1
gtccattcataaagaatgacttacgatatttgtttggcatttccctcctttattacaaaaccaacatgatccaccacatattcctcaaacacttgatatgcccatcttctaactggtaccactagaacatgccaaatcatgtaatttttgcccatctaaatcataataatcctttggtgtatcaggttagatcggaacactggcatctttacagatctctcttttccctaaacttgggggataggataatgtttatggcacgtctcctggtgtgatactcatcattgtttcaaggaagttgttattttccaatctgtggagacactaggcattttttatgccattcttgaatttctctttttccttgttgcatctagtttttccaaatttggcaaatatcttgtcatcctccaaattggattttccctgttttctctgataaaatttcttttccaaattaaaaagaaaaggtaaaataacaaagaaacaaaagtttccttcaataaaatcctgcaatcctttattaagacacctgcataagtttgccatggcatgtaaggtgaaatgatatgctcttatcaaattgaatacaagtgagaaaaaaaaacatccaaaaggcatatccaattttaaccaaggtcattaacagaacaatgcagaaatgacaaataattcaatcatcgctgcagcagaaataca

SEQ ID NO: 96613 - DNA, 130 bp, Glycine max
  Clone ID: PAT_MRT3847_58253C.1
ttttaaaaaaaagaccactcatctattcaatattgtatctaacctttgaataccctattaggcaataagggtgggaacaggaacaccatctataccataccaataacctcattctgaggtgtggaaaatc

SEQ ID NO: 96614 - DNA, 389 bp, Glycine max
  Clone ID: PAT_MRT3847_58254C.1
aaaaggaaaaaactttaacgggtgtgggggcttttcccccgggttaggatttaaaaaaaccccggaacaaatgttttttaagggggggccaccaaaagcggcccaaacccaaaaaaccctggggttggtttcaacagaaaccttgaatcaacccggccgggggggtgggggaaacaatggggaaaccccccgcccgagcccctaattgaaaaaaaccggaatttgaaaaaaccggggccatggacaacccgggctttttcccggggggttcaatcttagaaagggcccaggggggccccacccccccctggggggcgaaaagggcccccccccccaggaagcgcttcccggggggggggccccccagaagggggggtaccccacctttg

SEQ ID NO: 96615 - DNA, 364 bp, Glycine max
  unsure (1)..(364): unsure at all n locations
  Clone ID: PAT_MRT3847_58255C.1
cccnagggatgaaggtgtaaccgcttcacaccgcgttgctgatggtgcttttgtcatgaatgccaacagggaggtgcttgtggatcaggaaagaaatgggaggattagtgggcaaggaatctggaagatgactactggaggagatgatgaaggtgaacatatttgaactgctgcaggtagagaagcccaagaagagactgggatagatacacagtttttttttttcataagatttaaggaaaggaataaatatttcttccagaacacaaaaatgatcattgaatgcatgaagaaacatcattgctttagaattgggagagaaggttcagaaattgaagaaggtcaaaggatggaaattgaagac

SEQ ID NO: 96616 - DNA, 197 bp, Glycine max
  Clone ID: PAT_MRT3847_58256C.1
ttcatcttctagtacaatagttcatgcatcctttcttctatatccaatctgcaacacccagaaaccactttctctctttccttggcatttaaagttattcaccagattgagtaggtgaatcccctccactgtttcttctgctgatcctgttcagaatccaaggagctagggaacaaactgctgctccttcttgaccc

SEQ ID NO: 96617 - DNA, 502 bp, Glycine max
  unsure (1)..(502): unsure at all n locations
  Clone ID: PAT_MRT3847_58257C.1
ggaccggtcttataattcccgggcgacgagctcacagtggtggccgccctcannttccaacggggggttttttttaactaccccccccttcttcccccaaacccacttcccttttgagggaaaccccaaaaaaaattatttatcaaaagaaacccacagcccagggaaaaattggaaattattttccccaaccatttggggacaaaaacacaagaaacccgaaacacacctcggggggaaggcctttcccccaggaaaaccggcttcggattaagtgcggcccggttgcaagttcccccctactttgcctttgggcacccataaaaaacactttcgccaaaaccggtgctggtgcggccccccccaatggcacaaaggcgggaaaagcccatctaaaacccccggaacaaaggcaaaaccccctaaatgggcgggagcccccccaacccccctggctgaaccccaaagcaaggcggacgggaacaaaaagaaaagggccccc

SEQ ID NO: 96618 - DNA, 389 bp, Glycine max
  Clone ID: PAT_MRT3847_58258C.1
cggtttctgtttttttttttttggcgtgacatggtatgttgtgaaaatgggggcttttttgggaaagaaaaatttcttctatttgatccaactttaaacggaacatcacgggctggtttcaaaatgtataatcctgcacaccctttttattgttaggtaacactgcagaggcggcctatttttatggatcgtgtaatagaactactttgtttgatgtaaataactatacttggcaccacatgattttggccaaaaatcgcacccgggtttctgacggggagctgcggcagtatacactctaaaggtgggtcacggccaacactaaaaatatttgggtaggcttgcttgccgggcttgcacatgataataggcaacacttggtatcgaat

SEQ ID NO: 96619 - DNA, 422 bp, Glycine max
  unsure (1)..(422): unsure at all n locations
  Clone ID: PAT_MRT3847_58259C.1
acattcatnnttatctctggggtgggttttttattttttttttttatatttttgtcaaccaaaccaaaattccccttttgggtttttttaagaaacaaggggtttcccgtgtattaaactttctccaaaacgctgaaatcattattataaggtgacgggtaccccccccggctttgaaaaaaaaaaagggttaaaaaaaagaattaaccaaatttttttcccccctttttgggaaagggttttttccccccaccctttgggggcaaaaccccgttgtatcccccctcccgtttccttttgtattaaggggcttggaatttatttcgggacctctttgtaaccttttgggaaaaccctttgtgaccccttgaaaaaagcccatttcttttggaaaaaaaggaaaaaaaaacctcccccttttg

SEQ ID NO: 96620 - DNA, 204 bp, Glycine max
  Clone ID: PAT_MRT3847_5825C.1
acgggtaccttgagcttggcgttggctgattatgtgttgagagagagccatttcaaacatggatggggtcttctcagtgaagagaacatacaccaattaaccaacacctgatatgctgataccgtgcaaactcctttacttttttgaccaccataattgctgctaaaactaattctagctcgacaacagcaaacgtggtgactc

SEQ ID NO: 96621 - DNA, 1035 bp, Glycine max
  unsure (1)..(1035): unsure at all n locations
  Clone ID: PAT_MRT3847_58260C.1
catccggctcctgctgctgcactatgtaaccatctatctaatactacatggatgcattttttgggggtccataactggtaggttgcctggtgttgggttgcttgcaaggaagagaacagagcagaaccatagatatgaacaccaacaccatgccacatgccgacaatcctatcaccttggagaatcatcattggaaccaccatggataccactcactgtcttagatgaaactgctctcaaggccagacaaaggcttcacaagaagcttggacacttcttttcctcatacaggtcaagtgagaatccaagaaaagaaggaaaagtaaaccaaagcagctacgagaagaaggatggaggaataggtcggaagttgttagagagttcatggttgttgcgtggcaacaagtttaagaaagatagaaaagtgtgtgctgtgtgcctagaagatttggggcaagagcaacaggttatgaacctttcatgctcccataagtaccattcagcatgccttcttccctggcttgcagcccatccccattgcccttattgtcgaaccccagttcagccctgacctcatattcaagggtcaagactcagtatatggtgccttgtagaaaggacaaaaatatcaaagttttatctagtattgcaatttgccgcacatttttcttgttactgattgcctaggaaatttgattgctcttctcaggtattggtggatatcccctattgtaatacaccatgctcttcaaaagattgaaattatacactatcccccaagaaggcaataactatcccttcttgcttgcatgaaaaaaaaggaccatgtttctaactcacaaaaacggtgaactttgaccacgtttcttgagctattttctcttcacaagcaatatacttatcgggcaagggcaaacctaacctaacctaacctacagcaagttaaacatttcctttgagtccaaggttcccaaaaatttaccttatcaatattttttcttctacagaatgtaataaaaaaagatgnatattaac

SEQ ID NO: 96622 - DNA, 416 bp, Glycine max
  Clone ID: PAT_MRT3847_58261C.1
actggagggtcaaaaattgaattcaatctcataaataaaagattaaaaccaaaatgaaaaaaattagacacaaaaatgatctaaattttctcaattttgggattctacaactatttccatgttaacaaagagaagtcacaattattaacatgacattttaagctctaaatattcatgggtctgtaaaatctatatagattactatcaggggcagtagtagtagtagcagtacccatggttttgcaataacaagtttggttactctgaagccctagattgtaacacaggcacacaccttgctggcttgtgatgttcccataccacttatacaaaacctgtggcttctgatcatcatgctcttgcgggtctggtttcaacttttctgggttcaacgaaaaaccttggggttgagaaag

SEQ ID NO: 96623 - DNA, 303 bp, Glycine max
  Clone ID: PAT_MRT3847_58262C.1
acgagaaagccagcaagcacgagcaatcgtcgacaaggcaccgccccgggagaggacacagactcactttttctctccggaagatagagaagacagctgaccatgcgcgagcggggcgagaaccaacaaacagagctggctcaagcagatgccaaagaggagcagaacaaagaccatgcagacaataagatgccaagggacccccaacaagtaagactcctgagaaagggcggaaagaacgctcaggaatacaaaggcaccccgcgaagcagatggcactaccggactatgcgaagaaacaaa

SEQ ID NO: 96624 - DNA, 1489 bp, Glycine max
  Clone ID: PAT_MRT3847_58263C.1
ctcacgcgttcgcccacgcgtccgccacactactgctattgggacattcttctcagttcactgaactaaagtgaagaagtgcgataaaataacaatagatgagcatagtgaaaacctgaaactctttctgtattccttatcattgtcaaaacatgaattctcaattcgcaaacactatcgatattaagctccaactcccaaaacccttcttccctcgcaaaacccctttcccccaatttccccactcttcacctcgctttctcaccaccagattcttccctcgcaacttcacgaatcgatgcaaactcagaatcaccgcatccaattctccttccgacacagcctctcccaagcaagagcaagaacaagaacaagacgccgaatccgctcaactattcgagaaactgaaggagacggagaggaagcggatgaatgagttggaggaatttgacaagaaggcgaatgtgcagttagagaggcagcttgtgatggcttcttcatggagcagagctttgttgactttgcgtggaaaactgaagggaactgagtgggatcctcagaattcacacaggatagactacagcgattttttaagacttcttgactctaacaatgtccagtttatggagtactctaattacggtcaaacaatatcagttattctaccatattacaaaaatgggaaaccaataggaactgaagggaatcctaaggatattatttttcagcgccatccagtcaatagaatgccaattgatagttggaatgatgtttggagaaagctacatcagcaaattgtaaatgttgatgtcattaatgtggatgccgtgcctgctgaaatatactcaactattgcagttgcagtcatatggtctatgcgtcttgctctggctgttggattttatgtgtggattgataatttgatgagaccaatatatgcgaagttgataccttgtgatttgggaactcctagccaaaaaactacacagccactaagaagtcgtgcacttggatctctaggccagagtcgggctaaatttatatctgcagaagaaagaactggtgttacatttgatgattttgctggccaggaatatataaagaatgaactacaagagattgtccgaattttaaagaatgatgaggagtttcaagacaaaggaatttattgtccaaaaggtgtacttcttcatgggcctcctggaactggtaaaactctactggctaaagccatagcaggtgaagcagggttgcctttttttgcagctaatggcacggattttgtagagatgtttgtaggggttgctgcatcccgtgttaaagacctttttgcaaatgcaagagcattttcaccttctataatctttattgatgagatagatgctattggtagcaagcgtggaggacctgatattggcggaggaggtgctgaaagggaacaaggtttacttcagatactgactgagatggatggattcaaagtttccac

SEQ ID NO: 96625 - DNA, 235 bp, Glycine max
  Clone ID: PAT_MRT3847_58264C.1
attacttgctttatcaggagaactctatatcctaacagaagcagaagcttaaactaatatgtgtggttccattttcactcacttcctcattctcccctcctctactactccttctctttccactctctttccatccaaatttcccaccaaacccatcaatgaatcttttccctttacccttaccttgcaaccaaatttccttccaaactcactatttcacgatcttcccaattct

SEQ ID NO: 96626 - DNA, 352 bp, Glycine max
  Clone ID: PAT_MRT3847_58265C.1
aataatagaaacgaaagagcaccgttgcgatttggactggctgctttagagcactattgtggatgcaacgggttcattctgataaacatcggatgatgattcccacatttgtgtaatatgttcgcccctagaacatcgcgaatgatgagattgatgcacacggtgaccctgtgtggtgcaagatattggcgcactctatcctgaaggatcaagactgtgaacgggtctagaatgctgggtctccaaaacgataacccctcaccggccctcggatattccggtacaaacttgcattatcaatgacctgcaagaggaaagacttggagaacgggaggactctgttgtctttctc

SEQ ID NO: 96627 - DNA, 315 bp, Glycine max
  Clone ID: PAT_MRT3847_58266C.1
cctcaatcacatcacaaatcctataattctcgtttcattttccattgatcaaaacattaatagtacccagaaaggaaaaaaatcatgcaaattaagatccaaagattttcgtcgtcatcacattattataccaacagtacaacgccacattgtttccctgttcattctgttcaattaacattacggttctcatgcatgtctcacaaaagcccttgtttcccctaacacataagataacagtgtctttgatgcaccccttgcacaaagaaaacgtacatgtatagcacatataagatgcattcctctcacagttgc

SEQ ID NO: 96628 - DNA, 362 bp, Glycine max
  unsure (1)..(362): unsure at all n locations
  Clone ID: PAT_MRT3847_58267C.1
cgtaccgcctcacgccgnntccgcccacgcccgtccgaaactcctatcttctacccttccctnnttgttctcaaaaccggtatgggccttatctctccacaaaacgcgaagaccatcgtctactnnntccgcagcttctcttcgcacctctccaaccctcaaactctccgaaccctcgacaacctcntgctgttctccccaatgcccttctcctcgtcccctctccnctcaacccctaaactccannaacccatttccaatttccgccccgttttcctcaaatacaaccccgctgtcgtcgtccgtcgcccgttagtcgcttgtcgatctcgctttcgttcccccatgtcctctgtgtttgg

SEQ ID NO: 96629 - DNA, 408 bp, Glycine max
  Clone ID: PAT_MRT3847_58268C.1
gtatactggacagccggcgccctttttttttttgtttataaatttgcacacatgacattcatagcatacgaaggatcatatctgacagaaaaaaagaaaagagtgcctacatgggacagtacaattacaccgacagtacatttttccaaaacattgttacaatggcaagtagcatgccactttggtgacctaacaacggaactaatccaatgccactatgtgaatggtttccattatatacatcacatcacatgtagcaagcaagttatgaggacactgccaaaatacatatcatcataatatatgaggaaattttgtctcacactagatgtaggtaccataaatattaagcttgacctcactgatgaatgatttcactgtgacgaaactgacaagagaacatcacac

SEQ ID NO: 96630 - DNA, 429 bp, Glycine max
  Clone ID: PAT_MRT3847_58269C.1
cttcgtcttttttttttttttttgactttttcttatgcaaatcaaccttgtgtcctcagaaggtatacctactaatgatttcatgttccactttcacggacatatacaccatatacgattttttgcccatctatcaaaaggaggtggagttacatttcaacccaaaagcgaataaactgctgtaacgaattcccacagtgactggctcagaaccggtgtcgtatatcaccactcatcggaaccctaattaacttacactttaaccgggatagacacagctgttttttatacatattgatatcatgttcttcagattatcaaccacctttggcagatcgactatttatggaacctgctcttggcttgtccagatttgatgggagggcttctggtctctaccaccaatgcgaaacttaagattggtccatt

SEQ ID NO: 96631 - DNA, 263 bp, Glycine max
  Clone ID: PAT_MRT3847_5826C.1
ggctcgagctctctggcatcacctgctactgacgtacttgctcgagacctggctgctgccagacactcggtcactcactatcccgcacgaccggcgcacttcctgttttgcccagcaccctgcacaagatcacctataagcagtgaaggaatcagtattcaatcttacgctgcttcatcagcgacgggacttcttcatactggtccttggcacatgctctcgcacacctagagccacattctacacacctgccagtatatact

SEQ ID NO: 96632 - DNA, 455 bp, Glycine max
  unsure (1)..(455): unsure at all n locations
  Clone ID: PAT_MRT3847_58270C.1
cgtatatccatagattctatgctataccatcattttatttagtttataaaaaatacatcattattgaaagaaaaaaaaaccattaaagctcgtgtctgttcccactatccagcaaactcttgtttatcaactatccatagacgaatttagaagttaataaaattaatttattggttgttatttttgtgacatcttgaagacttcagtccagcaaactcttgtttgtcaacttatagttatattgtggacaatgctgcagctattggccaatgaacaggaattaaacaccgttgtgaagaaggcattgcaggaaaaacgggaagcaaaggatggactagggagcacagaaataataaggagcttccttgagagaaacgcaaaggaattgggtttaccgctagctcaagctgatgaagcagatgntcttctttatgacgctgtctttgctgaaataa

SEQ ID NO: 96633 - DNA, 610 bp, Glycine max
  unsure (1)..(610): unsure at all n locations
  Clone ID: PAT_MRT3847_58271C.1
nnnnnnnnnnnnnnnnnnnnnnnnnnnnnnccttgaaattaaattctatttttcttaaatttattttcttgttattgtgattgattttcactcgtgcaaatttggttacacaagagtggaacagaactatgtaaatattgacagagttgtaagaaagaagtatgcatccttgcggttttgcctaaatttaggtcaaacagttttaattaagcatattgagttaaaatcctttttcaattagccaaatggatttgatattgcccatagctatttcatctaatatacatatattcattaaattccaatatgcgcttaaggttccctggatgtatatacgatttgggtttattatacttctgaacagactttgtagaccttttattgaggctcagtcttttaatgcaggaagaaggagtggctgcacctcttagtgcatatataatttcatcacgtgaattatttaccgttgttttaggctttgattttaaattagtattatattatgatgatcacatacgtaagcaatctgatttcctttttttagtacatacatatattcctgaatattaacgtgatagttatcataatatattattgttattatactttt

SEQ ID NO: 96634 - DNA, 1273 bp, Glycine max
  unsure (1)..(1273): unsure at all n locations
  Clone ID: PAT_MRT3847_58272C.1
ctttccgaaacacctctacctgttcttgttctctctaccggtaattgcatgaaggatggttggtcaatggcaaaaccagaagccagtttgaaaataatcatatcatcattttgacctaatcaaatcgaaacaaccacctaatctcactctgaaaatcgtttccctttgctgaacttgaacaggtcggagaaaactctcggttgccgtagcccctcacgtgcaattaagacagtaccaattctattccatggcctctaaaatcgaaagcgagaattcaaccgatacttctccatcatcgccaaagaacatatacaaagatccagatgatgggcagcagcgctttttgcttgaattggagtttgttcagtgccttgccaatcctacctacatccactatttggcccaaaatcgatactttgaggatgaagcattcattggatacttaaagtatcttcaatattggcaacgccctgaatatattaaatttattatgtatcctcattgcctctattttcttgagctgcttcagaatgcaaattttcgcaatgcaatggcgcatccaaccaataaggaactggcacacagacaacaattctacttctggaagaactataggaacaatcggctaaaacacattttaccaagatcacttcctgaacttagcgccacacctgcagctcctgctcctgcttcaactccatctcaggcacctgtgtctgcactaccaccagtacctgcaacaagtgttgctgtgacagcagcaccttctcaagctccttccccaatgccatatgttatgccccctggctctggtcttgcaaaaaatgacatgaggaatcctacagttgataatagaaggaagagaaagtgagtgtataatacaacatgtaaattgattataaaaacaatgcaatgtggctggatcaggcaatcagtttattttttccttcttagttgaaaaattgaagtggtgataatgatagaaccaaacttttatgtaaaaaaaaaaaaaaaaaaaaaaaaaaaaaagcggtataatacgacatgtaaattgattataaaagcaatgcaatgtggttggatcaggcaatcagtttatttttccttcttagttgaaagattgaagtggtgatattgatcgaaccaaatttttttgcaagttattttttttactgttaatgttattaaatattagttaatttgcacttggttagttaattttcacttgggctgaaacagttctgattggaaannnngtatgnnnnttagtcaa

SEQ ID NO: 96635 - DNA, 413 bp, Glycine max
  unsure (1)..(413): unsure at all n locations
  Clone ID: PAT_MRT3847_58273C.1
gaaaaagctttgaaagatgctggcttgggaagtagacaagtcacaccttttatgaggttacgggtagttggattaacttataaaactagacaagacaaacctaaagaaggcatagtagcaatctggaatccaactgagacacagcgtcaggagttggtggaaggaggagcatatgccatttcaggactcatgccatcaagttctgattctgatatccttcacttggatactagaggatcttctaccaagtggttgccattatcttataattcaaggaaacagtttaagccatttttctgcaatagaaaatcgatcccattgactagcttgggtgacatncctctttccaacgagtttgacattactgcataatgtgtgcatgttggaaggggttatatatcaaatcaacaaag

SEQ ID NO: 96636 - DNA, 1135 bp, Glycine max
  unsure (1)..(1135): unsure at all n locations
  Clone ID: PAT_MRT3847_58274C.1
ccacgcgtccgccaccgtcccctctcttctgttaccaatggctccctcatcaaactacatttctttccttttcctcactacgcttttgtttgctcttcaaatcactgctagagacagccagttcttcagcaaagtcacccatttcgacaaagacaatgccaaagtgacagaacttcccaacaaagaagcaccagaagtaaacaagccagagcaacaaccacctttcattcccgagactgaaaacagctatggcctatatggtcatcatgatgagtctaaccaagtcccctccaccaccccgacttcttaccacccctacaagaccaagtttgagaactccaacaacaagtactacaacaatgatgcctataacacaaggttctccgaaaccagttacaacaacaacaacaacaagtattacaacaaggattcttatgagggtaaccaatatgagttaagtgacacaaagtacacagaagaaggatacaacaacaagtatcacaactcctatcagaacaactacaacaacgatgctgccaatgacaaatactcctacaacaacaacaacaacaacaaaaaattacaatgctcacaataacaggtacaatacttacaacaacaatgctgttagcaggtacaatggtgagaggcaaggaatgagtgacacaaggtttttggagggtggaaagtacttttatgacgttggcgcggagaagtacaatccaacaaactatggtgactcgtctagggaagtgaacactaacaattggtacaacaacagaggtgtcaactacaatggataccagaaccaggaggagtttgaagatgagcataagaactttgagccatgagcttggatcactggcaaagtgaagaattcaccatacttaattttgagtatccactatgggtgtttaatgtttttattgtgctttagattcaagaaaacacaaagttaaaggatatgttaactatgaaaggcttttattttattttttacttagtagtacttctattaagtcttgcttccggattgcagtgtcgctgntatgatctggaaataccattgcgagagcatgagtaatttttgcttatacatattaantagttgtataatattgtgaagtaagcttgt

SEQ ID NO: 96637 - DNA, 223 bp, Glycine max
  Clone ID: PAT_MRT3847_58275C.1
ccacgcacaccaactgttccctatcggaatgaacactgactatcgtaccagaactcactacgcgaaatgcacacgatagaagctggcggaatgaacacacaaaatacgtcgccctaataccacctgtgaacagtgcgtcgaaagcacaaaggaaaccatgacaggccgaacagaaacatcacacttcacaacaattatagaacaagactacctattatgtaga

SEQ ID NO: 96638 - DNA, 337 bp, Glycine max
  Clone ID: PAT_MRT3847_58276C.1
aaaaacaaaaaaaaaacgcgcaattgtgtttcttaggggagctggaacaaccaaacaattacatccaagtacacccaatttgagccatagtggctccaacaaataaaaacacacatctaaatgacactctataacacagcaacttgaaaaatggcaggaaaaaccaaaaacaaagtggaacatcaatggtatcgctgtttgatgggaaaaattttccatctcaaaccaaaaaaatgcccaaaaaaatccaaactcaataaatacccctgaaaccttgcaacactgcaaaacaaaaggatcaagacaaaaacaaatacaaacccctacaaaccataac

SEQ ID NO: 96639 - DNA, 1279 bp, Glycine max
  Clone ID: PAT_MRT3847_58277C.1
cccggtcctccgcccacgcgtccgccttcccacgcgtctgttaccaatggccacctcccctctcttctgttaccaatggctccctcatcaaactacatttctttccttttcctcaccacccttttgtttgctcttcaaatcagtgcaagagacagccagttcttcagcaaagtcacccattttgacaaaaacagtgtcaaagagacagaacttcccaacaaagaagcaccagaagtgaacaagccagagcaacaaccacctttcattccggagactgaaaacagctatggcctatatggtcatcatgatgagtataaccaagtcccttccaccaccaccaaccccacttcttaccacccctacaagaccgagtttgagaactccaacaacaagtattacaacaatgatgcctataacacaaggttctccgaaaccggttacaacaacaacaaggattcttatgagggtaaccaatatgagttaagtgacacaaagtacacagaagaagaatacaacaacaacaacaacaagtatcacaactcctatcagaacaacaaccagaagtactacaacaacgatgctgccaatggcatatactcctacaacaacaacaacaacaattacaatgctaacaataacaggtacaatacttacaacaacaacaatgccgttaacgggtacaatggtgagaggcaaggaatgagtgacacaaggtttttggagggtggaaaatactttcatgacgttgccgccgagaagtacaatccaacaaactatggtgactcatcaagggaagtgaacactaacaactggtacaacaacagaggtggcaactacaacgggaaccagaaccagcaggagtttgaagatgaacatgagaacttcgagccatgagcttggatcattggcaaagtaaagagttcactatacttttgagtatccactatgggtgtttaatgtttttattgtgctttagattcaagaaaacacaaagttaaaggatatgttaactatgaagggcttttattttattttttacttagtagtacttctattaagtcttgcttccggattgcgttgtctctgtcatgatctggaaatacctctacgagagcatgagtaatttttgcttaactaataagttgtataatattgtgaagtaagcttgtttcttgctctcatttttaaaaaaaaaaaaaaaaaaagggaagcaaaaaaaaagaaaaaaaaaaaaagaagagacaaaagaaaaaaaagataatgagtaatgggggggggg

SEQ ID NO: 96640 - DNA, 1577 bp, Glycine max
  unsure (1)..(1577): unsure at all n locations
  Clone ID: PAT_MRT3847_58278C.1
cggctcgcgccaatagtcatggaaactagcaagttcagtttgctattcttttacgtaatttgtcttgctatattccctacccttaacgctaacataggtcacttcgatcatgtctggcataggcgattaaaagaagcaagagaagccgcaaaacaagcttacaagccgaaccccatgaaagttaccgctgagttcaatacacatgtcatcagggcaatgagaggctccaacaactcaagaaggggcttatcaaaccaatacgatggtccatgcaaggcgacaaaccccattgacaaatgttggagatgtgaccccaattgggagaaaaaccgcaagaggctagcagattgtgccctaggctttggccatggcacaacagggggcaaagatggcaaaatttacgtggttaacgactcttccgacaatgacctcgtaaaccctaaaccagggacattgagacatgctgcaattcaaagagagccactgtggatcatttttgatcgaaacatgaacattaaacttcacgcggagctcatgctaacggataataagaccatagatgcacgtggtgccaatgtgcacattagtgagggtgcccaaataacgttgcaatatgtgaaaaacatcatcattcacggtctgcacattcatgacattaagaaatgtagtggtggcctcatcagagactccatggatcactatggagtccgtgccatgagtgatggggatgccatttcggtgtttggatccacatatgtttggatagatcatgtttcctttaccaactgcgatgacggcctcatcgatgtcgttagcgcttcaactgctgttaccatctccaactgccatcttaccaaacataacgatgtattattatttggtgcgagtgatagctactcgggggataaaatcatgcaagtgactttggctttcaaccatttcgggaaaggattgattcagaggatgccaaggtgcagatggngcttctttcatattgttaacaatgactacacgcattggctaatgtacgccataggtggtagccaacaacccaccatcatcagccagggcaacgggtttatcgccccaaatgaccgaaatgccaaagaagtgacaaaaagggactatgcaccagaaagtgtgtggaagaactggaattggagatcagagggtgatttattgatgaatggagccttctttgttcagtctgggaaaaacgtagcaaaaaatcccaaggcagaaatcatagcaaagcctgggaaagccgtatcgagtctcactcgctttgcaggtcctctaaaatgtgaagtaaacaagtcgtgttgaaccaaataaagagcttcgtttgtggttgtaacataaataagtcgtgtacatatcaaacccgaagtgaatgcttccgtggttttttaattccttttcctcgctttgttcttccttttcccttggattatatgatttgagggatctgaggcaaagaaaatagtagaactaagatgtactcccactgtctttaattataagacttaatttattaatttaacatttattaaaaaaaaaaaaaaaaaaaaaaatag

SEQ ID NO: 96641 - DNA, 1028 bp, Glycine max
  unsure (1)..(1028): unsure at all n locations
  Clone ID: PAT_MRT3847_58279C.1
gcagctagttcaattaaatttgcaaaacatggaatttgataatgaagaccattatgcaaaactacttcgagctcaaacccacatatttgatcaaactttcggattcataaactctatgtcccttaaatgtgcaattgatttgtgcatacctgatgtaatacacaagtatggccaacccatgccactctctcaactcattgcttcacttccaattcacccttctaaggcttgcttcattttccgcttgatgcaaattttgactcattccggtttcttctctcaacacaataatgccaccgaaaattatgagcaagaagaagtgagttatgtgctaactgatgcatctaaactactccttaaggaccatcactttagtatgatttccttgccacaagtcatacttgatccaattntggtgaatccatggtttcaattctctacctggttcacaaatgaagaccctacaccgtttcacacacaaaatgggatggcattttgggattatgctagctctgagcccaaactcaaccatctttaccatgatgccatgactagtgactcacggttgatttcctaggtgttgattgatcagtgccacagagtctttatttgtgttgtcgattttgctggttttggtgacagcggttatgccagcgttgttgaacatgatatctagtttgccgtgttgggaaacggtggtgttcacgcagttttcaacgtcggtttcgtttgtcacgtcgcagtgaacataggaagcggattccaagtgtttgcaaatagagagacccaaatcgtcttgaatatcagctatgacaacgtgtgctccgtgcttagagaagagtcttgcagtggcctcacctatgccgcttgcaccaccagtgataatagccactttcccctcaagccttcttccagtagctgagaccagtgagacacttgccatgtctgagttttcggatggagaagtaaggtatatatgatgctgactttcgccttggaagtgctcgagaaagcggacgcgtgagcga

SEQ ID NO: 96642 - DNA, 240 bp, Glycine max
  Clone ID: PAT_MRT3847_5827C.1
aaattgaaaagctttctagctggtcataatatcaccattactgatggcattgacaaaactagtgatactttacgcatttagaaagctagcagattgtgagttactcaagagtaactttaagcagactctctaatgctctctaggtggctccgaaagctcacgcgcgtatagaatggttacttcaagctgatgcgcctaccatagcacagattgaagaggtccatccgatgcatctgatga

SEQ ID NO: 96643 - DNA, 585 bp, Glycine max
  Clone ID: PAT_MRT3847_58280C.1
ttctctcttttgtgtctttgtatgaaacaaaattttccattttctcaacccaccacttagatcaagacaatcaaaaggcatgtttggacatccagagacagattagatgagataattacaacggcgagagcagaggaagaagcatcttctcaaatgggaaggaagcatttctatggtccaactcctgggacaaccttaaacttgtaactccttgtgctgcatgcaagcttttgagaagaaggtgtgctgaagaatgccctttctctccttatttttcaccacatgagcctcaaaagtttgcagcagttcacaaggtgtttggtgcaagcaatgtctccaagatgctaatggaggtaccagagggccaaagagctgatgcagcaaatagccttgtttatgaagctaacttgaggctaagagatcctgtatatggatgcatgggtgcaatatcagctttgcagcaacaagttcaaactttacaagcagaactaaatgcaataagggcagagatactaaaatacaaatatagagaggctgcaagtataatttcttctcaacatgttgctttggtttcttctgctgatg

SEQ ID NO: 96644 - DNA, 348 bp, Glycine max
  Clone ID: PAT_MRT3847_58281C.1
ttcaactctgtcacttataaaggatcttttgctactgtttatcggcataaaacccttctctctgttattaatataatttcttcatatcttaaacttcacacttttgaagaagtggcaaatcacaaccataccaatgattgctgtctcatcatttctttcaatgtgtattatgtcacccctttcatgtatgatcatcccttatgtgatgaagttttgttatctgcaacatttaaatattcatccaattacttttaatattttattcacatttattctgctataaatattatttaaaaatactacattttttaatatttattccataaccctttccactaaaacgtacct

SEQ ID NO: 96645 - DNA, 284 bp, Glycine max
  unsure (1)..(284): unsure at all n locations
  Clone ID: PAT_MRT3847_58282C.1
cggcttcgagcacatagttagcccttagagtgagggactagcattacatggnntcatagtgtagcctgccctaatgatgcgactgaatgatgtccatgatatcatagaggataaccctttgatagtgtttagacctagagtctattccatgatagaaagtgatgagatatatgttcttctgaatattatagcaaggataagactatattaatgggcacctttttttagttgacgaagatcctatgagttgcctttaaagacccgttgaaagaagctttggggat

SEQ ID NO: 96646 - DNA, 281 bp, Glycine max
  Clone ID: PAT_MRT3847_58283C.1
ttttaaatttgagcttaagaagaaactcccacatatcagagccgttatttacagctgcctataaagacagtgccaacatatgtattaaattttgtttatgcattttaggggaaccacttcaagatccttgatacattttgagggtggattagaacagcagagcttcgtttggccttgacataaaagacaggagtggggctgcaatctcctttgttgaaaggccgtggttctaatatctgagctattgttaatccatgcacaacgtatctatcaggaaacat

SEQ ID NO: 96647 - DNA, 535 bp, Glycine max
  Clone ID: PAT_MRT3847_58284C.1
ggaagaaaatagaatttatttattgattgactgtatctctacaaagaattccctggaaatttgagagatccaggcctctctcaagtcccaattatatttcaccaaatgactagatatcactccctcttatctaaaggcaacatgccttatttcttcaaccaactaacctaactatctaactaagtcacttaaccaactactaatgactctccctaaccatacaccttatcctgaaggtgaggtgaatgacctctgactgctgaaatgacgttccatttatgtgcaacttattaaggcatgatgaccaagccaattgcacccagcattccaagaatagcttccactcctcccaggttaaacacaaacatgtgaatgcccctgtgctcctttagtgtgcttccttctatggtatatttgctgtgagacagagaatcagaggctctgtaattatatggagatcccatggctcccttgttaactgcaccgctgcacatggtagcagctgacgatcatcaagatgctctaccttattgag

SEQ ID NO: 96648 - DNA, 485 bp, Glycine max
  unsure (1)..(485): unsure at all n locations
  Clone ID: PAT_MRT3847_58285C.1
tcgaccgcgcgtccgggaaatggaaataaagattaggattaggtgttgcgcagtcgcaggcatggccatggctttggtgagcctcaacaccattcatacatcgccttcttctttttcgttttcatctcccaaaccttattcttcctccaactatgcaccacctctcaccctccttccacgatttcggaggcacctcgttcgtatggctcccgacgaggagaagatgactcgccgttcccctctcgatttccccatcgtatggtttccctaatcaaattcattctaagcttattttttgtaattttactttcagtaagtgctgcgaatttggattcggattcgccgtcaccctgctatgtttattgcctgattacctcaattctttgttgaaggataattgatttactgttattacatttccttgcttctaactaanatcaaccaatcaatattggctccggtttagatgcaatgctagtttctgg

SEQ ID NO: 96649 - DNA, 730 bp, Glycine max
  Clone ID: PAT_MRT3847_58286C.1
gggtcccacgcttcctccaatagccaggatagcggacacacatagtggcaaagaaatgtgctactatccagaaaaccaattagaaaaccatagagtattgcgagcaatcgttgttgaatttgagaacctgatcaagcttagagagcattctcatcaaatcactatataccattttgcagatcagagcattgaagtagttacttacatgtatgttcttacttcataagcatgggctatattttacatttttgccacatcatctttatgtcttgatgcagaacaaaaagctgaatactatagaaggatgcgagatgatttgaagaaggctgacaaggaagacaaacttatagaacgtcagcggcttagagaaaaaagaatcaagcagaagatgaaatggaaggctgggaatgcggaagaggacgaccaagatgatatatctgggtcagaaggagatgaaactgttgatagactgcataaaaagagtaaagtatactttgatagtgactctgacgagggtgaaagaaatgaagtcacaggaaatgcacgtacaagtactggcggggttactttggaggagcaagaagctctggctttgaaattgttaaattccatgcactcataggacgtgcataattcagttatatgacattttttgacaaaaacacgtgaaaaatataattttttgcggaggttttatgaacaatgaattttgcggcgaattgatctcaaa

SEQ ID NO: 96650 - DNA, 667 bp, Glycine max
  Clone ID: PAT_MRT3847_58287C.1
gggccacacacttcctccactagccaggatagcggacacacagagtggcaaagaaatgttgctcgatccagaaaaaaaagctgaatactatagaaggatgcgagatgatttgaagaaggctgacaacgaagacaagcttatagagcgtcagcggcttagagaaaaaagaatcaagcagaagatgaaatggaaggctgggaatgcggaagaggacgaccaagatgatatatctgggtcagaagtagatgagactgttgatagatggcataaaaagagtaaagtatactttgatagtgacagtgacgagggtgaaagaaatgatgttacagggaatgcaggtataactaccggtgcggttacgttggaggagcaagaagctctggctttgaaattgttaaattccatgcactcatagaatatgcgtaattcagctgtaacattttgtgacagcaaaaacgggtggaaagagagcaattcctgaaacattataggagttctgttaacaaaaaattttgatctcccaatttttttgtcatctctttcaagaaaggtagacatagaatcaatttacttaattttatttattttaactaaaaaaatgggagtaacggacatccttatgtgtaccaaacacgatgtttaatattattgagatatcataagttgt

SEQ ID NO: 96651 - DNA, 487 bp, Glycine max
  Clone ID: PAT_MRT3847_58288C.1
cggaagaataacttaggaggaagtgggagctttctattaataggtcaagtatggctaagtcttaagcaccaggtaagcgtaaatgggaattcgggtttacctaataatcgccgttggagccgaatcaaccagtacttagaatgaactatgcgtaaactaaaaagaaaccaactctttagaggacgacacatagctttaccattggtaatgggatctagaagaataatccgttgggttcttccggatcgtctaggatcacaactaccgacatcaaaacttaatagatttttacgccatcaacaagataggattatcaaagcgatagaccgtggggatctagtgctggccttcaggatgttcacatccctagcacagaattcatacgtcttccgtacaatgtgaatttgtagaatcatgaaaggttgatactggagcacgaatatcgaccagttaaataaaatcttagtgaaactggacaggatcatta

SEQ ID NO: 96652 - DNA, 101 bp, Glycine max
  Clone ID: PAT_MRT3847_58289C.1
ggagacctcatccaaatttgggtcatggaagactttgaagcgcactcttcctctgtcaggagcttatgtcttttacatgctagacaccatggagtctgatc

SEQ ID NO: 96653 - DNA, 148 bp, Glycine max
  Clone ID: PAT_MRT3847_5828C.1
atacccggctcgacacacgtccgctagcgcttattctccttctcattttgaattttaacaagtgttgcgtcttcaaagaaagggggttttataatagaaagacactgacgcttactatgaagagctcatcgactacgaagaggaagaa

SEQ ID NO: 96654 - DNA, 400 bp, Glycine max
  unsure (1)..(400): unsure at all n locations
  Clone ID: PAT_MRT3847_58290C.1
tttttttttttttttttttttttttttttttttttttttttttttttcttttttttttttnnaaacccaaaaatggagaattggttttttttttggaatactccttcccaatcattttccaccggcattgcttaaaaaattattggggcaaaagacctgcatattttttaaaccaaggcccaagagtcccatgggttttttaccaaacccccgttgttgttttaaaacaacccttttttttttggaaatagaaggggatacccttttaagtccaatatttttatgggacccggccaaattattttatggggttgaaattgtcggaattgttttgggaattggaaaatgtaaaaaacccggctttataaaatttgggtgaagtttaggaattggttttttg

SEQ ID NO: 96655 - DNA, 337 bp, Glycine max
  Clone ID: PAT_MRT3847_58291C.1
ggggggttttttttttttttttttttaactttaaaattcaatggtataataataatcaaatcaattgacaaacattacggcctatgggccaactatttatatagaacttttggaacaaaagaaaatgccacaacttacaggagcactaaccaattttttttactggcaaaacagggaaaaaaaaaaaaaaccaccaaatttcttcactggttgtgggtgattccctatgcttccccatgaaaaaaagggatactctgttcattcctgaaaaagttttacagaaacaaccgggggcttaattcttacaagcctttgaaaaatattaattgaagagatt

SEQ ID NO: 96656 - DNA, 368 bp, Glycine max
  Clone ID: PAT_MRT3847_58292C.1
ttctttttttttttttacttcttttttcttttttttttttttttttttttcaaaggaatggaaattttttgttacccccattaattcaccgttttaaaattaacttttcaaaaaccccaatcccggcttgttggtgggcatatgcccccaaaattcccatgtttatgtttaactccaactgtttttcgcacttttccttaatccaatgattcttttaaccccaaattccccttgaaaacccattattttaaatacataaaaatgaaagtttttccccaaaaaaaagggcccgttccaacccttttaaagcttccaaccggcagagctttctatcttagctctaagaaccttccataattcctttcctt

SEQ ID NO: 96657 - DNA, 478 bp, Glycine max
  Clone ID: PAT_MRT3847_58293C.1
tttcaatctctctacctaatttctgtctctctctctcctgtatttgtcttgattccaatgctccgcaaggtttcgagcatcgtagagaacagttttgccatattaggtgcatcttccatttaagataagctgcaacaaggtgtgcctgaatccattgagtctctaaggattgcaggcattaaagtatgggttctgactggagacaaacaagaaactgccatatccattggctactactcaaagctcctaacaagcaacatgactcagattacaatcaatagcaagaacagagaatcatgcagaaaaagtttgcaagatgcccttgtcatgtctaaaaagctcatgtcgacatctggcgttgccaacaatgctgaaggaagttcccatgcgactccagtagccttgattattgatggtaccagccttgtgcatattcttgacagtgaacttgaagaacagctatttcaacttgcaagta

SEQ ID NO: 96658 - DNA, 401 bp, Glycine max
  Clone ID: PAT_MRT3847_58294C.1
gagcccccccttaaaaaaaattattttattatttaaaccccccccgtttaaaatttaagggggggggggggggaccggtatcaatggtcaaaaaaaaaaaaatggggggaaaaaaaatcttcccccattggggaaaaaattacaaaacttgtggggggaaaggtgtctgaaaaaggattacttatttttggttggggaattcccacaagttttttaagggcatcccggctaaaagggaatttttcttttttggtccagccggctccaatttttttttttttccctaaaacaagggggggaggcaaatttctggtttgggcggggggttaattaaacttaaaaaggggccgctcctttgggggttatctgccaaaaagggaactccccccaaaaaatttttt

SEQ ID NO: 96659 - DNA, 399 bp, Glycine max
  unsure (1)..(399): unsure at all n locations
  Clone ID: PAT_MRT3847_58295C.1
aacacaaaccgaacnnagncccaagggacaggcagacagacccaagaaacaccaaagagccgcaaagggcccgggaacacaaccaacancacacaacgagcggaaaaccccccacggagacggaggacaaggggaaggggngaaccccccnggaagcagcagccagcaagggacccaccacccccaaacagcnggccagcaaaaaacacccccagcgggcccggagggacgccccccgagacccgaaacccggccgccacaaagacaaaggggccagagccccccaccccgaggggaagagacccacccgcaagaggcggcacgaaaaaccgcagaccaccacgaaaacgcaacaccaaggggaggagggacccccnccggaaggagaaaccagcaagg

SEQ ID NO: 96660 - DNA, 326 bp, Glycine max
  Clone ID: PAT_MRT3847_58296C.1
taatacaacattttaacatgtgttggagttcagctccaaaactgatacacatttgtggatccatgatcgatctctcaaagcattgttgtccaaaaaagagagaaatgttttgaatgaagtgttattttcagccctgaggagggtttagaaactgaggcagctttttcagacacagcaaaaacaaaattgtaacagagggctttggcatttaattttgtggcagagtgtggcacacgagagggcatggcatcttcatatatcaaattacttttggagacagtgaaactaccataatgcaaaagccaaaagcagacaatttttttttc

SEQ ID NO: 96661 - DNA, 201 bp, Glycine max
  Clone ID: PAT_MRT3847_58297C.1
ccggaagcctaaaaaaattaaatccttctgatggggaatcatgatactatccacacctaggtctcctcctttgaatatgaggctattaggaatcccctctcaaactgtctaatctgatcaggagacaatacccctccgacctgggcaaatattctttgacccaagaaattattccactttaaatgtaaaatcaagaatttt

SEQ ID NO: 96662 - DNA, 433 bp, Glycine max
  Clone ID: PAT_MRT3847_58298C.1
gtccgccccctcggccgggcctggttcgaaccgggttcttgtgggggaccaatctttccgaggttgggtttggggcctaaaaattaacccctggggccacaaaattttacgttaaggcccctcgctttgaaccaggaggggaagggatcgccttgtttttgcccctggcaattaattcgaggataattccgttaagggtggttgcggaattggctatggggctggttccaaccctcattcctaggggacctccagcccgctggtttattggcccgctccttggacagtcactgaccaccaatttggattgtgcttgtttggaaggttctccaggataccaaagggtccagggcgggaaaaagcggagatgattatttaatttgggggcctcttgaggaggctgaagggggaaacttttaatggcaccaggttt

SEQ ID NO: 96663 - DNA, 568 bp, Glycine max
  Clone ID: PAT_MRT3847_58299C.1
tttttattaaacatgaaattatttatgttttttttagcaattaaaaagttttaaataattagttcacaaaaaaggtgttaaaaacagttttgcgtaaactaaatgctatacaccaaaaatcgataaagatagcatagtgctcgtattgtactgttgtcaacttttagaagccttcgctggaattgcatttgtgatgctggatttggctggcttctgaatttatctccttggcacctttcttaaagattccatcaagtttttctctctttttttttatttgggttattcacctaaaaatatagaattgtgttaattacaaaattaatttgtaaatcaccttttataaagttaaaggtcaatttcatagtcagaatgccagaaatatcattttgattttgtctttttatttgtttggatatatacgtgcgaattgggatcacaaaatgcccatgttttaaagagctacccaggaaacatccaggagatgcaactacaacaaaagttcagtcaaaaatcaaatgtataggtcaagtcaaccaatttgtgcgtgttttttatgggaaagttc

SEQ ID NO: 96664 - DNA, 250 bp, Glycine max
  unsure (1)..(250): unsure at all n locations
  Clone ID: PAT_MRT3847_5829C.1
aagcattgaattcaaaaacttaagttcattccttgtgttttgctttgcttcctcaaaaccaaacatgnccgaacacatgcggcaactgcgactgcgctgacaagactagctgcaccaagggaaacagctatggtgttatngtagagactgngaagagttacatcgagactgttgtcanggatgtnccagcagntgagcatgatgggangtnnantnntggcantagntgcnttgcgggnngnccntgggg

SEQ ID NO: 96665 - DNA, 1026 bp, Glycine max
  Clone ID: PAT_MRT3847_582C.1
tcgggggatcgagaacacaacgaataggcaagttaccttctgcaaacgccgtaacggattgctgaagaaggcttatgaattgtctgttctgtgtgatgctgaggttgctcttgttgtcttctcaagccgtggacgcctctatgagtatgccaacaacagtgttagagggactatcgaaaggtacaagaaagcatgtgctgcttccacaaatgcagaatctgtctctgaagctaatacacagttctatcagcaggaagcgtccaaattaaaaagacaaatcagagacattcagaatctaaataggcacatccttggcgaaggtcttagctctctgagtctaaaggaattaaagaaccttgagagtagactggagaaaggtttaagcagagttagatccagaaagcatgaaactttgtttgcggatatcgagttcatgcaaaagcgggaaatagagctgcaaaaccataataattttctgagagctaagatagctgaaaacgagagagcacaacaacggcaacaggatatgataccgggaactgagtgcgagtcaaccatacctaattcacaatcatatgaccgcaatttcttccctgttaatctcatagattccaataataatcaatattcacgtcaagaccagactgctcttcaacttgtctgatcataagctggaaagcgattttaaattatgcatggcacaacctttctatggtttcgtctatttgaatagctagctagttacctttcaagtgttgagggagctagcccatacatcgccctatatatgtttcgtgaagaacgagtgcccttagaaattcctctgctagagttattccaacggagaacaagagaaaagctagagtcaatatttaatttgtaccaatacatcatatgatattgtttatgtatctttcaatatatatagtttctattcagtcctggcatattgtatttttatgtttggttgaccatactataatattataaatgcttatttcgaaaaaaaaaaaaaaaaaaaacacc

SEQ ID NO: 96666 - DNA, 330 bp, Glycine max
  Clone ID: PAT_MRT3847_58300C.1
aaaggccaaaaaaagaagggcttttatttgtttataggttaacaacaaagggggcccccccggaatttaaaaaacaaccccgttgggttccaaatagaaaagaattgatccccacaaaatcccggactgaaaaaaaaactggcttgggcaaagggctggggatttaaaacaggctttttattaaaaaaacccccgggggggttccgtcttggcaactccaaagggtggatttttaaaagttgttattttgttttaaaaataatttgctttttgcccaattgggttaaaaaaattttacccaggatttgggtcttctattgggcccttttt

SEQ ID NO: 96667 - DNA, 441 bp, Glycine max
  Clone ID: PAT_MRT3847_58301C.1
gtagtttccaaacttaaaaatgttaaacgttttgtattaatccaacaaaaaatgggccttgtaaactaaagaaaaacaaactaagattggcccaaactgaagaaatacaaaaaaaatggcttgagatcaagcctaaccacgaaaaaagaaaaaagagaaaaatattgggactagcccttttgttgccagatgtttagattggtgaatgctatcattaacatttatagataatgtatactaaaacttattatattttacttcgtttccgtacatataatatcaaagttttagactaaagatcattcctgaactaccatgttttacattgatggtttaaactttgatattttacttcgtttccgtacatataataatttaagaataatgtgtattttgttttttattatataaataaaattttttttttaaaaatttttttta

SEQ ID NO: 96668 - DNA, 888 bp, Glycine max
  unsure (1)..(888): unsure at all n locations
  Clone ID: PAT_MRT3847_58302C.1
ccacgcgtccgcgggatgttgaagctgtgagccaggagagtagtggtagtggggcaacttttggtgaaagccttcggagcctagatgttgagattggaagtgctgatggccatgatgatggtggagaaaggcaggtttctgcggataggatagcaggtgattcacaggctgcacgcacaagaagagcaaccatgtctgttggtcattcttctcctgtaggtgggagagatgcttcccttcatagtgtaactgaagtttcagaaaattcaagccgagatgcagatcaagatggtccagcagctgcggagcaggtgaacagtgatgctggatcaggatcaattgatcctgcctttctggaagctcttcctgaggagctgcgtgctgaagtcctctcatcccagcaaggtcacgtggctcaaccatcaaatgctgagtctcaaaacaatggggatattgatccagaattccttgcagctcttcccccagatattcgagcagaagttctagctcagcagcaagcacagagactacatcaagctcaggagttggaagggcaacctgttgaaatggacaccgtctcaataattgcaacatttccttcagaattaccagaagaggttctattaacatcctctgatgctatccttgccaaccttacgcctgcccttggtgctgangcaaatatgttgccggagaagtttgcacatcgatacagtcataccctctttggtatgtatccanaagtcgtagangagagacttctaggcgtgatggnatttagtctggcattggatggtgcanggggaagcttactttacgcaggtcttcttgccctaaggtattgaactgtggagcccttagttgncctgaactttctgcctgatcggt

SEQ ID NO: 96669 - DNA, 220 bp, Glycine max
  Clone ID: PAT_MRT3847_58303C.1
tcaatatcctagtacaccgtattaaagaatttaagatatactatgatgagagcgcggttcccattactgttgctgggagttgttttcctggcatcagtttctgtctcatatggcattgcggattgggacaagcagaagctcagtcacaagaagtgcctccgaagttgctatagcggagaagagtcatacagggaccatgaatgcgacgctcgtagcaact

SEQ ID NO: 96670 - DNA, 313 bp, Glycine max
  Clone ID: PAT_MRT3847_58304C.1
ttttgtgtttggtttttctctactcatttgcttgggagatgggggtcagccccggggggttcaccccccattcttttcaagggaaagattcccccaattaactgtgcaaaaagccacccccgcctttttctgttatggtatttaacaacgggtgggcccccctaaagccttgatgggactcgttaggcaaacgaaacaaattcaaagctcctatcggagatcgtgacaaataggaaatccggctagcccaataaacgctggcggtccaaactgaagggtagaataagtcaagcctacccatggttggggacca

SEQ ID NO: 96671 - DNA, 2502 bp, Glycine max
  Clone ID: PAT_MRT3847_58305C.1
agaataattgggactgatcaggtgccaaaatgcgcatcagataatgatcaagtcgtacagatatcaggagagttttcaagtgtgcaagatgccttgtataatgctactggtagactgcgagataatctttttgtcagcacacagaatagtgctggaacaaggagcctttcttctctacgagttgataccagtccctatgggatacagcaggattttgttcctcatggaagccaactgcctgcaaccacttctcactgtctgagtagacatacttttgcctcagggccattgatcatcttggtctttctagaaatttagatcatccttcgtcaccagggttatggactagaaatttagaccgtacttcttcacctttgttatggactagaaatttagactgtccttcttcgccagggttatggactagaaatttagcactcagctgcaaggttctgctgagaaacgaagaagtcgttgaggtgtcgaaggcgcaggaggcgctgctgaaggtgttcgataggatcctcgaagtggcagcggagatggaaggagtcgacgttggggacagggtaatgtcttgccggctggtggcggactcggcgcatgctatcgtgactaatacgacagtcgaaatggtggttcgtgatgctactatggactcggttgtaaaattagggtattaactgatgatttgccactttgtgcctccgcttccgatgaaatgatcgagatagaaggcagagtgtcatctgtaaagaaggcacttgttgcggtctcccaacgacttcaagattgtccctctgttgatagaacaaagatgatggggaacaaaccttatgaaatagttcagtatgaaactttagatgcacttcctcgtggtactttaactgcagctccacgtgtgactttaactgaagtcccgcctgggactttaactgaagtaccacatgagactgtagatcatcttttgcttaggagctctgcactgtctactttatccagttcctctaacagctatgccaccagaattcattcactgccaacagaagttaatagagtctcatccttggaaccaaaagcacttaagcaggaagtcaccttcagaatactttgttcaaatgatagagttggaggagttattggaaagggaggcaatattgttagagctcttcagagtgagacaggggctacaataagtattggtcctgcagtagctgagtgcgaggatcgattaattactattgctgcttcagagaatcctgagtcaagatattcccctgcacaaaaggctgctgtgcttgttttctccaggtccattgaggttggttttgagaaggggctagactctggattaaataaggggtcaattgttactgtacgtcttgtagtcccatcaagccaagttggttgtttgataggaaaaggtggagtaatagtttcagaaatgcgaaaggcaactggggctaacataagaataattgggactgatcaggtgccaaaatgtgcatcagataatgatcaagtcgtacagatatcaggagagttttcaagtgtgcaagatgcattatataatgcaatgggtagactgcgagataatctttttgtcagcacacagaatagtgctggaacaaggagcctttcttctctacgagttgataccagtccctatgggagacagcatgatgttgttcctcttggaagtctacggcccccagccgcctcgcatggtctgagtggccgtactgtcgctcagcgcctggcccttcttggtcggtctgcatgtgtagtgcatccttcttcaccagggttatggactagaaatttagaccgtgcgtcttcaccaggggtatcgtctagaattttagatcgtacttcttcaccggggttatggactagaaatttagatcgtccttcttcaccggggttatggactagaaatttagatcgtccttcttcaccagggttatgggcgccaccaacagtggctgggataaattccagaggcattaatgattttagtttgggattgacatctcgaaaaggcggcttagaacttgtgagtggaagtaaatctgctatcgtgactaatacgattgtagaaattgtggttcctgatgatactattgactgtgtatacggggaaaatggtagcaatttggctcgtctaagacagatatcgggtgccaatgttgttgtccatgagcctcgtcccggaacaagtgacaggattattgtcatatccggtacaccagatgaaacccaagcagcgcagagcctcctccaagcatttattcttagtggctcatgacatatctcctttccaattgcccattatttagttttgttcactgtattgtttttctgttttcctttttctctccacccgaaatcatgtaacatctagccttgtattattcccaaacagtaggtgtagtaatttaaaatcaataacttgattctttagtgcataccaaagtaagtaagcttttcattattaaaacc

SEQ ID NO: 96672 - DNA, 234 bp, Glycine max
  Clone ID: PAT_MRT3847_58306C.1
gaaacccccgggacgacccactcgcacgttgacgcttgcaaccccaaaacaagcgggggggcgcgacggaagcgtgacaccaccgaccccggagaaccaccgcgccgaaccaaggcaccgcccgccgaagaaaaggaagaaagagggggcagaacggccaacgcaacaaaagccgcacccgagagccgagcaacccagcacgagggcacacccagcaccaccgaaagaaggcac

SEQ ID NO: 96673 - DNA, 795 bp, Glycine max
  unsure (1)..(795): unsure at all n locations
  Clone ID: PAT_MRT3847_58307C.1
tcgggaactttgtcaccactgctgctgcttcctattttctcttaaccgctgactatggctctcaacccaatgctctcgaccctatcttgagaaatggcacaaagcaggtttcgtgggcttgcattcctgtatggcagaattgtgagccgtgatatatgccccaagtagtagtttccttggtggattaaaacctgtagccatacaattgccaatgaataggtgcccttcacaattagaaagctcatgcttcacttgcaagactgtctgaatgattggcctgatgtatccaagcaaagacaagtttagctttgtttcaggcaccattgcagattaagaagcaaaaactttctgcacagagtactgtgaaagagtatatttggggatcaaagaaagagtctcaagaaaatcatgtggggaaattggacagcaactaagaaaatccataaatttatggtagtctttaaaggaacatcatgctgagtcaaggttttcttttagcagtttgaactgtagtgtaatggaatggtgcaatgaatagaggcggagaacgaagaaccggtagatttatttgtcagcattatcattgtcattaataagaccattacatcataatcatgtttcagctgctgctctctaccccacaacccttatcttatgcatctgcatctgnattgnttttctttcccttgntttttctttatctggatttgagatacaaatgtaattgagaagggtgttttgcacatcaaataagcacttgcattagccaaaaaaaaaanaaaaaaaagcccctag

SEQ ID NO: 96674 - DNA, 286 bp, Glycine max
  Clone ID: PAT_MRT3847_58308C.1
ggctcgaggtcatttacacttttaatggtgagactgccacacgggatcagcttgtacgtgaccttaatgtacacgtgattcaccgtgagattcctgcaaagtaccttgatgagcctaccataactgacgggaaccctgatggcggggcagccattggtgaggccctggtgatgcctgcatgaaaagcctcaagaccatcaaccacacctatggaagagggagtgcacatggcatctgcggcttctatgaaaaggatgctaccaaggttgataggaacgacgcctac

SEQ ID NO: 96675 - DNA, 315 bp, Glycine max
  Clone ID: PAT_MRT3847_58309C.1
gcttggaaacgggtcgagttctctagttatatataatatttttttaaaaatttatctcccttacttatatatgtttaatttatttcggtcggtgtatatagcttctgtgcacagtttgtttcgtttggacttcggagcgtacgacatctagatctgggctccggctgctgctagttacaccgttttttaataatgtattagttaacatgtactctttagtatagatgaaaaatattcaagtaaaacttttcaataataaataaaaagtgttcttttcagatttggtctggtaaacaaatttatggtagtaacttt

SEQ ID NO: 96676 - DNA, 425 bp, Glycine max
  unsure (1)..(425): unsure at all n locations
  Clone ID: PAT_MRT3847_5830C.1
aattcggcaccagtatatagtgagattaaatagtggacaaaactattcactttgctttacggatcatggaaattgaaaaccataggagggaacaagtggtgaagattgtagctttagattagagccaagggttacttaatggagaagagaattttgaacanattcttttcagtgtacttattgaagcatatgccatgcaactatgtttgccaccattgtctttttttaacaattagcacaaaaacgttaaatttagtggaagacaatggtgagccatgtaattaatgctgatagtgcactggtgtcctgtggtgaatttcaaaatagtaaggagccatgtcaggccactgtatggaaggtttatactangagaaagaaaataggatcagggggtgggagttagttacatgacgtggcagtggaga

SEQ ID NO: 96677 - DNA, 918 bp, Glycine max
  Clone ID: PAT_MRT3847_58310C.1
aatagttattaaactatttaccatttatttattttaaaatgcaagtactattataatatccgggttcaaactaacaggatttcttgagatcatttactatacaaagattaaatctaacaaaagggaatatttttatttttttgaccaccttttactatgcacattatatcagcaaccatggcaaccagtaaatttgtacaacttttttttcaaatcatcagcaggccaggaaataaatccaggataatacctttttaccaaaaaaaaaaatccgggataacacccaggatttatttcaacgttccaaattattccgcgcgtccttaaaatgccttccatagtcaaaagctcataccacatacccaccgataatggctcctccccatcaatgtcatcactaatcaatccagattcatatgcacacaaccgaatagagcaccctttagctttgagcacattcaaacggacgcaagcgtaatggcccttcaggaaactcctgcattccaaacggttccaaaaatggcaaggtagaattatgggtttttgttgatttctctccattgctctccaacacatccacagtttccgatcctgctggtcctccagctacagaagatggaacaggagcagttggagtccagatctttattgtgctatcaatcccactggttgcaacaacaaaatcaaatggatggcattgtacacaatttacaacagattcatcaccactcagcatttttattagtctgcccgtacacttttcccaaataaaccatctgccatcatcacttccactagcaacatattcacctctttgaccaagaaaactggcttgttttatgtcagtcccaatattgcagtggccaacaaatctctgtttcatatcaacagctggttcaggctgataagaagttctcg

SEQ ID NO: 96678 - DNA, 680 bp, Glycine max
  Clone ID: PAT_MRT3847_58311C.1
gaaagatatttcagataacttacacagtaagaactacccatgtgctgcacttctctacatattgtattccccatgcattctgactcttgagaatttgaatgttgagatacaatttgctttttgtggacaaaatgaattgtttgtgagctcccccccaccaaacctgatgaatctagtactagttttagatttctcactttctctctcacccatatgtgcatgttgtggactcttttacagatgatgagcctcaagatccatacgagtctcgctccacattgcttttcttccgagggagaacttacaggaaggatgaagggattgtccgtgttaaactagcaaagatattggctggttatgatgatgttcactatgagagaagtgttgctacagaagaaaacataaaagcgtcatctaaagggatgcgttcatcaaagttctgtttgcatccagcaggagacacaccatcatcttgtcggctttttgatgccattgtgagtcactgcgttccggtcattgtgagtgatcaaattgaactcccatttgaggatgatattgactactcccagttctcggttttcttctcttttcaaagaggcattacagcctggctacatgattgatcaacttcgtaaatttccaaaggagaaatggactgaaatgtggaggcaactcaaaag

SEQ ID NO: 96679 - DNA, 216 bp, Glycine max
  Clone ID: PAT_MRT3847_58312C.1
acgagtgaatattgagatgttttgcaatctgatgttctaactttatggttgttgcctgtcctgcaatatttcatcccttatctcttggggattaagagcttctagagttctagtgactaagctgtatgccacagaaaaagacatcagtgttgtccatagtgggaggtggtgaatgcaaaatggcttagaaccgtgtcaaatagggaccaaatgtag

SEQ ID NO: 96680 - DNA, 318 bp, Glycine max
  Clone ID: PAT_MRT3847_58313C.1
aatattaaaagaaaaggcatctttcttcccaagagtaaaacaaattaaagaaatgaaggctcggggtcagttcaaaaaatacgggaaaaaaccatttctccgggttttcccttttagaagatatacttccaaaaaatcccctccttttacaaaccagatttttccaaaactttctgatacccaacattgaacacatcaacaaaagctctggacccctccaagagaggcaacccagacaaaggagccttaaccacttttttcacagccaccgacgcaacccctttcacccagcattcggaacccagcacacaccctact

SEQ ID NO: 96681 - DNA, 236 bp, Glycine max
  Clone ID: PAT_MRT3847_58314C.1
ccgggattccattcaattcaaaccgcctatttctcactcagtctaaataaaaccacttgctatctacttctcttctactctctctctctctcatatacattacacacccaaaatacagttttgacatcttgtctgaaaactctctttccctttaaaccttttttctctgtctctcgttccaacacttgcttaggttccaatctgatattccaggtaaaacctttctttgtacatat

SEQ ID NO: 96682 - DNA, 353 bp, Glycine max
  Clone ID: PAT_MRT3847_58315C.1
ggaaaaaaaaacaaaaacaggcctttatccaccaggtaaaacaaataacaaaggggggttttaggcaggaaaaggggggttaaaaaaccctgggaccaaaaggaaaacctaagctaacccttttttttaaaaaaaaaataaaaacccacagggcaacccaaaaaggccccgggggggggccggaaaaaaccccaaaaaaacccggggcggaaaagggccccccctggacttgggaaaagcaaaaggggagaaaagcccctaaccccaaattgagtgcgggccaaggggggccccaaggcccccgccggaaacggggcccaaagggggtaaaaaggggggccacaaaagggccc

SEQ ID NO: 96683 - DNA, 304 bp, Glycine max
  unsure (1)..(304): unsure at all n locations
  Clone ID: PAT_MRT3847_58316C.1
gaattcgagctcttacccggggatcctctgagtcgacctgcagacgtggctaatctcgttatttagagttacagttttgggaagttccatatctctgatgaaaccagccttgatcccctgatgctccccaggtgatttcgaagtgaagttgtccgtgagaatacctcctggggtggatgtaacaaccagtccttattttttgggtttggggcaccttaaanaggttatttgacttttgagatttataaaatttttttaaataatattcccccgggagaaaaaaaaanaatattagtttttttat

SEQ ID NO: 96684 - DNA, 274 bp, Glycine max
  Clone ID: PAT_MRT3847_58317C.1
ggctaagtatcattcaagtgggaaaagctcttccatgactgctatagccctcccgtttaatcctctaatcacttatacaagcacaacagatgcacaatcccgggtatggtatggaaagccttgcacccacttacccacccctcaagaaagttggggcccttttcaataaaaccaccattgcaggatgcgaatttccggccacggcccaaaggtcctcgaaacccaaaaggttcccccatcttgctttttgcagaaatttcccaaggcaaccctc

SEQ ID NO: 96685 - DNA, 465 bp, Glycine max
  Clone ID: PAT_MRT3847_58318C.1
cctagatggagggcgcagcgttcatatggaagcgatggtactaggactggcacctgaggatcgaggtttggattctcgcagtaccagatagcgtcccttgagagcttcccatggggcacgatgatggttccatcacaggtcaagcttcttgtggaaacagtgaagtgagtgtaggcccgaccccctttttcagaggatccatgcagaaggcgtaacaatatttttgggttatatcatgtctacacttctgctggagaagctatgcttactaagaggtggcaggctgctgtgctggttgtggggcatgctgatgttgctgttgacttgccatgattgcagcgttgaccgtagaccctccttggcgctttctgatctgcaacggcgctttgggctgccctggtgaacgctagctgctcctgggggtcctccttctttggcgtccgtgctaacgagtcttttagtcct

SEQ ID NO: 96686 - DNA, 208 bp, Glycine max
  Clone ID: PAT_MRT3847_58319C.1
accgctcgaaaaaaaccaccaaaggggggactgatcatacatgatccttgcctgatcctctacaaaacaaaaacgcaacaacaaagcatgaaaaagcatgatgcatacttagatgcatgtgttaggtacacgggagccaaccatatggggatcataaacccatttctaaagaaaaacaaactgcgacaaaaacactgcgggcgatgat

SEQ ID NO: 96687 - DNA, 450 bp, Glycine max
  Clone ID: PAT_MRT3847_5831C.1
aacatcaaaccaaaaataaagagtgaccccctttaagcggaggaatggactacaggcaacatttattgctgatcacttgaataacaatacccatacaggatataagagggaaggcactgtattaacattcaaaaagaatcaacagtgtgagcctacctgtaagccacctaactgacaaggcttcctgcggaaggcaaaccagaagaaacattcttttcaacaccacattactccatccctattctgatcatgaaagaaccataatggccaaatgcgatgatcaactgattagcgggaagccaatattccgaccgatcataaatggccgcgcagccaacttgctaaactgcgtgaccacctaaatgatcaccagtgatgtgtatgtaaacttctcgggtggtgcatacaaaaggctaatgaacgggaaatgcaactctaactggaccattc

SEQ ID NO: 96688 - DNA, 426 bp, Glycine max
  Clone ID: PAT_MRT3847_58320C.1
ggaacgaagaagccggtgtttctgccgtgggaattgatcatgatgttgccgctgaagtctcttatccgtttcaagactgtattcgtaggttcctgtaaggattttttacttttggactacaatcgaagctctttcatcttcaatccatctacaggacttcataaatttgtagattggtcacctatttccaataatatgggtggatatggttttggatatgacccatcaaccgatgactactcgctggttcaagcatctacaaataaaaatcctacaacttcaacctagatgaacgcgtgtaatctgtttggagtatttctcactccgagctaatgcttggaaagaaattgagtctatccatttgtcttaccagggctgctctgatcgtgtggttttggactccgggccgcccttcaacggtgtcct

SEQ ID NO: 96689 - DNA, 472 bp, Glycine max
  Clone ID: PAT_MRT3847_58321C.1
ttcttcttcgaaccccatcaagcaacacagtgggagacagcaccttcgccgcctcgccgacgcaattgaacattatcaaatccagcaaaaacaacacagaaaatctccagaaacaataacaaagacagaaaatcgccggcgcaacccagatctcggatccgctacccatcaccatcccaaaacccccaccacccacctcttaaaccaacaaccgcgccgccgcggccgtttcgatcttagcaaggacgaagaggaaggattcgtcctcaaaaactcaaccacaatttttgaatgcgaggaagtttctcgaaacagagaaaaaaaaaacgaagagaaacggcaacgattttgtgcgatgttgatattgctgcagttgcgacgcggaaggtgtcgaacgccggcggcggcgagaaatcgtgatcgtagcagcacaaaaagaaccgaatgacatacgggtgaccacaaatatctt

SEQ ID NO: 96690 - DNA, 344 bp, Glycine max
  Clone ID: PAT_MRT3847_58322C.1
gacatagaacataaatgtaacagctcaagaacaaataacaagggcacattctccatatgtttctggttgcaagattcatgcaatggtcataatcattcttctttactttttctgctttgttcttaaatagtttgttttgtctcctacactttgacattattttgttctttgacacagctttgtcttattttcgtaaagcaggtttgcaggaagacttgaagattgttttggggaaaattgaatcacagttattgggccttggttttggctgggagaatgtcctttatattcacctttacattgatgacatgaataatttctctgaggcaaatgagacatatgtg

SEQ ID NO: 96691 - DNA, 274 bp, Glycine max
  Clone ID: PAT_MRT3847_58323C.1
gaataagtacagtagaattcgacagtgtccggcgaggaggcggaggcgaatatgaggaagaagttcggcacccgattccccgcggctcgtatcaatcagataatgcaagcagatgaggatgttggacagattgcactagcagttcctgttttagtttcgaggtctcttgaattgtttttacaagatctaattgaccgtacttatgaaattactcttcaaagtggagcaaagacactgaattccttccacctgaagcactgtgtgaagaggcaca

SEQ ID NO: 96692 - DNA, 356 bp, Glycine max
  Clone ID: PAT_MRT3847_58324C.1
taatacttttatttcacaaaatccatttgtttcaaataaagaatatgttaaaacttactttccctctattcacttcccgaagtgcttatagtattcctctttctattatttgataaatcttttccaaaaatgctttactcatgaatataccaaatgcttctctttcacattttatatatattttcttagtatatccttattttaatatttctaaatattacttacctcctactattaaatattacaatctcctttacttcatattctatttttaaattttcgcctatatatacacctatccaattttttgtaatctttttcttcttttcatatactcgcatctctatctttatcta

SEQ ID NO: 96693 - DNA, 528 bp, Glycine max
  Clone ID: PAT_MRT3847_58325C.1
tcaaattcgattcctgagcacattgcttagcagtgaaattgtcctgctgtagaaagcttaggttataagtcaaaagtcacgtcagctctatagaaaactgtcttgaacatcattttttcaagagtaaagtcagaacgaccagctctcttatcaagagtaattgattttatttcttcttttcgatgatcagttttctgattttagatagcacacacattctgctttgactacaatggttatccattacctgtacatcatttcccactcacaacacacctaacccaatgttactcgctggaacaaaacaattacatacccgaagatcttttacataactagaaagcacctcttactcttacttaaaccagctaaacacaggtgtatcacaagcaacaagacatcctcatgtgcatctttggagacaaaatttgatgctatcgtgaaaaaaggaacatggggaataaaatagatactatacttatatcaatagcatttatgctatcgtgtaaacaaatttgatgatattga

SEQ ID NO: 96694 - DNA, 309 bp, Glycine max
  Clone ID: PAT_MRT3847_58326C.1
ttcaaaagcgggctttgtaaatgttgcatgcgccaatcggacgtgggtagggttacccaccactgcatgtattagcgatgtggccataactcccattctaccatacactgaaaggagaggcccacgagtgaggaaacgtaagaaaaatgaacctgctaatagagttgatactgaaccagatatcatacaggctgttattgtcgacctctggaagaaccatgagtagcaccacgcctcctaacatgtgcctacgccactccgtgacaacgctttaactcaagagtttggtcagaagacagcacatcaagc

SEQ ID NO: 96695 - DNA, 773 bp, Glycine max
  unsure (1)..(773): unsure at all n locations
  Clone ID: PAT_MRT3847_58327C.1
acgcctggcaggttacccgggtcccggnaatctcccggngtcgacccacgcgtccggctttgcgtctggtaaccttcatctctttctggtgcaaatgaatttttgttgcccttttgaagatagttagacaaactattttttggggggaaggttcaagagcagtttcatcctttggacagctatttggtttgaattctcctctcgttgcctgaaagttaaacaatgtcaggtacaaggtttctcttcagtaatgacatccttttacgtgcctcagatgcccctccagtcaaaggcctccttgaaactcatccgggtgcatacacaacatcacgcactcacaacaatgcttcatggttgttattttgggagagacacatgaaaagactttcacaatctatacaaattctatcgaatttggcgccagagcttctatttaaatctaataattctgcaattctgttaccatcatcagcaaccttgccaatatggcaacccaccgttcagatgcttgttaatgattcggtgtgcaaagtcttgccgattgcattgaaagagaggaatgattgtgaggaattggccattacaactcttgttagtggtaatttggaggaattaaatgcatgtgacaccttcagtgaggaaagaatgagtaaaattcttgatgtgcatgtgcatgttgagacttatgttcctcctacatttggtatttggggaaatggtgtacatttggctgtagtgggctatgggaggaatgttgcagctgctaaatattc

SEQ ID NO: 96696 - DNA, 286 bp, Glycine max
  Clone ID: PAT_MRT3847_58328C.1
ctatatacacactactcttcagccttttcatatttcacaacaaccctttgccaccaaaccagatcactgatctttttgctttgctcattcctgagtttgaaaaccatagaaccacttcactacacaacacttactgtgccctacaggaatcgagttcaatcgcagactcaggctcatggagtgtgaacgacctgagagcctgtgagaatgctggacatgtctaggacaatgagacgcatgatcgtcggcacatgtgtagcgcacgctgttggtggcaagacgacac

SEQ ID NO: 96697 - DNA, 419 bp, Glycine max
  Clone ID: PAT_MRT3847_58329C.1
tcctcgcgtccgaccacgcttacgggcagatacaggttgtggactcttcacgccagaaacattgctttgacagactaggtaacgagggtggtgctttgaaatagtggcatttctgctgctgttcttgcaaggcgagctcatgactctgtaaaacatgcagctactgaaagccttatggatcaaatcactgctggtgacaaggcggatcacactacggttaataagagggcttagagtatgaatcttacacaaagtgttgctggcgaacttaaacgcttaactgaagggacgaggtgtgagggtcagcacataccggtctctcacatcaatgcgggggaagattatgtgggtcgactacccttattgggaccggaggaaatcttgctttcttgtgcaggtgcttttagaactgcaatggg

SEQ ID NO: 96698 - DNA, 297 bp, Glycine max
  Clone ID: PAT_MRT3847_5832C.1
cataattccctaaccggtggaccgaaaaattaagcaccgaaacgtgacccttccaatctcgcaacgcaagcgacaacactcgtcacagctcagcacagcaaaatcacaactcccctgtgggacatttttacaaacaccttctgcctacaaataaaagtgatttcagttttcaagtactcgtagtggttgggtttgaggatgagtttcagggaagagagtggcgatgcgagggatcttcagaaaccgttcctccacacggggagttggtacaagatgggttccaggcagttcagcatc

SEQ ID NO: 96699 - DNA, 272 bp, Glycine max
  Clone ID: PAT_MRT3847_58330C.1
atattatatccatattgttaattactgacgttaataatatgtttcatacaaaaactacgtactaggaagttgttatgctcttgcacacaaattaagctcgataagatacagttatccaaaaaggaaaaaagttgagaaagtcaagattgaagattttgttgccattttatctgctgctcttcaccaatttgagtcttcgcgcacacccaacgaaacttctccatggtagatcttgtgcgagaagccagcccacgcgtccgcggacgcgtggg

SEQ ID NO: 96700 - DNA, 2689 bp, Glycine max
  unsure (1)..(2689): unsure at all n locations
  Clone ID: PAT_MRT3847_58331C.1
gttaaaccctaatttctgtccgttgcattagctaaggagctttgccgcatgggttgttaagttttggcctgtggccattgcaatatgcagagcgagttctccgatgcgaagaagcgcagagaggaggacaaccctcaaacactcgtttccctcgtacacgacagtgagaagaagaagagaaagagaaagagaaagaagaaaatcgaggaatcaaacgagcagccccaggttgaggtatgccctaaatccttagtagactcggttatcccaattgttgcacaaaaggaaaatgctgaaaccaccacagagaattctaacccaacccccaagaaaaagaagaagaagaagaataagaatgtgcaagatgcagagcaacttctgacttgtgatccttcaattgcgattggtgcggtacctgatgttacgaaagaaggaggatcacaacaaggtgatgctaatgggaatgggggtttatgccctaagcccttgttggacacaccaatcccaattgttccacaagagggaaatgctaaaacatctacacagaaccctaacccaatcccccagaaaaagaagaagaagaagaatgtgcaaggtgcagagcaacatctgacgtgtgatccttcaatcctaatagacggggaacctctcaatattacgagaattggaatggctagctaatccagccagaggacagaggaaaggagagagggagccagaatcccctaaagtttcaggcaaagatcagcaatcagagccactgaccagagctgatgatcaacttctgaagtcccctgaaactttgaagttgaatgatgagccattacaggggaatgtttcgaaggaacttgtcatagaccgtgaccttcctgatagctcaaattaccgaacaccagaatatgatgagaacaagactattgatacaacaaaaatccaggttccatcaggggaagttctgtctgaagtctgttatgcagctattaatccacaaactccaatgaatatcaattctcttgaaagaattgtggactttatttttatctacagaagctcgttatatcgccaaggatcctactacaaaatatacaagaagcataaacctagcaagaagggaaagaagccagaatctgatctggggattttgaggaaagatcaaatacaatctgatgaaaaatcagctagtaatgattcggagccaaagaagagaagaaagaatgagacaacttcaagtttgcctaaagagaagcaatctgctgcagctaagactggcaagaagggggttgataaaaaagcttcaggtgcttcccttttcatctcatttgggccaggatcctctctgccttcaaattcggatcttaccacactgtatggtaagtttggagctctgaatgaatcagaaacatctatgctctctagtgattgcactgctcgtgtgttcttcctgaaagcctctgatgctgaaaaggccttgagccattcacagaacatgaacccctttggctcttccgaagcctctttcagacttgagtatctttctgctggttccaagtctgaaaaatccaagtttaaagcttcttcaacaaagaagaaagacaagactccagccaagccatctgcttcattgtcaccaggtggtgaagcatccaaattgaactacataaaggaaaaacttcagggtctgacatcaatgctagaagcatcggatgctaaattacctgatatcaagacaaaattagagagtgagatgaaacagcttttggaggatgtgaacagaatggttgaatcttcttcctaaataacgcatggaatacatactagcaattatttagctagtaatcagggtaggtttatgatatgtcatttccatttagcggactgtctttatctgagaatcaatttatttgtctcatttctgagcctagctttagttaagaggtaaaattactcatatcggtttgttgtgtaggatatgtgacctgttgtatgcataggctgtatagacaccaacatccttttttagatcttctgtcctttttatagtggtgaacaaacagctttaaggatcaaaggtataatgttttcatttctgtcatgttgtgtgaaatactttaattctggtgtagctgcgactctaaatgatgattgaataggaatatagatgtggtgaaaccttttcgtagaaataaagttttccccctattcggtcatctatcatgattctcgtgtagcttttattgtggttatgaatggaataagagatatggaagttgttttgtaaagtggcatcaggggagttcaacgccagcaaagtcctgtgctttgtaaaatatatgttgtgctcaactctacttgaaaatgccatctatcaaaaactaggaattgtcgtgatccttgatgctggaaagtctaatggtagtgataccaagatttggaggtgtgaccacataaattaatgcatgcagctacgaagagatggtttgtttaaataccagatcccgttgcccacataattttctgattggctgttacagacatggaactatggaagtgaaaagatctattgatcttgcaatctagttcagttacaagcatttatatttttaaatgttgattaatgtgagatgacaaatgattaatataaataaaattagtctttagctcaaaaaaaaanaannnnnnnnnnnnnnna

SEQ ID NO: 96701 - DNA, 397 bp, Glycine max
  Clone ID: PAT_MRT3847_58332C.1
gcgccctttttttttttttttttttttttttttttttttttttttaacaagaaaaataattttattatacaacccagaagagaaaacacagcagtcaattgtaaaggaatattttcaaatctagggtgacataaagctataactgcaaataaaatgagggggatcatgggacaaccacaaaacgggggcaagcttcaagactatatcaaactcattaatttatgccggactacaattagttgcaacaaaacaaaaatgggtgatttgaacaggaacgagacattcaacgggttgggagaagattaaactacctggacatccattggtaaacttctggctacacttttttcataattctgggaaaaacctttttcccctggtgggggttctacaacac

SEQ ID NO: 96702 - DNA, 264 bp, Glycine max
  unsure (1)..(264): unsure at all n locations
  Clone ID: PAT_MRT3847_58333C.1
ttttttcgntttttttttttttttttttgggttttttttttgggttattgggggattttatatgggggngggtnaaaagtgccgaacatccaaatttttttaagtttctcccaacctctaaaaacgggaaaaaaaagccaatgcaacccccctgcttttttggggcaacgaaatttgggaagacaaaaaacaagggggggccccccccatatttaaaactgggggcgtaatttgggaaaacccccgggcccaccgttttttttt

SEQ ID NO: 96703 - DNA, 1332 bp, Glycine max
  unsure (1)..(1332): unsure at all n locations
  Clone ID: PAT_MRT3847_58334C.1
ccgcccagctggtgtcaactccgcccgaagtcaaacctaacagcagacaagttataattataatggggggttgggctatagcggtgcatggtggcgcgggtgtggaccctaatcttccaccagagcgtcaagagcaagccaaacaactcctcactcgcgttctcaatcttggcatctctgcccttcgttccgatgcttctgccctcgacgtcgtcgaacttgtcgtacgggaactggaaacagatccactgttcaactctggtcgcggagctgctctgacagaaaagggaacagcggaattggaagaagcaagcatcatggatggttccaatagacgatgcggcgccgtttcgggcgtcaccaccgtcaaaaaccccatctcactcgctcgccttgtcatggaaaactcaccccactcctacctcgcctttaacggcgctgaagatttcgccagacaacagggtgtggagattgtggagaacgaatacttcatcacccctgaaaatgttggtatgctgaaactcgcaaaggaagcaaacgcaatcctgtttgattatagggttccattgcacaatggatacgaaagttgcggtgtggaggttgagaatccgttgcaaatgaatggactgccaatcagcgtgtacgcgccggagacggtggggtgcgtggtggtggacagcgagggacggtgtgcggctgccacgtcgacaggagggttgatgaacaagaagtgcggtaggatcggtgactcaccactaataggtgcagggacttacgcgtgtaaggtgtgtggggtttcgtgcactggtgaaggagaagctataatacgtggcacgctggcgcgtgaggtggcagcggtgatggaatataaaggactgggacttgaggaggcagtggagtatgtgatggagcaccgtttggatggagggaaggcagggttgatcgccgtgtcaagttctggtgaggtggcctatggattcaactctaatgcaatgttcagggcatgcgccacccaggatggattcatggaggttggaatctgggaataaataattccttgcttcataaaaatgtgaaataattctagtagtcctttctctctttctctgcaaaggaattcccctcagtgtgctcttatccaacaaccaccaataaaaacaaaatacaccaaataaactttttagaatttctatatttgtcacaagttattagtgtattttagccaaaaatatctcacaaagatttttcatttgccatatatcagtctattctaaaaatcttacttgtcaaaaaatatgaannnnncagcgtcatagaaaatgaaaatannng

SEQ ID NO: 96704 - DNA, 332 bp, Glycine max
  Clone ID: PAT_MRT3847_58335C.1
cccacgcggacgcccacgcattcgccttaatcttcaatttatatcaatactttatcttcgggcctcatgatatcataattacgctatgccaaaagctcattgcttaatgaaacaatggtgcagttaactgatctcaaaagaaatgttctgtatacaaggtgtaggacactactgttgtgggagtgtctacacacgttggacgtaactgaattaataggtgccgctatcagatctctctaaatggcgatgctgctgatacaggctatattgtatctgccactggggccagagaagcaaactcttttgctgactgtgctctaaacaaagtccat

SEQ ID NO: 96705 - DNA, 425 bp, Glycine max
  unsure (1)..(425): unsure at all n locations
  Clone ID: PAT_MRT3847_58336C.1
gttccattctaaaatcattgggtttgaaacagctatcangagggcctactttcatgtaccggccctcaatgttgagagcttagaattngataactatttggactttatanaaagggaagggggctggagcaanattntcaancttctataagagatctgtcattncatgcgccaattatccggagtattgngtacgctatcgttntgtatngaagccancggancatggatcttgcgaataatggtcttnctcnagcaacccaantgctttntgtaaggggcgaccananatacatcttttttntgctcnggtcaaggagcanactngagatatanatggggctanagctncgtatcaacttntgcatactgaaacttctcctgggcttcttaaaacaattatcaaacatgccaatatggaatac

SEQ ID NO: 96706 - DNA, 797 bp, Glycine max
  Clone ID: PAT_MRT3847_58337C.1
tatcacgcacgctgcccgcatacgtgaaggcgttcgaagaaaacataatcttctttacaatgtcaatgacttacttgaaaaagttttcatttctcattttcgttttgcttttcatcctgcatgtccacttgtccactgcacaagtaaatcttaacgctggtgttggcactagcaatgacaatggggtcgtggttgttgaacttggtgatgacacagacacgtctcaagaagctgtcgttagtgttgaggtcaacgtcgacaatgacaatggcacatctaatgaagctggtgttgaagctgatgtcacaattactgttaacgttgagcctgacactgaggtacctgatgaagctcctgtcgaagttactattaacgttgatgctgactctgacactgatgctgaccctgacactgatgtacctgatgaagctcctgtcgaagttactattaacgttgatgttgatcctgacactgatgtacctgatgaagcttctatcgaagttactattaatgttgccggtaatgacacagacactaatttgggagcagtatccatcaatggctccgaacctgagacagcggttaacattcatggaggtggttcattgccataataatcatattgtgttggatacacatcaagatatgaatacaggacaagaagaagaacgaacacctgaaaaagacatgaaaaagacccaagacattacttttttttttttttatcatgtacaccatatgttggatgaataatatgtagaagtaaaataatataaaatttattaaagtataatttt

SEQ ID NO: 96707 - DNA, 604 bp, Glycine max
  Clone ID: PAT_MRT3847_58338C.1
caaaataaattctaaggcgaatagaatttgttttaagcaaagataaaactcttggatttttttcattgataagaattaattctggaagtagaacccataaaacacaaatcttcataagtgatttcactttatcatctaaacaaaatcaattattttaaactcactttcaaaatatcatttcctaacccaaatttcattttgttaacatcaattctttcaaaaccaattctaacaatgtctaaaacctaaaacaaaaggaccaactaatttctccctagtggatgcttttaagaatattcttattctgaattgtatgttttcttggttcaatcaaccactctttacttcaccaaaaaaaaagtcaaccactatttatttacaaaaacatgtgattgccaactggtggtgtgtggtagcaaagaacaagatgtttttctatctcaatcaatacatagtaaggggagtgttttagattatcatttgcaaactatgggtttgccccaacaaataaaggttacatttttccacttgtgctccacaagaagtttggaacccaaaatgcagtgcaaactgcaaacaactcgatcataattttgctaaacaa

SEQ ID NO: 96708 - DNA, 416 bp, Glycine max
  unsure (1)..(416): unsure at all n locations
  Clone ID: PAT_MRT3847_58339C.1
taccactcatccttacaaattttctttcttccacaaaaaatctnataacccaactcccgcctttattatctcccggcattttatctacataaatttctcatacatccaactacccaatcataaaattaacaccacaatattacctaaaattatccaactcaatcactttcctcttacttgaataaccaactccacccatcttctcaacacaaatactactaattttaataacccacatacttacaataatccactcattacaaattataattacataattccatcaataaacacacctatattaaaacctaaatcaaccaaaaaattaaatcatctctaatctcaataaacttcaaattacaaaaccatacattaagatatcatccttttacttatacacactcttaacaaatacc

SEQ ID NO: 96709 - DNA, 615 bp, Glycine max
  Clone ID: PAT_MRT3847_5833C.1
ggaaaaatgttcaatagtaagcgtttatattgtgaaatgcatagatagaatcagaaaagtggtgctagtccaacagggctaggaaagattttacaagagaagccgctttctaataaaacagagaaagtttctgtacaggggcctggtctataaagggacttgagatcaccactatggttgcgtgtgttaacattattgcctttaataaaatgctaagaaagtatcatacaccttgcatgtcccagtggtgaaaagggcatcccactatggctgaactcctctacatctgccaaataaagatttgctgttctgtgaaagtcagttcctgactgggaagcacagagcttgtgcaatttggtaacagcagtaaggcactattattatgagcttcctagttataatattagcccaggttgatttcaacccaggaaaccatcacattatgggtggtcttgattttcaaaggagaacctgattattggtggacaaatccccagaagctggcagatttaacatcataaaaaaattcaaggtgcctttagaaatgagaaaagctttaaatgggaaacagccagatagtcatttatctaatggggccatcaaattcattttaaa

SEQ ID NO: 96710 - DNA, 1298 bp, Glycine max
  Clone ID: PAT_MRT3847_58340C.1
gaaaacgtagacatcagtttcaagttagtttgtgcaatatttattcattgacctgatatttttctgaggaagttgcccttaagaggaagtacaatgaggaagccagaagcgtgtaataataatactaaaaacaatagcaacaagaagcttagaaaggggttgtggtcacctgaagaagatgacaagctcatgaactactatgctaaaccatggacaagggtgttggagcgatgtggcaagaaatgctggcctccaaaggtgtggcaaaagttgtcgccttcgatggatcaattacttgaggcctgatcttaagagaggtgcattctcaccccaagaagaggaactcatcatccacttccattcccttcttggaaacagatggtctcaaatagcggcgcgtttgcctgggcgaaccgacaatgaaataaaaaacttttggaattcaacgataaagaaaagactcaagaacatgtcgtccacgacgaccacaacctcaacctcaccaaatgcaagcgagacctcaatatccgagcctagtaataaggacctcaacaacatgggagggtttatttccacactacataataaacatgcaggttttgttcctatgttcggttcatctccatcaccatcaatgatgcaaaccagtacagttttcaataacatgattgaaaggtttcctatgctggagcaaggactgattaacatgccagcttctggagggtacttcgaaggcacaggtagtactccttgcttttcgcaatgtgaagttcacaacaataaaggttcttgttatttagaaaacgaagtgtttgagagtgtaaatatcggggtagaaggggatatgtttgttcctccccttgagaatgttacatgcaagagagaagaaacaactaacagcagttactttgacgatgacataaatagtatccttaataactgcaacaatattggcatagctgaaaataaggctcatcatggggtggagaatttgtttcagcaagagttagccactgccacaggagaatgggactttgaagagttgatgaaagatgtttcctcctttccatttcttgatttttcatactgatcaatgaaccttatttggcacactgcagggtgatatattcttcacatagagccttgtataatagtatactggtattttttacccttataccgaattcacaagttaacaatcaggtataggcctcaaataaaagtccaatatatatatatatacatataaattcttgggtatccattggtgatcgagtatttagtcttgcagattagtt

SEQ ID NO: 96711 - DNA, 1898 bp, Glycine max
  Clone ID: PAT_MRT3847_58341C.1
gctgcgagaagacgacagaagatggaagaaaaaaggaagggtaagtaaattgggaatggtggtggtagtgccaggtgtctgtctgaggagaaaatagaataaaaagctatgaaattttggcacaaggtctgattgtagaattgaagaagatgactggggggggtatcactatgcaatcgacgccgggaagctcaggatacttggatttgtatccagagcggaagatgtcctttttcaaaaatccttacattctcggactggctgctgtcgccggcatcggtggtctcctcttcggctacgacactggtgtgatatcaggggctcttttatacattaaggatgattttgaggaggttagaaacagcaatcttctccaggaaacaatagtcagcatggctattgccggggcaatcgtgggagcagcattgggtggttggattaatgatgcctatggtcgaaagaaggccaccctctttgccgatgttatctttaccgccggagcaataatcatggcttctgctccagatccttatgttctcattttgggacgccttctggttggtttgggtgtgggcatagcttctgtcactgctcccgtttatattgcagaagcatcaccttccgaaataaggggttcattagtcagcacaaatgtcctcatgataaccggtggacagtttctttcctatcttgttaacctcgcttttactggtgttcctggtacttggcgatggatgcttggtgtttctggtgtgcctgctgttgttcagtttgttctcatgctcttcctccctgaatccccaagatggctttttgtcaagaataggaaaaatgaagccgttgatgtgctttctaagatctttgacgttgctcgcttagaagacgaagtcgatttcctcactgctcaatccgagcaagagcgccaaagaaggtcaaatatcaaattctgggatgtttttagatccaaagaaatcagactggcattcctcgtcggtgccgggcttctggcttttcagcagttcacgggaattaacacagtcatgtactacagcccgacaattgtccaaatggcagggttccatgctaatgaattggctcttcttctatcccttatagttgccggcatgaatgcagccggaacaattcttggcatttaccttatcgaccatgctggacgaaaaaaattagctctttctagtctgggaggagtaattgtatctttggtcatcttggcctttgcattttataagcaatcatccacgtcaaatgagttgtatggatggcttgcagttgtaggcttagccttgtatattggttttttctcgccaggaatggggcctgtgccatggactctgagttcagagatatatccggaagaatatcgaggtatctgtgggggcatgtcagctactgtgtgttgggtctcaaatttgattgtctcagagacctttctttcaattgcggagggtatagggattggttcaacttttctgattattggtgtcatagctgtggttgcatttgtatttgtgcttgtttatgttccagagaccaaaggattgacctttgatgaagtggaagtaatatggagggagagagcttggggcaagaaccccaacacacaaaaccttcttgagcagggaagtagttcctaattaataaagtgtgagcttgttggcctaaatagatgtatcgtgtgggtacatttcacataagcattttattatgactttatatatcatactgtttgatttggttcgcatcaaaaaattgcctcataatataagtgaatggaatgggaatagttgtgtagttccatcgatcggcaccatcattaaaatgctgtagttccatcgtccatggttatttcaactcattttgtggagtttcacttttac

SEQ ID NO: 96712 - DNA, 739 bp, Glycine max
  Clone ID: PAT_MRT3847_58342C.1
ggaacaagaaacgcgtctggatttaacagttgtagagagaaggaagaagatggtgcttccgcaagatttgataactgaaatcctgttaagattgccggtgaagtctctagttcgtttcaagagcgtgtgcaagtcatggctttttctgatatctgatccccgctttgcaaaatcacattttgaactagctgcagcacttgcagatagaattttgttcattgcatcttctgctcctgaactccggtccatagacttcaacgcatcacttcatgatgactctgcctctgtggcagtaacggtggaccttcctgcccccaaaccctattttcactttgttgaaataataggttcctgcagaggctttatacttttgcactgtttatcccatctttgtgtgtggaatccaaccactggtgtccacaaagttgtacctttgtcacctatttttttcaataaggatgcggtgttttttacgcttctttgtggttttggatatgacccatcaacggatgattacttggtggttcatgcatgctacaacccaaaacatcaagcaaactgcgccgagattttctcactcagagctaatgcgtggaaaggaattgagggcatccattttccttatacccattttcgttataccaacagatataaccaatttgggtcgttcttgaatggtgctattcattggttggcttttcgcattaatgcatcaattaatgttattgtggcctttgat

SEQ ID NO: 96713 - DNA, 426 bp, Glycine max
  Clone ID: PAT_MRT3847_58343C.1
caatatgctacggagtgactcaactcgttctagtggtcttctaatattgatacgttgaatatatcaggcttgtatacttgcaagcgtaccctacataataataataggactactcaaaagtctacatatcaaatccaaaatatcaacagcattcctaattatttaagggaattatactcacagttgaggctgattaaaagattctttcaatacacttactgttgcaggcaccagaatctacctccagattatatgtgctacacaggctgatagttatgataagaatgatcaagggtattcacttgctagaaccaagattataccaattcacgttctaatcaactaacttgtacacttaattatcgactactagaactaactcatgcctatgaccaataccataagatgctataactctttgctcaa

SEQ ID NO: 96714 - DNA, 386 bp, Glycine max
  Clone ID: PAT_MRT3847_58344C.1
cccacgcgtccgcccacgcgtccgatgaggataaagcgaaatcacaggttgacgcaccttaagacgggaaacaaacggattggttacttgatgtgcagaatgtatcaactttttcgtacttttttgggtcctatttgttaagggaaagaaaatcactctctgtgctggccacagactgcgagaatgatattgtttttcactcttggattatttgctgaacactctcctatttgatataggacttcgtgtcagagctaaacttctcctgtctctttctcagatctatgtttaatttcaagtgtaagctggtgaaatcttggattagagctcccactcttctatcttgtataggacttagcgggtagacttttctatttgtctccctt

SEQ ID NO: 96715 - DNA, 160 bp, Glycine max
  Clone ID: PAT_MRT3847_58345C.1
ttatgctcacgatcgctacttttctttccaatcaatctctgttgggtatcttgtccttgttctactcccatctcttcaaagccctttcaaatcctaaaaccccaaatcttatctttcacaactcgagggtttccgcgccctgcaatttcctcagtcaatc

SEQ ID NO: 96716 - DNA, 257 bp, Glycine max
  Clone ID: PAT_MRT3847_58346C.1
aacgtgaacttgatcccgtttaaactggatgccaacctgcctaaggtttagggatggaaattggttccctggaattcaaagcaattattcttccgaccttaccagttgtgttgttattaaccaaaggggggggttttcatgttttttcccccaccccccaccctggcggggttccaggttaaaaaaaacagccaaattcatttcctttggaaaattaacttccccaaaattattattcctttcattttagggggaaa

SEQ ID NO: 96717 - DNA, 412 bp, Glycine max
  Clone ID: PAT_MRT3847_58347C.1
cccacgcgtcctgacggacaaatcgaaggtaattttacaaatgaccaccgaacacaagagcgagagagttgtcgaccttaaagaccagcttgacatgcttagccttcagaaatcggttcacaccgagttcaagaacatcgaatacgaccatatgcacatgaggattgctcgcatgcttactgagaagcgtgtaagagaaatcgacgatggtatcaataagaggttccacagatagctagacacaaaacggtagaaaagcatagttgtaagaccacctccatctataaagaagctctctacagcaagaatcagcagcagaagctccatacactgaaaaagctgtatgtgcctacacatctatatgcaagctacagagttcaatggtgaaaattatagatcagtcataattatc

SEQ ID NO: 96718 - DNA, 383 bp, Glycine max
  Clone ID: PAT_MRT3847_58348C.1
actgtacccaaggtcctgtacactcggcagtgagcaagacaccaggcagaaagtctgcgagctacaccataacgatctaacccatcaacaacatgacgaagacagctttgcgtagtgcagcccagctagtagtatagcgcagcagtgcgtgtgtgagtgacgcgtaagacagctttgcgtagacccgctcatgcagaactagcttttgaaaaccagcaagcattaacagtgcccgatgtcaaactacataagctgcaatgccatatgcctcagttagcatttcggcaacctacgaaccagcccccgacagttcatgactctgcggcagcaactgatctgaatgttgcagctggaactacacagcagatgccatcacatgctta

SEQ ID NO: 96719 - DNA, 1210 bp, Glycine max
  unsure (1)..(1210): unsure at all n locations
  Clone ID: PAT_MRT3847_58349C.1
aaaataaaataaggattttttttgctgctaattttctcccatcagatcactgcataatcataatgctgttcctcttatatcatctttgttgatccatttttttttctctctctttctcaaangtcctgtgtcagggactcagaagagagagatcacaaatatcacgtacctactactcctagcaaaaaaatcacacaactcgtgctggggttcagaaagactgaaactttctccttaaaaacttggtgggtattaatgatctttgcctccctgagtcattacatgaagattctctacttgggtgttcaaaatgttggttactgaggacaagtctcatgtcgttgttgccatagacaatgatggctgttgtcaccggagctctgccggcggcgagggtttcgccgacgccggcgaacggtcagatgaggagcaaaggtcctctcatgattctggcaccgagattgtgggagtgtgtgagaaggagagaggatcagagtgttctgtggaggtggatctggttcctgaggttaaggtgcatttggccaatgtggagagggattgtaggatttgccatctcagcatggatatgaccaaccatgaatctgggacttccattgaattgggatgctcttgcaaggatgatttggctgctgctcacaagcagtgtgccgaggtttggttcaagatcaagggaaacaaaacttgtgaaatctgtggatcggttgcacgcaatgtagctggagctattgaaattcaaatgacagaacagtggaatgaggcaaatgatgcttccacggccccatcatctggaccagcaccacccacagaaactcgaaatttctggcagggtcaccgttttttgaatttcctgctagcctgtatggtctttgcctttgtcatatcctggctttttcactttaatgtgccctcttgaattcctgtgtaacttgaggatgaagcagattaagatgatggggggttattagaccaatctatggctcttaacacaggtatcaaactcaatacctgtgcttgcttagttgattgggatctgtgtctttctttccacatgatgttcatatgtgtatttttatttgttgtatttttgttggtcttattttgctcaacttagaatagcaccatggatgtttatcgctattttcttaattaaatttatatatcattctcgctggaaaaattctttccatat

SEQ ID NO: 96720 - DNA, 367 bp, Glycine max
  Clone ID: PAT_MRT3847_5834C.1
accacacgtacgccctgtattatcataatggccctggctctggctgcttgcagtcttgcactgcacttgagtgctgataacaccttgagaccttttgaaacaaccaccgacttgaatgccctctataactagtatgacactaaaccatgacacatttgttacagaacaggattatcatcaccttcatcttcaggaataacattgatcgcacgatcaacaccagttactgttactgtggacgatggaaatcatcgagaggctgataccgttccaactcctgtagctatacttgatcaagactctgacccagatgctacttgagacgagataacctttggagatcgccttgaggctattcttgacacta

SEQ ID NO: 96721 - DNA, 233 bp, Glycine max
  unsure (1)..(233): unsure at all n locations
  Clone ID: PAT_MRT3847_58350C.1
ctttctttctctttcaatggtcctcctttgaacccttttctcccctccaccacccaccccttaccttaccaacctcggctacggctactccatcgccatcagcctaggggtactcttnctcctctgcagcctcatcctctcctcctacgtatgatagacggaccctccgccaccgtaacaacaaccgggggaaaaattgtaacaacacataagatggaatcgtcctcccgcgc

SEQ ID NO: 96722 - DNA, 397 bp, Glycine max
  unsure (1)..(397): unsure at all n locations
  Clone ID: PAT_MRT3847_58351C.1
caccatccagagcagctccctggtggaattacacgagatatagcatgagtggccggcctatgatatacaaatgcattcctcaaaagatcggatgcaaaagttggaacagaatctgcatatgatggagagttctgttactcatgtgttgctaactcctgtgatttctggagatatcttgcctcttacagaaaccatggatagaaagcgacggttgcctatatgtggtcacttttatgaccaaacttgcgctgaagatactatggcaactcatcagatgtcaccaanataaaatgcagacgataccactgtcttgactctaaatgccaagccactgtatcagctctgaatcatccttggcgttttgggaggctattgtacatgatattggtcactcctt

SEQ ID NO: 96723 - DNA, 547 bp, Glycine max
  Clone ID: PAT_MRT3847_58352C.1
aaaccagaacacattcaattccaccatgagaacttctttggggagtttttcttcacccttcacaagcttccgttccgcctcatcatggttcgaggtgtacgccgctttctccacattcatgatgcttctgagaaccgcgatcaacgatctcataccccaccaagttcgcaccttcatagtcacaaagataaaggctttgttctcagatcgccaaaatattaaccaggtctcactccagatcaacgagatttgggatggccaaatcaaccagctcttccaagccgcccaagagtatctccctgctcaaatatcccactcttacaagtccctcaaagttggaaagctcccaaagcacaagaacattgcggtggcagtggatggaacacaagaggtcgtggatcttttccaaggcatcaagctcagctggaagctcgttgagaaaagccccaaaagcgattctgatcaccgcgatcatcatcctaagtctagcggtgttggttacgagaggaagtcatttactctaagctttgatgagaagcatagagat

SEQ ID NO: 96724 - DNA, 521 bp, Glycine max
  Clone ID: PAT_MRT3847_58353C.1
gccccctgcgggcaccggccgggaatcccgggggcgacccgcgcgtccgaaaaaaaaaaaaaaaaaataaaaaaaaattttaaaaaaaaaaaaaaaaaaaaaaaaaaaggggaaaaaggaaaaaaaaagaaaagggggaaaagggggggaaaaataaaaaaaaaaaaaaagtggggggggcgccaaaaaagaaacaaagtggctgggaagaaccaagcgaggaccggggggggcccctgtggagacacacaatcaataccgcggggccgcgggcacacgtccacctctgggggagcccccgcaaacccccagtgggggcgcctggaaaaaaaaaagggggccgccaacggggggatgtcccacacagggcggagggggaagacccccccgcctgcccgagggcctaaaccgcaaaggggcccccccaggaagggccccaaaaccggggcgagtggggggggcagcgggcctcccccccagaccgttgaaataacccctgggggggggggggttggcccccc

SEQ ID NO: 96725 - DNA, 307 bp, Glycine max
  Clone ID: PAT_MRT3847_58354C.1
tcctgactggtcttgccctctatgcgatggcggctgccatcgtcggctatttcggcgtcaacgcctataccggcaaatacggcctcaacgcccgccaggaactcgaccaggagatcatcgcgctgacgagcgagctggcccagctcaagcgcgagcgcgccaggagcgagcagcgagtctcgctgctgcgttcggcgaggatcgatccagacatgctggacgagcgggcacgtttccagctcgactatgtcaatccgcgcgatctcgttcggatgatcccgccgaactagcgcctgcgcgggtttcg

SEQ ID NO: 96726 - DNA, 767 bp, Glycine max
  unsure (1)..(767): unsure at all n locations
  Clone ID: PAT_MRT3847_58355C.1
ggnaaaagaagaagaagactacaaccattgcggtagaggtgaagaagtctcagcacaagtatgttattgggccaaagggcaattcactgcaagaaatcctggaaagaactggagtttctgttgagatcccaccctccgacagcatctctgagactgtgatacttagaggcgaacctgaaaagttgggacaggcgttgactgaagtctatgccaaggccaacagttttacagtctcctcagtctctgccccttcctggcttcatcgtttcatcattggtaagaaagggcagaacctggccaaaatcactcagcaaatgccaaaggttcacnattgagttcacagaaggtgaggacaagatcaccctggagggccccacagaggatgtgaatgtagcccaagaacagattgaaggaatggtcaaagacctgattaataggatggactatgtagagatcaacattgaccataaattccacagacacctcattggaaagagcggagccaacatcaacagaatcaaagaccagtacaaagtgtctgtgcgcatcccccctgacagtgaaaagagtaacctgatccgaattgagggagacccancagggtgttcagcaggccaagcgggagctgctggagcttgcttctcgcatggaaaatgagcgcaccaaggatctaatcatcgagcaaagatttcatcgcacaatcattgngcagnaaaggtgaacggattcgagaaattcgtgacaaattcccagaggttatcatcaac

SEQ ID NO: 96727 - DNA, 526 bp, Glycine max
  Clone ID: PAT_MRT3847_58356C.1
catcaaggcttttttgtactgttccatcaatattactaaattctttatagttctcttctttaaactttttgttatttaaactatcgtcatagctgtcttcttcaaatttttttctttttttctctttagaaaaacagagatcagtcgttaggtctgaatcagaaaattttttatgtattgacttattttgactattggggaaagaataatttgtagagtattcatcatcattctgttcatttcttgcaaattcttttttagatttttcttgctcagccctttctttcttcagtctatcgataaaactttcttttgctaattcaacagtaatttcagaaccatctattttttttccttttaatttgttaaaacaagtgttcaacttttggtctgtagcagtaatctcaatgaaacaaaatttactaatttcatcattgaaattcttcttttctttcaattccactttcttaacattaacatgttcttcaaataattctcttatattattatcaacaatattattagg

SEQ ID NO: 96728 - DNA, 389 bp, Glycine max
  Clone ID: PAT_MRT3847_58357C.1
acctttgtgtcgttcttttttttttggtttaccctacaaaacccttaacctcactcaagggtcatattacggaacgctagtaaatggacaaggccaaaatgaggtgtgacataccatcaaatgtgcaagcgggaagggctgactcgacaggggtcactatgggcacattgcagaatcgttacagtctgacttagccctgtccagcataaccatgcaatatgaacattgtaacttagctttgtatgtcacctctgaggtggtcttgaagtggacaacgcttagcgttccaccttgtgtatggtcagggcccatcatacacttctcgggacgggttacacggtcagggccctgtgaatgctgaacatatgcgaccgggaaagtggacttgc

SEQ ID NO: 96729 - DNA, 430 bp, Glycine max
  Clone ID: PAT_MRT3847_58358C.1
gactggtggatgcttcagctcagatattctatcagctgttgacagagctgtggatgatggagttgatgtcctatccatctctttgggtggtggagtctcctcttactaccgtgatagtttatctgtagcctcatttggagcaatggagaaaggtgtttttgtttcatgctctggtggaaatgcaggacctgaccctgtgagcctcacaaatgtgtcaccttggatcaccacagttggagcaagcacaatggatagagattttcctgcagatgttagtcttggaaatggaagaaagataaccggaacctcactctacaaagggagaagcatgctctcagttaagagacaataccctttagtatacatgggagatactaactcaagcatccctgatccaaaatctctgtgcttggaaggtacattggatcgt

SEQ ID NO: 96730 - DNA, 2106 bp, Glycine max
  Clone ID: PAT_MRT3847_58359C.1
tggaaaatgcatggggtttcaacatggaaatgagagcattctgacttgtccaacttccggtctcagtggtgcaaatgttaatgtttcagaaatggctattagttctgtgtctatagccaagccttcagatgtagttaacccttttattgcttcttccgcttgggatccacttgtttcattgagtcaggttcaatcttttggaggctcttcaatggtttctcatagtgagtttgccaattccaactcatcttaccctcttgttttggataaccaagggataagcaacacgtctcacctggttcaatacatgtctgactcaaatcttgggggcatggtccccaaggttcactcctatgcaagtgggggattctcagaaatggttggtgctggctctttttgccaacataggtctgctgatatggctaacacagggtatccaatacattataatccgatcaaggaggctccaattaatggtgaacaatctcaggttgaggactcaattcctgaagaggaagcaccaggatctgcacctagtgggaatagaagaaagagagggcttgatcataattccaccttcagtccaaataagaatgctgagggtgatgctgtgaatgattctcctgggaaggcctctgatggttcaaaagaacatgaaaagagaccaaaagtggagcagaataatggcgcagatgtgcgtggcaagcaatcagtgaagcaagctaaagacaacaattctcaaagtggagaagctcccaaagaaaatttcattcacgtgagagctagaagaggtcaggccacaaatagccacagccttgcagaaagagtgagaagagaaaagattagtgagcgaatgaggttgcttcaagaacttgttccaggatgcaacaagataactggcaaagctgtaatgcttgatgagataataaactacgtgcaatcacttcagcaacaggttgaggtatgattgtagtgccaccttttatgctttcaatttaccatttaaaactgaatagtgcatgttaagagatattttatgataactcaataacacaattttttttgtctgttccattattattgttttgtgactagtcaacttatcaaagagatattttgcagtttctgtccatgaaacttgccacagtgaacccagaactgaactttgatgtagacaggatcctatccaaggatattctccaatcacgcataggacatggaattggtgcatatggtcctggtatcaattcctctcacaccttccccaatggaagtttccatggaacattggctggcatgtctagtacatcctcacaattccctcctttgccacagaatgttttggaccatgagttccaaagcttctatggaattggatacgattctaatacagcacttgacaacttgggacccaatgggcggttgaaaacagagttatagtgtgtgcattattacatagccatgttactacagcaacaaagactttggaattttcttgttgactgcacaatttaaccgaagatgaaaatgggaggacaatagagagggaaagaaaaagaaaaaaaataaaggttttagttgtatagggtctttaatacctaactgttggcacttcgaatttttagcagaagatgacttgttagatttatcaattggaaaatgagttacacatattatgtatagaatctagatcatgtagaacaagttgcagtggtcttgtttaatgacacggagagcagtattttgaggagcatgcgagtaaagtgtgtgcaactatcattacttttattgaattattatgtatagagttgccgggttcggatttttgaagcacaatgttttcaaatttcaagtgttgcagattggataatgtgtgtacttgactactacttatgctagggtttatggtttttctttgtatttttcttttcaaaagaaaatgtaaccaatgaggagattcttagtgcatacaacttcaaggatgaatatgttgcaacttgtatgagggtgaaagattgtttaagtagaccagtgcttcaaacattggccttcttttgtttttcattttcccatttgttggtgtttcttatttgaaaagtgtaattt

SEQ ID NO: 96731 - DNA, 3037 bp, Glycine max
  Clone ID: PAT_MRT3847_5835C.1
aattcccgggtcgacccacgcgcacaagcttttctttttcttgttctttaattttctgattttagcaaattaaaatagtagtgttattggtaggttttggcaaagatgttttcagttccaggggtgtcgggaatcctgaacagaggaggagggcataagataaaagggacagtggtgttgatgaggaagaatgtgttggacttcaacagcgtggctgatcttactaaaggaaatgttgggggactcataggcaccggcctcaacgttgttggctcaacacttgataacctcactgctttcttgggccgaagtgtcgccctacagctcattagtgctaccaaacctcttgcaaatggaaaaggaaaagttggaaaggatacgttcttggaagggattattgtgtcgttaccaactttgggagcaggggagtctgcattcaatattcagtttgaatgggacgaaagcatgggaatccccggtgcgttttacataaagaactacatgcaagttgagttttacctcaagagtttgactcttgaagacgttccaaaccaaggaaccattcgctttgtttgcaactcatgggtttataacactaaactttacaaaagcgtgcgcattttctttgccaaccatacatatgttccaagtgagacaccagcagcacttgtggggtacagagaagaagaattgaagaatttaagaggagatggaaaaggagagcgcaaagaacatgataggatctatgattatgatgtctacaatgatttgggcaatccagatcacggtgaaaattttgctcgcccaattcttggagggtctagcactcatccctaccctcgtaggggaagaactggtcgatatccaacaaggaaagatcagaattctgagaagccaggcgaagtttatgttccaagagatgaaaattttggtcacttgaagtcctcggattttcttgcatatggaataaaatctttatctcaatatgtcttaccggcgttcgaatctgttttcgatttgaacttcacgccaaatgagtttgatagcttccaagatgtgcgtgacctccacgaaggtggaattaagcttcctacagaagtaattagcacaattatgcccttaccggtggtcaaagaactctttcgtacagatggtgaacaagtcctcaagtttccaccacctcatgtcattcaagtgagtaagtctgcatggatgaccgatgaagaatttgcaagagagatggttgcgggtgtaaatccatgcgtaattcgtggtcttcaagagtttcctccaaaaagcaatctggatcctacaatctatggtgagcaaaccagtaagataacagcagatgcccttgatctagatggatacacagtggacgaggcactagcaagtcggaggttatttatgttagattaccatgatgtattcatgccatatataaggcggataaatcagacatatgccaaggcttatgcgacaaggactatcctttttctgagagaaaatggaaccttaaagccagtggccatcgaattaagtttgccacatcctgctggggacctgtcaggtgctgtcagtcaagtcatcttacctgcaaaagaaggtgttgaaagtacaatttggctactggccaaagcttatgtggtcgtaaatgactcttgctatcatcaactcatgagccattggttaaatactcatgcggtgattgagccattcatcatagcaacaaaccgacaccttagtgctcttcacccaatttataagcttctaactcctcactaccgtgacaccatgaacatcaacgcacttgctaggcaatctctcattaatgctgatggcataatagagaaatcttttttgccctcaaagcattccgttgagatgtcttcagcggtttataagaattgggttttcactgatcaagcactacctgcagatcttatcaagagaggagtggcaattaaggatccatctgccccacatggacttcgacttctgatagaggactacccttatgctgttgatgggctagagatatgggctgcaattaagacatgggtccaagaatatgtgtccttgtactatgcaagagatgatgatgtcaaacctgattctgaactccaacagtggtggaaagaagctgtagagaaaggtcatggtgatctgaaagacaagccatggtggcctaagttgcaaacaattgaagagcttgttgaaatttgcaccattatcatatggactgcttcagccctccatgcagccgttaactttggtcaatatccatatggaggtttcattctgaatcgcccaacttcttctagaaggttgcttcctgagaaaggcaccccagaatatgaagaaatggtgaaaagtcatcaaaaggcttatttgagaactattacatcaaagtttcaaactctagttgacctttcagtgatagagatcttgtcaaggcatgcttctgatgaggtctaccttggccaaagggacaacccacattggacctctgactcaaaagcattacaagcctttcaaaaatttggaaacaagctcaaagaaattgaggaaaaacttgcaaggaagaacaatgatcaaagtctctccaatcgacttgggccggttcaactgccatacactttgctccatcctaacagtgaggaagggttgacttgcagggggattcctaatagcatctctatctaagggagcatgtggtctactttaattacagtactgtacctaccttccaataaaaaagatgcaaggctagagatccaataaatcttgcatcctatctaatgtttcaattatcttgtgttttaatgctgtaatggagcctacaatttgcaaattaattaagagcaccgagcactattagtttgcgtttagcttctgtcatgtttattaagatatatttcgcagattgtaacacaaaattttgtggcaaaacaaaaaaaaaaaaataaaaaaaaaaaaaaaaaaaaaaataaaatgaaaaacctggtggtctttcactaataaacttcgactaccc

SEQ ID NO: 96732 - DNA, 450 bp, Glycine max
  Clone ID: PAT_MRT3847_58360C.1
tcaccggcgttggcgagaaagggtttgccgaaggctgataaagggaattccacggcggcggacgatggccctgttgacggcaacgatgacagcgacgggaaggccttgccggcgggtgtttctgcagggtgtacgatgaagtgggtgaataacgttgttgttgtaggagtggtgggtttggtgggtggtgttttgatgtaaggtgagtgtgcatggataaagggattccataatttttgttgtgcttttgtgatcgagtaatatatgtattaattccatcgtgcttaattgaggttctggtttatgggtaaagggtagggtgaaaatgtatgcatgacatgctgggtttcttttactatgtttcttcttcttttgttttgataagtggtcatttgtgttaattgatttctggctttgtaaccggatttataaaaaaaaaaggttttgtgt

SEQ ID NO: 96733 - DNA, 567 bp, Glycine max
  unsure (1)..(567): unsure at all n locations
  Clone ID: PAT_MRT3847_58361C.1
gaacacaactcccttcacttgttctccccttacacaatcattcaatcccccactttctccatgtcttctgataaacttaaatcaaaatctaaaaacaaattcgcagttgatgactctattccaacattcatccgtaaaacctatgaaatcctcgaagaaaacaaattccctgatataattgactggaactacgaaggtcttgctcttatcattaaaaaacctgctgaattttgccaaaaggtccttccactctacttcaaacacaataatctcacttcatttattcgtcaattaaacatgtacaatttccataaaagaagaactcaagacgttgaccacatctactgccatgagcttttccaacgcggcaaaaagcaccttctcaaagacatcagacgcaaaaacaacgagcacagtctcacaatccanaaaagcatggacatgcttgaaaacatcangaactccaatgacaacactggccttttacaagagaaccaacttctcaagatacttaataaagaagccgccgttaaagtctcgacctatgaaaagaaaatcaaggacctt

SEQ ID NO: 96734 - DNA, 178 bp, Glycine max
  Clone ID: PAT_MRT3847_58362C.1
tgtttcgcgtggggcaaagccggatgctgaacccccagagtgttggtctctgtgacctcgactctcaggaggacactaacactgttggacggctagctgctctgtacacccatatggggacgatgggcattgctaagccttctaaacattcgtgtatgctgtgcttctgtggatccac

SEQ ID NO: 96735 - DNA, 432 bp, Glycine max
  Clone ID: PAT_MRT3847_58363C.1
caattcggctcgagaatactttataataataataacaacgagatgttgatacaaacgataaaataatgttactagatctattcatacgttattggacatatttgagtcttcttcgattcacgctgtaaccatcatctgtgatcgattctaaaatcttcatcaagaagatgcagctacaagatggttctgttggtaaagtcattaataacctctcacaagttctggcaagggtggtgggagaccagagcatctttccccacctacacaaaaaagatcactctgcccatgttattgagaagttctctcactatgttggtaggcaaatgggattcttagagagcgaggttccagcagagctgtgtagattggcagatgagtatttgataaaacccaaggagtgtgtggaaagcatccttgaatatcttgctcatc

SEQ ID NO: 96736 - DNA, 1185 bp, Glycine max
  unsure (1)..(1185): unsure at all n locations
  Clone ID: PAT_MRT3847_58364C.1
cggtccggaattcccggngtccattcttctcattgaaaaaactctcgttattcattgcaccacattcttatttttattttccattcattccttcaccaactcccatggcggccgtcggtggatcctccgccgccgccaccacctcctcctccctcttctcctccgcccgattccgccactccctccgcccaccgccttctcaactcttcttcccacgcgcgcgcttttccgtcaacgccacgtgtcccttcttctccgataacaacaattcccttccccaaaacgtcgtcgcttccaaaccctcccctctcgagttgctcaaagcttcctccgccgacagatatacgaaggaaaagagttgcattatttgcatagggctgaacattcacactgctcccgttgagatgcgtgagaagcttgcaattccagaatcccattgggctcaggctattaaggacctttgcgctttgaaccatatcgaagaagccgcggttctcagcacgtgtaaccgcatggagatctatgttgtggctctttcccagcaccgtggtgttaaggaagttactgattggatgtctaaggtgagcgggatttcaatacctgagctttgtgagcaccaagttttgctgtataacgcggatgtcacgcagcatctctttgaagtggcggcagggcttgactcacttgttcttggggaaggtcaaattcttgctcaggtgaagcaggttgtgaaagctggacagggagtgcctggttttgataagaaaatcagtggtttgttcaagcaggcgatatcggttgggaagcgggttagaaccgagactaacatttcatctggatcagtttctgtaagctcggctgctgtggagcttgcactgatgaagctaccggattcctcctttgctgattctggagtgttggtggttggtgctgggaagatggggaagcttgtgattaagcatttggctgccaacgcggtgcagaaagatggttgttgttaacaggactgaagagaaagttaatgccattcggaaagagttgaaggatgttgagattctgtttagaccattttcagatatgctggcgtgtgctgctgaagctgatgtgatcttcaccagcacggcgtctgaatcaccatgttttctaaacagaatgtgcagatgctttctcttgttagtcatggga

SEQ ID NO: 96737 - DNA, 186 bp, Glycine max
  Clone ID: PAT_MRT3847_58365C.1
gtggatttggggcaccatattttatggctatgatccatgtcgccgaagctggaacactgaactacaaaggatactcacctgaacagatgccctatcctaattgaccctgaagagcaaaacgtttgctttataaagttatcatggttggccaatctacccttatacactggggctaaacttccttcc

SEQ ID NO: 96738 - DNA, 295 bp, Glycine max
  Clone ID: PAT_MRT3847_58366C.1
ggctcgagccaagaccaatctaacataactcaactgcagtatatttatgaaaaaactcatccatacatgaacgagtatgatatactacgagcgcggggacctgcttaccttaaatcatcttcaagttcccatacctactcccagcacaaatgacgttgtgattaatgtcccacccactacacataaacccattacatttatttgtacacaaacccatgaagtgcccacttttctctcacacgtacccacatatacctgacactgatataactggctatgtcacaaaaaacaggtc

SEQ ID NO: 96739 - DNA, 582 bp, Glycine max
  Clone ID: PAT_MRT3847_58367C.1
ggctcgagcaaagcgcacccattttctcattcaaaaactcttattatttttcactccttcctacacaaattcccatggcggccctcggtagatcctccgctgccgccaccacctccctctcctcctcctccgcccgattccgccgctccctccacctaccgccttcccaactctccttcccgcgcgcgcgcttttccgtcaacgccacgtgccccttcttctccgataacaatggcaataagatttcccttccccaagacgtcgtcgcttccaaaccctcccctctcgagttgctcaaaacttccgccgccgacagatatacgaaggaaaagagtagcattatttgcatagggctgaacattcacactgctcccgttgagatgcgtgagaagctttccattccagaatcgcattgggctcaggtcatcaaggacctttgcgctttgaatcacatcgaagaagccgcggttctcagcacgtgcaatcgcatggaaatctatgttgtggctctctctcagcaccgtggtgttaaggaggttactgattggatgtctaaggtgagtgggatttcaatacctgagc

SEQ ID NO: 96740 - DNA, 891 bp, Glycine max
  Clone ID: PAT_MRT3847_58368C.1
agcaagtaaaaattaaagttgaaaatcagggtgctagtaatattccaagatacttgaatcttgaaccatcacttgcaatggattggcttgagataccatgggatgatttacgaatcaaagagcgtgttggtgctggatcctttgggacagtgtatcgtgctgaatggcatggatcagatgttgctatcaaggttttaacagttcaggatttccaagatgatcaattgaaagagtttctaagagaggttgcaataatgaaatgagtacgtcatccaaatgtggtgttgttcatgggtgcagttactaaacgtccccatctatctatagtaacagaatatttgcctaggggcagtttatttcgcctaatacataagccagcatctggctattcggatcaatatcactgtctaaagcctgcaattgtgcactgggatctcaaaccccaaatctgttggtggacataaattgtactgtaaaggtatagtggaactgaactagcactagagggtctgattgaattttttaaaatatatgctcagtatatgatatatttttgtcatttcttgctcaggtctgtgattttggattgtccagatttaaggcaaacactttcttatcatcaaaatccgttgctggaacagtaagtttctcgatctcagattatgtgcataagcatgatgataagaaaaaaaaattatgcacattaagattgaaaattattgagtagcaatttcaggtttgaagtaaggagagttcataactaatgttgctctacatgagtgctccttgattcaaatagacaacagtgctctacatgagtgctccttgagtcggtgcttaaatcaatgatcaaataatgatttagatagatgattgatgccaatagggttg

SEQ ID NO: 96741 - DNA, 305 bp, Glycine max
  Clone ID: PAT_MRT3847_58369C.1
cgggcagcagaagatcaagtgcttgagaactaggagggagaagcaacatggctatgctaatcgaactcttacacccgagctgttcaccaactgtcacaccgtgctcgaggcaccgcatggctgcatccatacactggcctcaagtccatggctggcttgcccaccaggaagaccaacactgacattacctccattgctagcaacggtggaagagtgcaatgcatgcaggtgcggccaccagctggcagcatgaagtttgagactctatcctacctgccagaccttgatgacgcacaattggctaa

SEQ ID NO: 96742 - DNA, 1659 bp, Glycine max
  Clone ID: PAT_MRT3847_5836C.1
gggcaggctctgttacctctgctcggtggtctgctcgtagcgagaagacgacagaagggattggatttttggttatactatgctacatacttctgtggaggtacacttggtctagtctatagcaataatctgggacagattgcacaatctgtgggccagagttcaaatacttctacacttgtcatgctctatgcatccttttctttttttggtcgcttgctttcagttggaccggactacattcggaataagatctactttgcaaggactggttggctatcaattgcacttataccaaccccagttgcgttcttcctccttgctgcatcagacagtcttctggcacttcagacaggcaccgcactgattggattgagctctggttttatatttgcagctgctgtgtcagttacatctgagttgtttggacctaacagtgtgggcgtcaatcacaacattctcataacaaatatccctattggatctcttctctatggctttcttgctgcactagtttatgatgctaatgcaccctcaatgccaggaaacttgataacgtctgactcagtagtgtgcatgggaaggcagtgttacttctggacatttgtctggtggggatgcatatctgtcctgggactagcttcaagcatgctattgttcttaagaaccaaacatgcatatgatcattttgagaagaaccgtatttcaactcaatcaattgtgtcttaatttttgttattgatggtccgtgaagatgatggtgtagtcgagttcatttgtatagtagcataaagtttaaatatgcatttggagtttgagattagagaagaagagttttaaattcagaaccaagaggtaaggattgcattaactctttcacagtgcacaaaaaaagagaaaagaggggtaaaaagtggtctgaggaactatgcatcaataaaacagaatgacatctggagctggacctgctagaagttttgcctcttttgcagccatgatttggttcacacttagcacataactcctctgctttgaacaaagttgtgtttaacctgatagttcagctgtagaagcaggagctatgcttcgtccttgtgttggatccaaagatgctgctaccttatactttttcagtagcttttgataaaaagttcttttaacaaagccatacatgacattttaaaaagctttagttatctaattctttttaatatattataagatctccaatgagtatgtggctcaagtgctcgggttaccgtgttttcttttccttcagtttcttccctcgccaaggagaaataaaacttcaagagctcaattttgtaatttgggaaacacataatacaagcgtcatttgactgtatgaccttgagtgggacttttcttttccccaggttctgatatgagaattctgattattcatcacttgcaaggttgacgcagatatacacttgtaaattctgattactcatgaagctatccttttgattactcagggagctatccttagaatcctaacaggaaagtattggccattttttccgctgatttcatcatcatctttatttgctttgaggccatagaaacaaggtgtttgttccttttatgtatcaatgaatggtcatttatagatcctcaatgagactcagtttgctc

SEQ ID NO: 96743 - DNA, 520 bp, Glycine max
  unsure (1)..(520): unsure at all n locations
  Clone ID: PAT_MRT3847_58370C.1
ggctcgagctttgtgggtgcgtacgctattcatcattcatcgtgatcaatcagcaatcggtggctgtgctcgtcgtctctaaagccatcatcgatcaagcgtgagagggtagcatagcatagcaaagcaaaacaaacatgtctatgtccgattccgattcctcttcttacgccggcgccgactacaaaagtttcaagcaaattagccgcgagcgattattacatgaaatgctgaggtcagcaaaaacaggggattccaaatcaactttgaagtgggtgaagacctatacaagcaaaggcagccattgcccacctgggatgctatatatttcatccagccaacccgagaaaatgtaattatgtttttgtcagacatgtctggaaggacacccctatacaggaagtttgtggtggtcattataatatctctcttgcctgtaattcatcatggcttcagcaacttattngttttcacgtctgttntattccatgttatgttcctgtagggcatttggtttctt

SEQ ID NO: 96744 - DNA, 451 bp, Glycine max
  Clone ID: PAT_MRT3847_58371C.1
caggctagcacaaccttgatatgggtggagggagctgggacagggatactgtcgtccgggctcttcgagcatgcctacaacaaccctgagagagctgtggaatatttgtatacaggtatccttgatcaagctgaaactacaattgtaaccaggacgcctgtaagtgctcaacctacaaatcctactgatgatgctgcacagacagcacaacctgctgaacttacctcagatggacctaacgctaatcctttagacctttgtccccagggtcttcctaatgtgggttatggtgctgctggtgctggttcatcggactgtttacgcaacagtcaacaattgcaagcctcgcgagctatggtgcatgctaatccacacatattgcactcaatgctacaagagctcggcaagcaaaatccccatctgatgagattgattccagaccatcaagctg

SEQ ID NO: 96745 - DNA, 444 bp, Glycine max
  Clone ID: PAT_MRT3847_58372C.1
aacctcaccacgccatcgccgttttccctcgacacaaccgaagcgctcttgcatcgacacctccaacacctccaacactctcttgagcagcagcaatcatgggcagctgcctggcctgcatcttcggtgccgaggaggaggggggcaattgctccttctagtgcaagattggcggctggcgtcgacgcgggcggtgctgcagaggacaggggaaggggggggactcgcgagtatcgtgcgggggagggtgtgccaggggccggggtgaggggggaggggcggggtgggcgcgcggggggtggggatgcggtgggatgggggtgtgggaggcgggtggtggggggtgggcgaggatgggggggggggggggtggggtgggggcgagaggagggggggcatgtggggggggggggggggggggggtggaaggagggggggaggggg

SEQ ID NO: 96746 - DNA, 248 bp, Glycine max
  Clone ID: PAT_MRT3847_58373C.1
cgtatgtgactgttgcgactcgatcttctacgtcgttctcttcttctcgcgtcgtttgtgcgtccgtcttttctctcacctgaaaatgtcttgctgcggtggtaactctggttgcggaatcgcctgctagtgcggcaatggctgtggaggttgcacgatgtacccagacttgagctacttcgagtcaaccaccaccgagaccttggccattggagcggcaccagttctggctcaattcgagagtgctg

SEQ ID NO: 96747 - DNA, 436 bp, Glycine max
  Clone ID: PAT_MRT3847_58374C.1
aaaagcccccttaaaattaaaatattaaaattaaaattccttatgtttaaccccaccttcaaattaaaaaatcgggattaaaatggaaacggcttttactttaaattaggccggaaaaaacccctttaacataaaattatgacggcaacaaaatttttggataccctcggaaaaaatgggggggataaactggggggacccgggaaaaacactaaaactagggggctggacaaacgggaggggcaggttttttttcaaaccattgggaaaatttttatacatccacttgaatggggtgcaaaaaccagggtggattttcctttccagcccacccttggaacaaacaaaccattggaataattggggtttttccccaaaaaagggatgaagtggccccacaccctggcaaagggacggggtggggaaaagatttatg

SEQ ID NO: 96748 - DNA, 510 bp, Glycine max
  Clone ID: PAT_MRT3847_58375C.1
ggaattcatgagcttatcagcaacctttccaaggatagaggtcagttcttgtgtcattttcctcctttatctcatactgcggcaatagatatcagtaatgaaatgccactgatgtgccctctccagttaatgcagttaaaaatttctaatataaaagcacaaaacagcacctaatgtaacttaggctttcctttatagcttttttgtctttcctttttttagccttttttactttcttccttgctataattattatgagccatgtgaccaacagctcctgagaaaatacttgtgtgtgaatgcgcataactataacttacattataactaaaaagaaagttgggtacattagttcaactcatatagctatctacactttatagtaataataataatcgaaaaacaacagctttatttgtcaaagacagtttcccaagccatcttgggacttcaatgataaatttcttcacaactgaaaacgagtcattctctaaaccaaatgaaagtcag

SEQ ID NO: 96749 - DNA, 348 bp, Glycine max
  Clone ID: PAT_MRT3847_58376C.1
attaaaattaaaaaagaaggcaaagtgtacctataaaattatctttctctatatatagatatataaatgatgggggcctctatggtaccggcccggtccctgcaaatgctatcacgtctttgtaaatcgttcaagtacttaaatactacgatctctttcactatagctcttggcaaatctaccaattatgaacttgatttatttgatattatccatcactcattcccgacttaccccttcttttttttagcgaccctcctcatctattactcttcccttcgccctatttcgacttaagaatttgattcacagctactacctttgtaactatatcgtatactcaatgca

SEQ ID NO: 96750 - DNA, 751 bp, Glycine max
  Clone ID: PAT_MRT3847_58377C.1
cggtacctttgcaatataactgtgagggatgagcactttaagaccaaacgacacaagaagcggtatgctgcttttgattttgtttgttttttaacccccttgttttgaatcctatcctacattctccccatgtttatatttgaagattgattagatttatagaaattctttttgagttttgaggctactcatgtttttatttatgggctttcagatgtttaaacacataaagcagttggccactgtgaaaggaacatatcttgcttttaattgggatatgataattgagtgaaattgaacagaatactagtaaactcgagcttgtttagataaattatattatattgagcttgagatttaatcattatgaaatttatccttcatctaggctctgtaacaaaaagggaaataaccacgatggaagatcggtatagatcatggatgggaagtggttaatgaagtcatgcatttgattagctcgtattcagttcaatgacttgtgtatagtcagaattgcttatatcaagttaaaaaagacaacttctgaagtaattgtagctcaataataatgtcttcattgaaaatagggtgtttgtgggatttctctttttgctagaatctttagatgaaaaatgcatacagttacgaatagtttagcaacttttcaccccctatatattggtgttggggttgtttagaaattgagttacaataagattggagaccaaggtaacgtgttaaaagatcaatc

SEQ ID NO: 96751 - DNA, 278 bp, Glycine max
  unsure (1)..(278): unsure at all n locations
  Clone ID: PAT_MRT3847_58378C.1
gggcacgccagcnttcttgngcanntcantgntcccncagttnctaccctggtcgcntccatgnnnctggccanncctcccaagctccacacttgtgagaagtgcagtaccagcatcgcgaaccaggctntgcgcatccaggaggtccggtaccgccaccccggctgntacacctgtgcngactgtgggctgaacctgaagatgcgcgggcacttctgggtgggtgacgagctgtatagtgagnngcanncncgccatcgctantccgnnacctacnt

SEQ ID NO: 96752 - DNA, 766 bp, Glycine max
  Clone ID: PAT_MRT3847_58379C.1
aagattttaattaaaaaaatgagtataagaggtaatctaatccaacgaatttcgcatctatatcctttgcctgttgctgtgttgtgctctggtctcccacgccattctcggttcttcccctgctcttatttctcctcctgcggcctccagtgggtgactatggagaaagcaaatacatcactagtgagaacaaaatcagaccaactattagaatcaatggtggcaggcttaaagtcgccaccatcgagcgatcactccgcgaacggagtggtggactcgaggaagtcaagccgatggctgacgggggcctcgccggggcgcggcgggaagaacacccacataagaaagtcaaggagtgctcagataagtcaaatgaagctagagctcgatgatgtgagtagtggtgctgcacttagcagagcctcaagtgctagcttgggactctctttctccttcactggctttactatgcctcctgaagaaattgctgactccaagcccttcagtgatgatgatatccgtaagtacatgacaatttaattaccatacacttaatttgtataagactgatactcaaagacagttctataaatcatacacctcattatactagtattttttataattaacaagtgtcaaatgattttttaatatgttttattattataattagagtttcacagtcagagattcaccttgacatttaatcaagaccttgaacattattgagataaaacttcaattctaaacaaataattaacaacac

SEQ ID NO: 96753 - DNA, 457 bp, Glycine max
  unsure (1)..(457): unsure at all n locations
  Clone ID: PAT_MRT3847_5837C.1
atgagacaatactgagcatcgtctagctatctcgatcgaactggtcccaaggtccatgtcaccagcccaacagtagcgatatctgcgcccaattgtaggacccaaccccaccataaccaggcccatgtgagtgcgaacgtgcataggcatggcgttaacgtgaccatagaaccatttggtgtagagccctggcgccggtgtgtgcgggagcagaagccaggtacgcgggtactttgcaccggtggcagtggatgcacagcattgtaggcccaacggcgtgcatgccgcgtgtaagccggatggtatgggtagccatgagggtagagttaatatggctgctactattatatagcagggcngtaagcgttgataacaagcggtgcatgcacgtccggcacatacaggaggtgggtttcaactacataaccgtaacacgagtgcaaccatttaacgaaag

SEQ ID NO: 96754 - DNA, 156 bp, Glycine max
  Clone ID: PAT_MRT3847_58380C.1
ataaaacttgaatcataaaataatctataattattggtgcaccccccttgtggggaatttttgcagccggacccttatgacgtattctagaagccgtacccttgtgtcgatttctagcaaacgaacccttttgtcgccttattgcagacggaccct

SEQ ID NO: 96755 - DNA, 1689 bp, Glycine max
  Clone ID: PAT_MRT3847_58381C.1
gttacgtacgagtacctataccacccattcaccgactctctctctctctttccttctatctgacacacagagtcgccgacttactctgcactctgcaacagatgaagcacccaacatggcctcgcacctcctcttctcccttctcctctcttcctttctccaaccgttccgaattcttcaccacgcgcctctgcgcgcgtcctccgctgccgtcccctcccggcgccggcgacttctcggcgctcccctacgacgtgctggcgaagatcgccgcctccttcgacgaccccaacctccgcgcggcgtcactggtgtgccgcgcctggtgcgaggcgctgcggccgctgcgggaggccatggtgctgctccgctgggggaagcgcttcaagcacggccgccgcggcgtccgccccaacgtcgacagggccctagactccttcaccaaagccgccgtgcgcggctccgccctcgccatggtcgacgccggcctcatctactgggagcgaggcgagaagccgaaggccatggagttgtatcttaaggccgcggaactcggaaatccttctgctcagtgcaatttgggactttcctatctccaagctgaacctccgaacactgagaaagctgtgaaatggttacgtaaagcttctgtttgtgggaatgttcgtgctcagtaccagcttgcactttgtctgcatcgaagtggtgggaggtccgcagtgcaatttgagaatttcctaaatggtatatgaaagctgcagagggtgcgtatgtccgtgccatgtacaatatctccttgtgcttctcctttggggaacgactgccaggtaatcatcaactagcaagaaaatggatgaagcgtccgtagcaatctgaaagaagctgcgctctggtagaggaaagctgcagagggtgggtatgtccgtgccatgtacaatatctccttgtgcttctcctttggggaaggactgacacgtaatcatcaactagcaagaaaatggatgaagcgggctgcggatcgtgggcatagtaaagctcaatttgagcatggacttgctctcttttctgagggagacatgatgaaggctgtggtttacttggaacttgctactcgtgctggtgaaaaaggtgctgctcatgtcaagaatgcagttcttcatcggctttcatcagcttcacgtgatccccgccatgcatctagctaccagttggcgtgcattgccatcaagttgagccaatccttatgttggtttgtgatgaagaagttgcatgaccttggtcggtggcatcagaagagtgaagtcaacttaagaatacctaagcatagaaacttgggttccccccggagctctctgcagggtcgaccgtggcctgcgtttcctggccatggtgggcttcctagaatattgcgaacgctcgttcgtcgccgtttgtatatgctggttgaattggtttcccttgctgtgcgccccattgtccaggtgcatctgcctctcctcctcccctgtccaattctaatctacaattaattaaccatgtccaattttatattattttatgacatcgtttagtgtatcatactcatattactccatattgtataggatgaatgactgattaagtagtaaaaaaaaaaaaaaaaaaaaaaaaaaaaaaaaaaaaaaaaaaaaaaaaaaaaaaaaaaaaaaa

SEQ ID NO: 96756 - DNA, 485 bp, Glycine max
  Clone ID: PAT_MRT3847_58382C.1
ttaagattcattttatgattaactcatttttctgttatgctttttgagtttcaggtttttatttattttttatgtttaaccatattatttttttttttttttgggaaatcgcaaaaaaaaaaaaaattttataaaaaaaccccataaacatcttttgaaacctttaaaaaaaccaagagggctgagactaaacaaaaaaaaaaaaaaaacaacccttccaaaaggaccactcttttttacttaaaaaccccaaaaaagggcaaaaaaaaaaaaatcggaaacccccaactctggggggacacactctggactgcagaagcctggaaaaacaaaaaaaaaaattttgccgcccccttattatcaagaggggggggccaacataatgaaaagcgggcccccggcccttaaaccaaaaaaaacctaggttgggggctttgccgaaggctcaaaaagaacaaactttgaaaaaacaccccgcttgaacc

SEQ ID NO: 96757 - DNA, 287 bp, Glycine max
  Clone ID: PAT_MRT3847_58383C.1
gtttttcaacaatggactcacgtgttttggtggccacctactcataattgctcattattgagagtgattacaaacaatatgctagcatagattcccaattactgttgaagctaactggtgtcctataatagaacatgacttggaacatattgtagattgcccacaactttctgatagcaatttaaatgttgtgtggtcgtgccatattggagaacacccttatattttaatccaaacacacctgacattattttatttgtataaaaaaaaatgccttgtggcattac

SEQ ID NO: 96758 - DNA, 447 bp, Glycine max
  Clone ID: PAT_MRT3847_58384C.1
ggactacaaaaaaaatactgtatttaattgtgctaaactatatttggtaattcatacgagtgtggatttatatatatgtgtccatgtttatttagaactaaaaatcggtgggcgggtggggcaagtgtaaagtaacttcagcttctgtaagctccagtggtaaaggagcatctgagaagaaaccaaacagaaatttcaagttctctacaaggctagtaatgtagatgtgcttgcataggcaggccaattgatgtctgcatgtgtatgcattagattcaagtgtagatttggaaaaagagataaagcaaaagttgtgtttctgatgatttcccacataattattagtgagtgccaatctatgttgcatgtacctgttcgctgaaacaaaatgaattgtccaaccatccattggcctatgatattccaaatctcaaggaaactgattta

SEQ ID NO: 96759 - DNA, 472 bp, Glycine max
  Clone ID: PAT_MRT3847_58385C.1
ccacgcgtccgcccaactgcccttttcggagatctcgccgcctccgccgtcgacttccgtcgcccccctatcccgcgtccgggcttacccgatggcacggctgcactggcttgaggccgtcctgccgctggggatcatcggcggcatgctctgcatcatgggcaacgcccagtatttcatccacaaggccgcgcacggcaggccgaagcacatcgggaacgatatgtgggacgtcgccatggagcgccgtgacaagaagctcgtggaacaatcctccggcaactagggtattgatcaacctcaaacttttctggatgttgacgaacctcgttcaaaagcacagaagtactgctcttttgtttcctgtacaattggaaccaagacttgtttgttttgctttgaaatatcaacagttcggagaataatctgtatctgacatctggttaatttgaacaaagccaaaatacttgtc

SEQ ID NO: 96760 - DNA, 319 bp, Glycine max
  Clone ID: PAT_MRT3847_58386C.1
atgaaaggatacaaagttatgtatatgcgggcgtaaagaggtgggatattacaacccttttcattggaagagaacatgtatgcacttgcaccaaaacatggtgactagggagtgtgagatttgcatggggagctatatgctctccatcatgttccctctgaaattatcatggggaatccatttgtacttttgttggaacactgtaggcctacgttaaacaagtggcatgccctgggattttccagggcagagtttcttaccagtgtcaaatggggctcatgtaaaaatagaccactggatcgtgacgtaccttgccttc

SEQ ID NO: 96761 - DNA, 359 bp, Glycine max
  unsure (1)..(359): unsure at all n locations
  Clone ID: PAT_MRT3847_58387C.1
caatatcttttcacaanatnngatnnnntcagggccgttcaaataacattttcagcaacataataaancccattccttttatacttttataacctgccttgatattaaaaatacctttcaatctctcacattatttaattttttatatataacacttacaacaatttcatatgattaatattattttcatattcatttctctttatatcattctatctcttacttccatgacattattttattttttccatttcttcctacataatcttaaacgtcccttatttaaatagttcttcactatcttaatatttatctcaaacatttttttaattcaataatttaatattttatacattaaa

SEQ ID NO: 96762 - DNA, 1262 bp, Glycine max
  Clone ID: PAT_MRT3847_58388C.1
cccacgcgtccgcccacgcgtccgtctcttcttcccccaacaaactaaaccaaaccaataccattaagaaacaacacatctatctcagtccccaaaccaagaaaccctaaattgaacaagcccacggctgggcttcctaacaacacaacggcgcgtgttatcaaagacacatcaatatgtctcctaatcataaattcatgtgctcctccgggtctaccagtgctgcaccacagaccttcctacttggaacaaggccacggcttggcttccttaaaacacatggatgcgtgtcataatcgtgccaacaactttgtctctaggtccatgaccatgggttacggcacttcctaccacagaactagtttaaggaacaacaacaacaacaacaacaacaacgtttctgtttcttcaccaagatctgcgagattctacgacgccagattcgaagatcaacaccacccccacttcctctccgcttgttttctctgcaaaaaatctctcggggacaatagagacatcttcatgtatagaggggacacaccgttttgtagcgaagagtgtaggcaagagcagattgagatagacgaagccaaagagaagaataggaacctttcttcatcgatgaaggctttgaggaacaaggagcagagaaataataatagatccacgtcgccaaacaaggcgcaacaagattactcgttccgtacgggggcagttgcggcggcgtaggcggtacaagtacaacataggatttctcgagatctctcgaggaaccaacaaatgaacgaacggaactgaggacagtgtttccggaaaaggaaagaaaacatttttagaaaagaagaaaaaaaaagtgtaaccgaaaaggaaagtaacaaagggaagttaagtggcgagctttggtttacttttttttttctttccaccaacaaagggtctcaagagagaacagggaaatttttgtgaatgtagctgtaaatggtatacgtgtggaaaagtgtgtgtgcttacaacagtgggtgatcctctctgccaaatgactcagattttcgggtttgccttttcttctttctttcttttttatgggaatcaaatttggttttgtttccttttgtatattaccctacctcgttgagttataatggttgtgccaatagtttcagttttttcaaaacaaggaaactgaatacaatggaaattttctctaaaaaaaaaaaaaaagggcgtcccccgccctggcatgcgaaagttataagcttttt

SEQ ID NO: 96763 - DNA, 423 bp, Glycine max
  Clone ID: PAT_MRT3847_58389C.1
ggtgttcatttgggttctgcacataaaggtcctatgtatggggtaggtgctgcttcgagaaaggggcatgagaagccacgcatgaatcgtcgttgaaattcaagcaactgctattggtgatgaaatggaaagctgggattcttgttgggggaggactgagaagtaacgaaaaaccccatatatttattttgaataacaccggtaggttctttattatttcaaaatgtgaaattcgttgaagctcttattggactgaaaaaccattggtcactggtggatggatatattttacctggctgtgatggattgagataaacgcattaccatgcctttgttgggttggatcacattattgagattggaaatgaaagctttagcgtgaagcaactaaacaagggttgtttctaacttacaaatgttagt

SEQ ID NO: 96764 - DNA, 481 bp, Glycine max
  Clone ID: PAT_MRT3847_5838C.1
ggcttcctcaatgatctcttccccagctgttaccactgtcaaccgtgccggtgccggcatggttgctccattctctggcctcaagtccattgctggcttccccaccaagaagaccaacaatgacattacctccattgctaccatcagaggaaaagtgcaattcttgcacgtgtggccaccacttggcaagaagaagatagatactctttcctacctgccataccttgatgatgcacaattgccaaatgaactagaataccttcttacgaacgtatggattccttgcttggaattctagatggagcacattttcatgtaccgtgagcactacacttcaccaggatactacaattcacgctactgtaccatgttgaagctgcctatggttgggtgcactgatgcttctcgggtgataaaagagcttcttcaggctaagactgcctaccccaacgggcttcattcgtatcatcggattcgacaa

SEQ ID NO: 96765 - DNA, 416 bp, Glycine max
  Clone ID: PAT_MRT3847_58390C.1
ttcctctcgcattgcacaattgtttcacgatcaccaacacaaatggtgaaagcgaagcagtctcaggtgtggcttcggaaatcatggtggagggtgtcgtggccggggacgctgacgctgctgctgcttctgacgtgctcgtttctcattctcattccacttgctctccgcattctctccactccccatgtcaactcctcctctgctctctccaaacccaacgatctcaactccgtccctcgcaacactcacgtcagcgaaggtgaaaacaaccgggtaaagcggtgggtagaagtaatgtcctgggagccgagagcttttctctatcataactttctgagcatggtgaaccacttcatgttatccgttatgcagtaggacaatattatgaacctcatgtcgactactttgaggaa

SEQ ID NO: 96766 - DNA, 112 bp, Glycine max
  Clone ID: PAT_MRT3847_58391C.1
atttatctctaatactcgaagtttacttccaattctatggggtactccccaaaacatttgattcttaaggaaaggacaaaaactctaaggggggcgggaaacacataaaact

SEQ ID NO: 96767 - DNA, 1000 bp, Glycine max
  Clone ID: PAT_MRT3847_58392C.1
acattcctctcggcaacggatatctcggctcttgcatcgatgaagaacgtagcgaaatgcgatacttaggtgtgaattgcagaatcccgtgaaccatcgagtctttgaacgcaagttgcgcccgaagccattaggccgagggcacgcctgcctgggtgtcacacaattcaatttcaagtctcaccagttgaacattgttctcttcctctcgcattgcacaattgtttcacgatcaccaacacaaatggtgaaagcgaagcagtctcaggtgtggcttcggaaatcatggtggagggtgtcgtggccggggacgctgacgctgctgctgcttctgacgtgctcgtttctcattctcattccacttgctctccgcattctctccactccccatgtcaactcctcctctgctctctccaaacccaacgatctcaactccgtccctcgcaacactcacgtcagcgaaggtgaaaacaaccgggtaaagcggtgggtagaagtaatgtcctgggagccgagagcttttctctatcataactttctgaccaaggaggaatgtgaatatctaattaatacggccacaccaaacatgctaaagtcactagttattgataatgaatctggagagggtatagaaaccagctatcggacaagcaccgaatatgttgtggaaagaggaaaagataaaattgtgaggaatattgagaagagaatagctgatgttacttttatacccatagagcatggtgaaccacttcatgttatccgttatgcagtaggacaatattatgaacctcatgtcgactactttgaggaagatttagccttgtgaatgggggtcaacggatagcaacaatgttgatgtacctttcaatgttgaaaggaggggtgagacagtgttcccaattgcgaatgcaaattttagctctgtgccttggtggaatgagctttctgaatggtgacaaacaggactttcaattagccaaaaatgggtgatgcttta

SEQ ID NO: 96768 - DNA, 610 bp, Glycine max
  Clone ID: PAT_MRT3847_58393C.1
tttttttttttttttttttttttttttttttttttttttttttttttttttttttttttttttttttttttttttttttttttaaaaaaaaaacctggttttgctttgataaataggggagggcccctttttccttactttggtttttgggcctgtcgggccctaattaggggggtttaccccttcttggcctttgggggttttacaataaaaaggggggggaaagaaattaaattaacccccttggggggggggttccgggggggggttttttgtcccttggacgggctttttttttataattggggaagggggctttggcccttttggggggcccttagggggacccccctttttttagggggtgtaaatcgggccttttgcccccttgtttgaggtttagcccccatttttgggggatttggggtttagggggggacccccccttaaggggcgtattggatggggcccccttaaaaatttttttttttttttaatttttcgggcctttttgcttggtgcccctttattttttatttttttttttccccgtggcacaaattcttttttggggggtgtggccgctttccccattcatgggggggggggg

SEQ ID NO: 96769 - DNA, 339 bp, Glycine max
  unsure (1)..(339): unsure at all n locations
  Clone ID: PAT_MRT3847_58394C.1
aacaacccccggggaacaaatatggtttcgatgaaggaaaaattttttcgaaacaaaaaaaaaacaaaccnaaaaaaaaaaaaaaggataaagtgggggaaaatgcgacaaaaaaccaaaatgataatgtcgcccacaaaaaatgggggggccagcagaggaaaacaaaaaaacaaggaatagggggggcttacaaaaaataaaaggggcgaaaccatgcaacgtcgaacatgagaaaattatggggaagccaattaaagaaggtggggaaaacataaatccccccgggggggaaaaatgaaaagcgccgcaaaagaaaatttataaaagcatttgccc

SEQ ID NO: 96770 - DNA, 341 bp, Glycine max
  Clone ID: PAT_MRT3847_58395C.1
agcccacgcgtccgctcacacgtccgcctgctacttggtatcacaagtatggctggtcttggcaaaactgacgtttctcttacctctcaaattgccatcatgctttcagcttgagtacaacatttgacaattgcgtgagttcgtccactaggacatatcgtgtaatgttcggtgatgatggcccttgatactttggtgattctgaactccgatctccccaatgttctaacttgtcagcctctcatatctaaccctcgttagcagatgccccaagttatttccaaagggagcgtctagtggaatacatcataggggtgaaatctactatggtcacagacctg

SEQ ID NO: 96771 - DNA, 211 bp, Glycine max
  Clone ID: PAT_MRT3847_58396C.1
ggaattcttggtatttttgatggagaaatggagaaatgaataatatgatagatttatattaccgcaagaatactattgttatttgctcttctgaagggaagagggagccaagattcttgccattgaactttgatacgatatcatgtcaattatctggtgtgaaacatatcgttgtaatagacttcttaataccacccgtttacagaattaa

SEQ ID NO: 96772 - DNA, 515 bp, Glycine max
  Clone ID: PAT_MRT3847_58397C.1
cgatctttttttttgcaaaatttttaggcagacaaaaatgcagctccaccaccatagggggaaactcccggaatacatataattctaaagaaccaatacagctaccaaacagccacagagggtgaagaaaacaaataagactgtcctgccatgggtgtgccaacctgatggccaagtatctaaccctaaaataagagggtctatcactaaaatccttcattaagcccatgcggtattgctcaccaaatggcaagaccattcattcttggcttgatagcgaggaaactatataggcgttcatcctctgatacctcaatgatgaaaagacaatgtccaccctatgccaaaaccatatccgccatacaaaccaacgtgcttacaagatgctggccaccaaactgcgccacctggactaatctaccctcacaatatccagtagactcccatgctcatagccattcttgcatccaaagtgatccaacatggacaaccatttgtgccttctatacaggctc

SEQ ID NO: 96773 - DNA, 257 bp, Glycine max
  Clone ID: PAT_MRT3847_58398C.1
gcgtcttagttagtaccaaggacgagaaacactctcgtcgcgggaaacttgataggccaaaaccccccagtctcactatgcctccctagggcgttcaatcctgagggtcgccaaaagtcgttaaaagcggtgaggttgacaaatgaacaaaggggacagggctaatggtcacgtcggaattaacccatggaccatggaatggcacggggaggacaataaattcctgcataggggccaccatattgtgtgttgacaat

SEQ ID NO: 96774 - DNA, 928 bp, Glycine max
  Clone ID: PAT_MRT3847_58399C.1
ctcgagccgaatcggctcgagcacgaatacaaataagcttcgtttggctgtgtctttctctctaaccaagcccctttcgcctctctctatcgcttctagctgtagagattactatttttccaaccctctctctttctctcatcatcccccttttccttctttttcttcttcttcttcttcctcctccttgcaccactccttatattatctcataaaaatcactctgaggagaaacactataatcaatcatggaggggtctcacatggggttgttgctcttcttttcttccatgctttttgctgccttcccttctgcctcctccagaaacttgcccgtcataccctttgatgaaggctacgcgcccttgtttggggacagcaacttggtcatccatagggatggcaaatcggtccatctttcactcgatgagagaacaggttcaggatttgtgtcgcatgatctttaccttcacgggtatttcagcgcttctattaagttgccttctgattacactgcaggagttgttgttgccttctatatgtcaaatggtgacatgttccagaataaccatgatgaaatcgactttgagtttttggggaacattagaggcaaagactggaggattcagaccaatgtttatggcaatggtagcaccaacattggcagagaggaaagatatggtctctggtttgaccctgcagatgatttccatcagtacactattgtctggacagactctcagatcatattttatgtggacaatgttcctattagagaagtgacgcgaacagaatctatgggaggagatttcccttctaagccaatgactttgtatgcaacaatatgggatgcatctgattgggctaccaatggaggcaaatacagggttaactacaagtatgcaccctatgttgctgaattctctga

SEQ ID NO: 96775 - DNA, 345 bp, Glycine max
  Clone ID: PAT_MRT3847_5839C.1
tacggctgcgagaagacgacagaagggtttcccagggttgagttcctacattgcatgagttgtaggaaggagcacaagctacgtcttaagagtaaaccaaacagtaagaactaccatgatgctttgaccaacaaatactggacatgttatccttggccttatcaaaagtaaggtattatcttgtgaactttctagtttaggtttcagttttatatttttcaaggtagttaacaacatctacatacctggaactcaaactcaagaccatttgtaattaacaacttttcgcgagaggatcatccacgcactcagagatgtacagataaatgaccgaattgattaatg

SEQ ID NO: 96776 - DNA, 3198 bp, Glycine max
  Clone ID: PAT_MRT3847_583C.1
ggctcgagcgaattctcacgtgaagttccgtttgaaacagaacacaccagaagagaaggccaaggccggcacactttccactcttccatcacgcggatcgcaccgcaataaacgacacccagattgatcgcgattcgcccaactgatttacaaagtggaaccgcaatggaggcagctcagagaagattgggaggaggaatggtgccgttgtcgccgtcacagactccgcgctccagcgataagcccgtgcgagatctgcgatctgcggattccaattccaacagtcacagcaagtatgataaggacaaaggtgtcaatgtgcaggtcctcgtgaggtgcaggccgttgagtgaagatgaaacgaggctgcacacgccggttgtgatttcgtgtaacgaaggtagaagagaggttttagctgttcagaatatcgccaacaaacagatcgatagaaccttcgcatttgacaaggtgtttggtcctaactctcaacagaaagaactgtatgatcaggcagtgtctccaattgtgtatgaagtgcttgagggctataactgcactatttttgcgtatggacagacccggacagggaagacatacacaatggaaggaggagcaagaaagaagaatggcgaatttccgagtgatgctggtgtcatcccaagagctgtgaaacagatttttgatatattggaagctcagaatgctgagtataacatgaaagtaacatttctagagctttacaatgaggaaataacagatcttttggcccctgaggaaacttcgaaatttatagatgataagtctaggaaatttgcaggccgttgagtgaagatgaaacgaggctgcacacgccggttgtgatttcgtgtaacgaagatagaagagaggttttagctgttcagaatatcgccaacaaacagatcgatagaaccttcgcatttgacaaggttttatccagcttcagatacctgaaaagagaagagcgagatggcgtcggtggtgaagaacgaactcaaatccgtcagagaaaagggtttcggcgctttcctcagagagctcaaggatggaggctacctgagatgccttccggatggaaatctctttgttagaggaactatcgataggtacaagaaagcatgtgctgcctcaccaaatgcagaatctggctcgagctttttcatctccgttcgaaaaccccgatttccacttcgaattcgttcacgctgtcaaactccacaacaacatcaaggagcacttgagtgcccaggggaatcacctttgccgatctcgtcacgccgaatcctcatcgaaccaacgctcttctcaattttggtgcctatagggacgtgaggttgaactatcttggaaactgaggacgaagtgaatgcgatagaggcacaacaaacagagttggaggagaataggatgttgcaggaagaaactcaggtttgacaacgccatggttactcttcaatcagccaagtgcttgattttggcctcggttcaactcattggtaatcttagcaaagatatatacttcgttttgatccttgcaagagagagagagagagagatttcatccatacacttgttgttgttaaatctaagtatttgcttgcagcaaagttccgtaacagtggtaagggaggaggaaggaatgagggaaaagttattagaaaattcggctcgaggaaatggcgtgtggaagaacgtactcagagaaaagggggtcgacgctttcctcgagctcaaggatgaaatctacctgagaatgccttccggatggaaatctcttgcaaaccaagatccacaatattggggcaacacttgttggctgcggaagacgacagaagtggatattttgcaacattttcacctcacttgaatgcataacaccaaagtacgttcagtattgttctccgtacataaaccttagatggaatatcgtaacgaagctatacgcgaagagtattcacagaaaggaacaggaatatgggaaaataggggtcaagcggatcaaacacaccaacgaattgtcaagtaaccttcgtgcaaaccgccgtaacgggttgctcaagaaaggcttatgaattgtctgttctgtgtgatgctgaggttgctcttgttgtcttctcaagccgtggacgactctatgagtatgccaacaacagtgttagaggaacgatcgataggtacaagaaagcatgtgctgcctccacaaatccagaatctgtgctctgaagctaatacacagttttatcagcaggaagcgtcctaaattaaaacgacaaatcagagacattcagaatctaaacaggcacatccttggtgaagctcttagctctctgagtctgaaggaattaaagaacctggagagtagactggagaaaggtttaagcagagttagatccagaaagcatgaaactttgtttgccgatatcgagttcatgcaaaagcgggaaatagagctgcaaaaccataataattttctgagagctaagatagctgaacacgagaaagcacaacaacggcaacaggatatgataccgggaaatgtgtgcgagtcaaccatacctccacaatcatatgaccgcaatttcttccctgttaatctcatagattccaataatcaatattcaaatcaagaccagactgctcttcaacttgtctgataaacgatttgaaattatgccgcagcctttcaagtggtgtgggatcccttacatcgtcctatgtttcgtgaaggagagtgcccttagaaactcctctgctaaagttcttacaacggagaacaagagaaaaactaatcagcatttgtaccaatacatcatttgatattgtttatgtatctttcaatatatatagtttctattcagtcctggcatattgtatttttatgttataaatgcttatttcaatatgaacactatatctatcgaggagtaaaagttaactgggcgtccgcattattcatcaaagttggacaacaaagaggaggggattaaaatcagtgggttacttttgattctcaagcatttgagcaataacacaactattgtatttgattgtgttgcaagtcttacgatgggtaaaataaaaataaaaaatcaaagtgaattagtttgagtactatggaattgtttgcaggataattttcgtgaaattaattcaaaaatagcttccaagtaaaaaaaa

SEQ ID NO: 96777 - DNA, 546 bp, Glycine max
  Clone ID: PAT_MRT3847_58400C.1
gccggaattcccgttcggcccgcgcgtccgctctatcgcttctagctgtagagaatacagattattccaaacctctctctttctctcatcccctttttgctccttcttcttcttcttcttcttcttcttcttcattactcttccttgctccactcctcatattatctttttctgaggaaacacataatcatggaggggtctcacatggggttgttgctcttcttttgttcttccatgctttttgctgccttcgctgctgcctcctccagaaacttgcccataataccctttgatgaaggctacgcgcccttgtttggggacagcaacttggtcatccatagggatggcaaatcggttcatctttcactcgatgagagaacaggttcaggatttgtgtcgcatgatctttaccttcacggatatttcagcgcttctattaagggggcttctgactacactgcaagagttgtgggtgccttctatatgtcaaatggtgacatgttccagaataaccatgatgaaatcgactttgagttttttggggac

SEQ ID NO: 96778 - DNA, 230 bp, Glycine max
  Clone ID: PAT_MRT3847_58401C.1
gttcttgtgatgttgatatcattgacacctcaaaaacatcacaaggaaattatgtacaacttagacctgcattgagcataatttccttgtgatgttcttgtgatgttgaaatcattgacacctcaaaaaaaaaaaaaaaaaaaaaaaaaaaaaaaaggggggcccccagattagggactctgcggcccgagaattttattggggccgggcccttgagggggatccatttt

SEQ ID NO: 96779 - DNA, 356 bp, Glycine max
  Clone ID: PAT_MRT3847_58402C.1
acggctgcgagaagacgacagaagggttcctctttctgttagttatatattttggtgtataattataatttctctaataaaaatttgaatcttaatggcgctattttagagaaaactaattacttacccgtcatctctaatcttctagtgtttacatgcatggacttcctattaaaaaaagattgtgaagacggccactaataaaaaattaaaaagataaattgataattgttatacatatctaatttaaatatttatatcacaaagaaaggatctaattttcttttattttattgcttcttttgggttaaaatattagaaatttaacctcttctggatttaatttttatcccata

SEQ ID NO: 96780 - DNA, 327 bp, Glycine max
  Clone ID: PAT_MRT3847_58403C.1
aaccaaacaaaaataaaccccttggaattttgacattttttttgaaaaaatttccccaaaatctttctttttggggaaaaagcctgctcctccccttacaaaaaaaaaaaaaaaagacccactgtgtggggccctggagcacattttactcattttggacatgtgggggggaggggagctaaaaaaacaccccgtttcccccttcaaaaagaatgaaattctccccccctgtttggtgaagagacaaccttttaccaaaacaaaaacaaagagagggggcatctttttttaaataaaaagggacctacccattttttttgccaattt

SEQ ID NO: 96781 - DNA, 440 bp, Glycine max
  Clone ID: PAT_MRT3847_58404C.1
aagattgattgaaggatttgttattttttactagtttttctctccagatatggggttgctgagacagaacagttgaactatttttagttgtttatctatatgaatagctttttatttgtaaggattattatgctacttggtaattgttctgtctagggtttcgctggagggagagagtggtgctaagaccatgtgctgatgtgcttacttgtgaagttgttgttgttaaatgtattgttttctaaaaatctgtgtctttgtgtatgtgcttgacattatcttgtgttttgaattataattgtggcttgctcttgctttgactagctgaattttaggtaagattgcctacgtagggacatgattagtctgtatatatgaaaataaattgtctccttggagagtaaaaaaatatgtgctagtgtctgatctattcaaatgtt

SEQ ID NO: 96782 - DNA, 205 bp, Glycine max
  Clone ID: PAT_MRT3847_58405C.1
tttagtttgactttcacaaaccggctatcattaaagatacatgctcaagaactctaatcaaccattaatacacacagaatttagtctttaacactcaacaaaaaacacaagaacattcattcacactaaatacttgtttgaaccatgcataagtagaagaaggaatctaaattctacgaaatcactacagaagaaaaccacaaaa

SEQ ID NO: 96783 - DNA, 303 bp, Glycine max
  Clone ID: PAT_MRT3847_58406C.1
tccacacccccggccacacagagaggcggaggggacgttggccaagaagccggcccactaggcggcgaagaacaagagagcccggagccgccaacccacacacaacaaacctaagcagaacgcaacggagaacgagcaccaggagaaggaactgagccgagggacacgcgaggccaagctgcaaggcgcacccaagggccagccagaggctacacaggcgacgaaagctcccaagcggggcacaaaggccacggcacccaactcaaggaggagcccgcgacggcggcgagggacacagacgga

SEQ ID NO: 96784 - DNA, 262 bp, Glycine max
  Clone ID: PAT_MRT3847_58407C.1
cgaaacaatcgtccatttattaaaattcacccgaggcatttgacaagtcccatccatatccggagaaaagttaaaaattgaagagggttcttacatttttcccttaatgaagaggctttgatcctacaccaagcacacattctcaagaaactatggctcttttaaactgtgtgaccatgttcaaatccttaattgaaatgaacttttatacatgatttttccctttcattttgtcccaaggaaaatcatatttctcattctg

SEQ ID NO: 96785 - DNA, 514 bp, Glycine max
  Clone ID: PAT_MRT3847_58408C.1
aaggcaaattacctttttttattttattcaaattgtatgactgaatagggattgatatgatatcattatgccggatacttattaacctaatatctaaataccctatcaagggaatgaaccagttagtatgcttgtctgaggacaaactcaaatgaagagctttaaatgtcttgaacatgtttagtcaaaaagccatttcgacattaaaattaaagggcctgcttggccttagctaagtacttaatgttgcctcatttggcccattataaaaaggataatttgcgtatcctataacaagatcttggtttgcaaaaagagctcctgatatacttggcaattaggtgcattgagcttaagccttaaaaccacagttggattgtcacatgaaaagaccaccatttagatccatatcagtatggcctttaactacagcttccatttctgagtccctagtaaaagctacactacacatgaatggtccctcataaccctgtcttcatttatgcttaaaatg

SEQ ID NO: 96786 - DNA, 429 bp, Glycine max
  Clone ID: PAT_MRT3847_58409C.1
aaaaaatggataacttatttaccagtcacaaacttatggcatccgacaagaatggatacacattacacaggaatggtttaataagctaaagagtgcccccttatctagtcacggaaattttcacctcgggtgaaaaaaatcataaacattaggagatttccacaaagtactagggaaacctttcaaacatccattagactttgtacacataatttctttagctccttgtcttagtaggcaggtattcccagaattatatttcacaaaccaattttaatgcagacatttcaaatggaacgacaatggtcaactgtgtctctaaattgaacctctgtattcttagggtcacaagactccttggtcaccttagagtgaaattgatccattaaagggacttgagcatccagatcctaatttatacaatgggcc

SEQ ID NO: 96787 - DNA, 515 bp, Glycine max
  unsure (1)..(515): unsure at all n locations
  Clone ID: PAT_MRT3847_5840C.1
taagagtatcaccgattcattcaggtaagacaaatgccatttctgttaaggtttgtcactttagaatttgttcctgaactacaattttgtaatttgctgtattgttttcctggggcttatctggaaaaaatttcatgcttggatacattggaagtttgtatacctggtccttcgtcaacaatcctaatgaacatttaccttcttttagtgagtagaatatgatatcttctgaaaatataatatcactaccaatctatttgaatgggaacaggtattgagtagaatacatatatgccgtcaattttaaagtttcggttgattctgtatgtttcctgtatgggtgcatgggtgcaatacaaatgtgctgtcaattttaaagtatctatgtaccagagctaccaacgctacttactgttttacccgacttgtatctaatgtagcagcacagaatctaggttttcttaacttggttgggaattntgtatgttttgtgatgtggcattgctagtgtagtt

SEQ ID NO: 96788 - DNA, 266 bp, Glycine max
  unsure (1)..(266): unsure at all n locations
  Clone ID: PAT_MRT3847_58410C.1
ttggacgcgnggtttccacaacccaaagccaggaaagcaaaggaaccggacacaacggccaccaccacgaccgccccccgcgaancgacgacggacgaacaaaagccaacagaaccggcgcacaaacgagagcaggnggaggaaaagaggagncaacaaaacgaagaacggcgactgccagaagaacnacggctncnncaagaccggcaagnncgcaaagaacgcgagaacaangacgaaaggaggaaaaacgggagccagaaaag

SEQ ID NO: 96789 - DNA, 297 bp, Glycine max
  Clone ID: PAT_MRT3847_58411C.1
ggagaaaaaggaaagctggggaacaagataaaagagcaacacagggggcatcccgcaaacaactacaaggggatatagaggccaatcataacaaaaacagccaggcagaaggcaacaacccacacaaggtacaaacgaccagagcagaaggccccaggaggatagggcccagacaaaaacgacacccaccaagcgggcacgaagaaacacagaaaccggggaaagaaaaagcccatccaacaatcacaccaccacaaaaccaagcaaagcaaaccaggccaaacaaagcagcaaggc

SEQ ID NO: 96790 - DNA, 327 bp, Glycine max
  Clone ID: PAT_MRT3847_58412C.1
ggaatttccgtggcgacccatcggacgctcgtccgacgcatcaacactacggccgactggaggcgacttgaatgaaagggaggtaatcttaagtggaaccgtttgcaaaattacccgttcctcgtacctcgaatgcagtctaaacttggggtcgctgaagtcacagccatatacgacactagacatatttgtgtgtctcccattgcaggcaatggactcctttaagttgttcttcgattcaacaaaccgctggacttactagactcttcaaaacttgccgcaaatttctccggtcgttcagaattacctcaagcgggtgtattttac

SEQ ID NO: 96791 - DNA, 142 bp, Glycine max
  Clone ID: PAT_MRT3847_58413C.1
ggggcttggtggcaccatatcttatggccatgatccatgttgctgtagaatccagattttactataaaggattctcacctgaagaaatggtctatgccttctggcggtgagaacatttctttcttctttctagggttatcac

SEQ ID NO: 96792 - DNA, 343 bp, Glycine max
  Clone ID: PAT_MRT3847_58414C.1
ctcacacgtccagattatttcattttacatttccgatcagactgggagacacgcttagaaagcttcgggctgcgtcctttctcacctagcgattccttaaagcactcggcatcctacacctctaaatttttggggaccgtgagcttgaaaactagaattaacttgggttacattatagaagctgtcgcctaatgctcaatgactgttgtaaccacagaggatacttccaccaggaccttgcgtgaaccgggtatccctatccgttaacatatcaggggttcggctgcatttttgggaacgatcaagttgttgtttggcatggaccatgcactgcgaacacctt

SEQ ID NO: 96793 - DNA, 495 bp, Glycine max
  Clone ID: PAT_MRT3847_58415C.1
cggcaacagttattttagtgtgaaggtgcagccatagctcagtcacttaattcatcgggtatagttagtgtgaatgacaaacagatttacattcagttgaaaatcgtcattataatgtgcactttggcaacaatataagcagaaagcatgatgactacaaaagtgagttccgacaacttccaatccttcgacaaatgcatcacagttttgaattcatgctatactacaccaggacaaatttgttttgaaatctctgccttgcctcatcctcccctgtccccagtaatgaaatggccgtgacatgaagaacaaaaggaagattggaatttagaacgcaccagataaatcctcaagacaatcaaagacacaatgaagagtgttcctgttccaccagctagtataaatcttagaggctcctgcaaggttgtgaacgttaatgcagacataaggaaattttatgagcgttataaatgttgtgtgcagctggcacgtatt

SEQ ID NO: 96794 - DNA, 1126 bp, Glycine max
  Clone ID: PAT_MRT3847_58416C.1
cccacgcgtccgcccaaaacgacaccgtataacgcaatcatctcatcaaagccctccctccaccgcgcttccgaacgcatcaaatcaatcatcacgctcttctctctagagctgctgcgttgctaaaacgcaccggtttgttcctgttctcgttcaaaagaaaactgacacaagtgaggcttggtgcataaacagcaatggcagaaaaaccccaaccggttcgggttctctactgcggcgtgtgcagtttgccccccgaatactgcgaattcggatccgatttcgagaaatgcaaaccctggttgatccaaaacgtccctgacctataccctgatcttctcaaagaagagaaggaagctgataaagttgctgacaaactacaaagtacgggtatatctggagctggtgatggagctgcttcctcagcaccgaagcaagaagaggtgaagcgtcttcctggtgggaagataaagaaaaaggataagcaagaggttgttattgagaaggtcgtacgtaacaagcgaaagtgcatcaccactgtgaagggactggaactttttggtgtcaagctcagtgatgcttccaagaaactcgggaaaaagtttgctactggagcctctgttgtcaagggacctactgagaaagaacaaattgatgttcaaggggatatagcttatgatgttgtggagttcattacagatacatggcctgatgttcctgaaacagcaattttctttatagaagatgggagaaaggtcccagctgcttgattttgatatcctggcattaaaactaaggactgattgcaagactctgctatattactgtaatcccccaccccacttttttcccttctcatatcccccaaaaaagaacatagtgtggccatggtggacatcaacatatgtatttttagtcgaacgattatttaattagtggtgtgtagaggcaaaaagaagaaaggttcgtttgcatcaattttgtattctcatcgaggttttatttcttcaaaggatgctaatttgtgggaataagtctctgcttgcattaattgccaagcttaaatctagggtttagttagtgtctgaacataaaaccagaaattaaaccagaattagagtgcttg

SEQ ID NO: 96795 - DNA, 371 bp, Glycine max
  Clone ID: PAT_MRT3847_58417C.1
ttttaaaagctgagcgcttaaaattaggaaaggccacattttttttctttttattttctacaagtgtttaccgaccaaaaaaagccgggaaaaaaaaaaacttcttttttttttttttggaaaaaaaggctccctaaaatttcccacgtttcaatgtgcacaaggcccgatatctagatttcataaaacctccgcataagaaaaattttttcttggggctgcttttttttttcccacaaaaactgttttcccttttatcccccccccaaaacaaaaaaaggtggcccaaaaatggggcgggaaaaaagggggtggggaaaaaaaaaaatttttaccctgccccccttacaattttttaaaagaggggcttc

SEQ ID NO: 96796 - DNA, 1010 bp, Glycine max
  unsure (1)..(1010): unsure at all n locations
  Clone ID: PAT_MRT3847_58418C.1
ccacgcgtccgggttcccaaaacgacaccgtatcaagcaatcatcccatcaaagccctccctccaccgcgcttccgaacgcatcacccttttgtctctagtgctgcgttgcgaaaacgcaccgttttgttcctgttctcgttcctaagaaaactgaacaagtgaagcagggtttgattcaaagctcggtgcataaacagcaatggcagagaaaccccaaccggttcgggttctatactgcggggtgtgcagcttgccccccgaatactgcgaattcggatccgatttcgagaaatgcaaaccctggttgatccaaaacgtccctgacctataccctgatcttctcaaagaggcaaatgagaaggaagctgataaagttgctgacaaactacaaagtaccggtatatcaggagctggcgatggagctgcttcctcagcaccgaagcaagaagaggtgaagcgtcttcctggtgggaagattaagaaaaaggataagcaagaggttgttattgagaaggttgtacgtaacaagcgaaagtgtatcaccactgtgaagggactggaacttttcggtgtcaagctcagtgatgcttccaagaaactcgggaaaaagtttgctacaggagcctccgttgtcaagggaccaagtgagaaagaacaaattgatgttcaaggggatatagcttatgacatcgtggagttcattacagatacatggcctgatgttccagaagcagcaattttctttataaaaaatgggagaaaggtcccagctgcctgatttttatatactggcattaaaactaaggacagattactagactctgcttattactgtaatccccccatcccactttttccccttcccatatcccccaaaaaagaacatagtgtggccctggtgaacatcaacatatgtatttttagttgaacgattattcaattagtggtgtgtgtaaaggcaaaaggaagaaaaggttcgtttgcctccaaaataaaaaaaaataaana

SEQ ID NO: 96797 - DNA, 246 bp, Glycine max
  Clone ID: PAT_MRT3847_58419C.1
tttcgattttcaggtcggcggaggtgaccagtgggagctagttagcaccggtgagggtggcggcggatcctagtgagcaagaatttcataatgagttagtacttatgggccttcgaagccataaggtaaatggaacatctcctctgtactgatgacaaacttagtgaactatttggttttccagatgaagatcataagctggacgatatcctatctgatacaagagacgatgtgggacttcatctg

SEQ ID NO: 96798 - DNA, 244 bp, Glycine max
  Clone ID: PAT_MRT3847_5841C.1
ccaattaagacatgtatatatgggtaaggtagctacagaacttgtgaatacataaatatattcactatatttaatccatctaagaatcttattcggtggaatcaagatctgtgacatactattgacaacggtcacacatgagttgtacatttttgccattgctcaaagagatgaatctacgtgccttcatatattaaacattaagggtcaatatgcgcgaagagttactaacattataagattc

SEQ ID NO: 96799 - DNA, 261 bp, Glycine max
  Clone ID: PAT_MRT3847_58420C.1
ggctcgaggtgagacttagacctctttatgtgtacgacaggaccaagcaccactgcggggacggtaacgtttacgaagaccatgctacccaacacaagcggacccagaggacctataacagggaaggcaaagcgagaaagaccagcgcctggagcggctggcaatggcagaagccagcaaaggccaagaccccgagagtcaacggaccattgccgcgggtcccagagaaagacactgaaccccaccctacaggcaagggca

SEQ ID NO: 96800 - DNA, 156 bp, Glycine max
  Clone ID: PAT_MRT3847_58421C.1
gcagagaaagggacacaatcaggtaacgatgcaaggttttaacaaacggttatggcagctgcaagggttttcggagcgatagccgcgacagcgttcatggacccagggtcaaagagttcggccaatcaacaaacacgttccgtccggcggagccga

SEQ ID NO: 96801 - DNA, 514 bp, Glycine max
  Clone ID: PAT_MRT3847_58422C.1
ggggtttttatttttttttgtttttttatatcttgttttatcctgtttcctttgaatctgtctttattggatctaggcaaaatggaacttctcttgcccggcatgaaagcttggataatggctctacctatgaactaccccctcgagttttggagagagccacaccgagggaacccgaaggtgaaaaaatgttgttgaggcacgatataaggcactcgttaaaagaggaggggggaaatttggttagaagggagaccgaacccaacagtgggttaacaaaacccccccgggggctgtaatatccttggaagcaaaaaaaaagctggggctaaaacggggggtcttatatgcatctagaaccaatccttttttcgtcacaattgagggggggccccttttgggacccgcccgcaaaatgttggaaccagaggtaagatcccaaaatagagaaaaggtccgggcacttttgctctataatagttcggacccctttggaaaaagaaaaaaaccccct

SEQ ID NO: 96802 - DNA, 310 bp, Glycine max
  Clone ID: PAT_MRT3847_58423C.1
atagaaaaacacacacccttcacacatcattacgacacttaaaagaggtggggaaattttcagatatgcagatttttctcaacaagagggccacgcctaatttcctttattgaagtaaacaaacgaacatgcgaaataaaacacgaatgccagatcatgcggaggattccgccttttcaaaaaaaatgggggtaacctgcggaacaaaaaaagctggcttaagagtgttaccagcaatttcaaaatcttgagaaattcccaagagaatatcaaaaactggcgacttgtttgggattgccaataaaagaaa

SEQ ID NO: 96803 - DNA, 1206 bp, Glycine max
  Clone ID: PAT_MRT3847_58424C.1
catgaaaaatagcaaggttctcgatttgttatcagacacaaacatcaacaaaatccaaattctcgtgtcacggtggcgctggatgtaagaatgggaaatcgacgcttcactcaggtcgcaaccagcgacgacgaggacgaagcgccgccggcgccggcgcctcctcccaagcagcaatcgtccgtcagtgcctccgaagaaaactgttcgaagcagcagcagcagcagcagcagcagcagcagcgcaagaggaagaggatgaagctccaagaagaagaggaagaggagaaagaggaagagaagaagaagaagagaaaaatcaaagacaagcaggaagagagatccaacgaagaagaggaaccgccgcaggaagacgccaagcccattggcgaaccggttaggctatccggaaagggaaggggccgcaaaaagcattatgaatccttcgagtacgacggaaaccaatacacgctggaggaccctatacttctcacgcctgaggacaaagaccaaaagccgtatgtggcgattatcaagcgtatggctgttgagcagcttgagctgcattgacgttattttgggtctggcagccccccttttttcctctgtcgtgtgtgggacattactcaatccctgaatggcagcatgatggtcactggacagtggttttatcgtcctgaagaagctgaaagaaaaggtggtggcagctggcaatcatgtgacacaagggagctgttttatagtttccaccgtgatgatgttcctgcagaatctgttatgcataagtgtgtggttcattttgttcccatacacaaacagcttccaaatcgtaagcagcatcctgggtttattgtgcaaaaggtgtatgacacagtagaaaggaaactctggaagctaactgataaggactatgaggacaataaacagcaagaaattgatgagcttgttcagaaaactcttcaacgtttgggcaaactacttgacattgagcctgaagaacctgttgctgatcaggaagatctgatgaaaaataaaagaatcttaaggaaaaagagcatttcacctcttgatgtttcaaaggaggaggaaacaactcgtcaaggggaccaacctctgaaacctgaacaccatggagttgtgtaaataatgcctcagaacattatcgcatattagtcgatttcaatgctctaacaggagatacccatc

SEQ ID NO: 96804 - DNA, 702 bp, Glycine max
  Clone ID: PAT_MRT3847_58425C.1
ccaccactgcggttccagtttcagcagccgaaagaaccgggactaacactgcgttttcagtttcagcacccaaaactatggttcttctacagctagatccgtttctcaatgagctcaccagcatgtttgagcgcagcactaagcttggctctgtttgggttactcttaaacgatcatctttgaaatctaaggtgcagaggaataaattggccgctgccggtgaagcaattgagtttagatgccttatacgtgcaactgatgggaaaaagacaatttctacttcggttggaccgaaggatcaccagcgctttcaagcttcttatgcaactatcttaaaggcacatatgactgctctaaagaagagagaaaggaaagacaagaagaagcctgcagaggcagataaaagagaagggagttcaaagagactgaagaagtcttaaaataatctgccttgtgcgcctgacgttctgcgcaaactttgtttcctgctgactctgtttatgtttcccccagtttttttttttcattagtaaagtgatcaatgaaggtgaaggggaaaagaagtgaagggaaaagggaaaaagaagagaaaggataattgaataatttttgcattttaatctttagaaaatattcattgaagtggcaatttgtgaaaattttctcagttccccagttggttataaaatgaatctttcagcc

SEQ ID NO: 96805 - DNA, 752 bp, Glycine max
  Clone ID: PAT_MRT3847_58426C.1
agaattatagcaggttctcgatttgttatcagacacaaacatcaacaaaatccaaattctcgtgtcacggtggcgctggatgtaagaatgggaaatcgacgcttcactcaggtcgcaaccagcgaagatgaggacgaagcaccgccgcctcctcctcctcccaagcagcaatcgtcggtcagtgcccccgaagagaaccgttcgaagcagcagcagcgcaagaggaagagaatgaagcttcaagaagaagaggaagaggaagaggagaaagaggaagagaagaagaagaagaagagaaagatcaaagacaagcaagaagagagatcgaacgaagaagaggaaccgccgcaggaagacgcaaagcccattggcgaaccggttaggttatccggaaagggaaggggccgcaaaaagcattacgaatccttcgagtacgacggaaaccaatacatgctggaggaccctatacttctcacgcctgaggacaaagatcaaaagccgtatgtggcgattatcaaggacattactcaatccctgaatggcagcatgatgggcactggaccagtggttttatcgtcctgaagaagctgaaagaaaaggtggtggcagctggcaatcatgtgacacaagggagctgttttatagtttccaccgggatgatgttcctgcagaatctgtatgcataagtggggtgggtcattttgttcccatacacaaacagcttccaaatcgtaagcagatccctggggtta

SEQ ID NO: 96806 - DNA, 2478 bp, Glycine max
  Clone ID: PAT_MRT3847_58427C.1
acaaaatccaaattcgcgtgtcacagtggcgctgggtgtaagaatgggaaatcgacgcttgactcaggtcgcaaccagcgaagatgaggacgaagcaccgacggctactcctcctcccaagcagcaatcgtcggtcagtgcccccgaagagaaccgttcgaagcagcagcagcgcaagaggaagagaatgaagcttcaagaagaagaggaagaggaagaggagaaagaggaagagaagaagaagaagaagagaaagatcaaagacaagcaagaagagagatcgaacgaagaagaggaaccgccgccgtccgctgagagagaagtgtagtttgaggtttctgccatgaagttggcttgtgcattgtttgaggttgatgattgttttgtgaaaagtgggttctaagaccttctgaaataagaagcgtgttgtgtttctgcagggaaagagtttatattgccatttaggcggtgatcgtaactgaaaattggaaatggtgaatcgtcgacgcctcactcgggtggcgacgagcgacgatgaagacgaggcaccgccgcgtccacaacgcacgcggaagaggatgaggcttatcgaggaagataacgatgatgacgagaatgaagaagaaaaacaagaagaggtgccggaactgcctcagcctgcggaggacgctaagcctcttggcgaacccgttagggtttcgggaaaaggaagaggaaggaagaggcactatgattccttcgagttcgatggcatccaatatattctcgaggatcctgttcttcttgtacccgaggagaaaggccaaaagccttatgttgcaattattaaggacattacacagtctatcaatggcaacgtgaaagtgacggggcagtggttttaccgtccagaagaagctgagaaaaaaggtggtggaaactggcaatcgtgtgataccagggagctgttttatagtttccaccgtgacgatgttcctgcagaggctgttatgcacaagtgtgtggtgcattttgttcccagtacacaaacagcttccaaagcgtaaggatcaccctgggtttattgtacagaaggtgtatgacactgtggaaagaaaactctggaggctgactgataaggattatgaggacattaagcagcaagagattgatgagcttgttcagaaaactcttaaacgtatgggcgaactacttgacattgagcccgaagaacctgttgctgatcaggaagatctgatgaaaaataaaagaatcttaaggaaaaagagcatttcacctcttgatgtttcaaaagaggaggaaacaactcgtaagggggaccaacctttgaaacctgaaacaccatggagttgtataaataatgcctcagaacattatcgcatattagtagatttcaatgctctaacaggagatactcatcgtgacaaatggttggagaggttgcttcaacgcattcaattcatgtttaattctgatgacagcaaaaaaagggacaaaggattagggaatgccaattctgatgaaatcaacaatgaaagcaagcatagaagttcagaatcagcaactgactgtcaagataaggttcagaagagttccaagtcttttaactggccagatgttgctgtttcagccatggttgctctcgaaaaagcttctcatgatgctctctcatcagattctatgaagtacaaccaaaagttgcggcaattagcttttaatttccagaaaaatgcagtgttagcacgccgtctattgagtggagagttggagccttcaaaaatattaaatatgacacccaatgaattaaaggagggtttggttgctgaggaaaaaaccaaggagcctgacgagacccagcacttgcaaatgacagatgcccgctgctcaaaatgtatggattgtaaggtgggcttgagagagattatccaagctggaaataatgaacgttatcagctggaatgtgtttcctgtggtcattcctggtatgcctcccgggatgaggtgtctatgccgaccatagatgcatcagatccaaagggaaacataggcacagcgccataggccactgcaaaatttaaagatgtaccgatgaagctgctgagcccccgtgaatccaaagtcagccaatgacatcttttaaaagaaaagttaattgtatatccccagaaatgatttggaaagtccaggaaaggtgacgatattgaggctatgagacgtgtatctatcccggctagtgttaagtcatagctaaaaattgtttatgaatagatatagttctcttcctatttgactctgcgcatcgcatacaaaaaaacggttggttttgtgtaatacttcacataaactagctggttttacctcatacatcataagggtagtgttagccatagaattaaatttcttagtttgacttttactttgtagtattaacttgtttcaatcattaataagcaaaaaaaagaaaacactagttccccc

SEQ ID NO: 96807 - DNA, 334 bp, Glycine max
  unsure (1)..(334): unsure at all n locations
  Clone ID: PAT_MRT3847_58428C.1
gtngcangcncgcgtncgtnngctcggnnttcggctcgagntctgttttctggtnnttcntcnnttgnttcnnnntgcanagtctcannctgcnnctngtgctnttcctctcnntctcnncttctcncgctgttttctccttcncngatgggttgttgccaaatgggnncttcgagcngggcccnangccntcncnnttganagggtccgtngtgnctggccacgatgccnttccgnnttggacgatttcggggttcgttgantncntnnnntcacgacaaaancacggtgacatgttactngttgtgcctganggtgnctntgcagttannct

SEQ ID NO: 96808 - DNA, 169 bp, Glycine max
  unsure (1)..(169): unsure at all n locations
  Clone ID: PAT_MRT3847_58429C.1
gactgctaactttgaggttaaattgccttcggttaaggaaaatgtgaaagatgtgatgttcttctgttgaaggctgtggtatgcttttgtgaagatgggtttgcttttatgagatgctttttgtgaagattggggtggtgggggtattgatatganattaantttgttt

SEQ ID NO: 96809 - DNA, 266 bp, Glycine max
  Clone ID: PAT_MRT3847_5842C.1
gaactctagtgatcttaccttggaagaagctctggatgctatattcaatacaaaaatatcgttttctagtactgatatgttgcagagatgtaatggaacaagtaatgggaatgaaatggtttttactgatatatgcctgggcattgcaaatgatagaatgcttcaaatcaatgccatttgtggactctcgtggatgggaaaaggtttacttctacgtggtcatgaaaagattaaagacatcactatgatttttatggagtgcttaa

SEQ ID NO: 96810 - DNA, 745 bp, Glycine max
  unsure (1)..(745): unsure at all n locations
  Clone ID: PAT_MRT3847_58430C.1
cctggctcaccaaacacatttctagattcacgcttctaccactacactacttcccttcactctctctctctctctctgcaaccaaatggcaccttctaccaccgtacctaacggtaccctcccctccggttccgtcaccggacgcttagcctctgtctacagtgaggtccaaaagacgcgcgtggaccacgcgctccctctcccctctgtcctcaagcatcccttcaccattctccacggtcctccaagctccgccgccggaaatccagacgagatcgcgaagctgtttccgcatttgttcggacaaccttccgctgcattggcgcgtagcgatgcggcgcagacgcagaagaagctgaagattggcgtggttttgtccggtggccaggctcccggaggccacaatgtcatttctggaatcttcgattacctgcaagagcgcgcaccaggaagcacgttgtatggtttcaaaggtggacctgcgggcattatgaagtgcaaatacgttgagctcacctctgaatatatttatccttatagaaatcaaggttgctttgacatgatttgcagtgggagggacaagattgaaactccagagcagtttaagcaagcggaagaaacagctaagaagctagacttggatggggctcgtnntgtattggtggntgatgactcanacaccaatgcatgcctncttgctgagaacttcaggagcanaaatttaaanncagtgtatttggatgcc

SEQ ID NO: 96811 - DNA, 1094 bp, Glycine max
  Clone ID: PAT_MRT3847_58431C.1
gcaattttggagtgagagcaggagaggacttcaaaccttggagcatgaagggggaggaggacgacaaaaaggatgtgtttgatttcaaagaggatgtggggcatgaagggaacttcactgctttggatattaatcctaaagtcgatgttgaacagcttgagaaggaagaacatgctctcactgctattgtcaaaggcccaaaacgtgcatttggtgatttgattgctgcttctggaatcacggatgagatgcttgacagtttgattgcgttgaaagactttgatggggttcatgggttgccccctcttagtgtaattgaagacatgcggtatgagaagaatactagaaaatcgactagaggtgaaatggagcgtctgaagcaagaggaagctgccaaagctagagtgaagcaggttgatgataaaggacgtgcttatggaacaggaagaagaaaatgcagtgtgccccgtgtctgggttcagcctggtaatggtcaatttactgttaatgataaagagtttgatgtctattttccaatgcttgagcatcgtgctactctccttcgacctttctccgagacaaagactttggggctctgggatgtcgattgtactgtgaaaggaggtggtgtgtcagggcaagttggagctatacgattggggatcagcaaggctttgcaaaactgggaaccagatttgcggcctgcacttagaaatgctggtttcctgacaagggactcacgagtggtagaaaggaaaaagccaggaaaggccaaagcaagaaaaagtttccaatgggtcaagcgttgatactacgagcatcctttttctggacagccatttttgtatggaatattaggatttctcaataacatcttgaaatttgtctgtcttgtactgcatcacctgtgatgtaatcaacatttgaatttcaatgactcaactgtagaaaattttgttcacggatgttaggaatcattcactctttggagagagctcccgattgctattttccccttatccttcccattgcataatgaatgttgtattaaaactttagttggttattgtagggagatctgtgtggaatgttat

SEQ ID NO: 96812 - DNA, 425 bp, Glycine max
  Clone ID: PAT_MRT3847_58432C.1
gaagaattcagagtagaaaaatgataccaagaattttaatgtggaaaacttttcaatgtgaaagataaaaatcaatgaccaagctagtaaatatctccattattgaatgtaggattacaatgactctctcaatacaagagaatatctctcaacttcacccaacaatgacgatttacaatttctctcaactcttaccaagtgtggtggaaactaaaactttctttttcactatcactcttgttttgcttccctttgaatgggatgatatgagatactctaactctttacaagacttcctaattataaaagaggggtgtgacttccttcaatcttcacttttctaagtggagtgtgtaagtctaaaggcaaaagaatttaattcctagtccttggaaagtgttccacaactttttatacatgccttg

SEQ ID NO: 96813 - DNA, 321 bp, Glycine max
  Clone ID: PAT_MRT3847_58433C.1
accggtaacgcattcccgtctcgacacacgcgtcagtcgggtggcaaaaaaacaccagaggggattcattcaccagttatcaaaggtcgcatatgcacgtggagacgtatctctaagtcgcattcggaccacgtcttcaaatacgcaccatcaactaatacacagtggtgttcacggccatgagcatgggcatcgcaatggtccttggcgttttggcggaattaaccgttctaggttcaaggattggaattttggatttgccacttaattgtccagggggcattcaaccggtggggcattctttgggttccccgaaggcaa

SEQ ID NO: 96814 - DNA, 1024 bp, Glycine max
  unsure (1)..(1024): unsure at all n locations
  Clone ID: PAT_MRT3847_58434C.1
ggaattcggcacgagggagagagagagagagagagagagagagagagagagagagagagagagagagagagagagagagagagagagagaaaagactctatgttgagggtggctgaaccccatggccaatatactactatttttttatatagcttgtgtattaaccccagtacaacaagggcagatgggaacattcatacgacaatttggaagttgaaaatcccccctcgggcagnggtgttctgttggaggctacataaaaatagacttcccaccaaggccaatcttttgaggagaaatatcagtatgtaggaagacatctgccctttgtgtggaagtgttcaggaggatgtgggtcacttatttttcaattgtaccttgacaagaggtttgtggtnnnnnnctatgagttggatccgggttgtaggcccccttccaatcacaccgaagtgtcatttcattcaattctgtgaaggatttggggaacctaagaatcataaaacaaggtgtgggtggtggattgccttaactagctctatatggcaacataggaaccaggtgatcttccaaggaaaaccttttgatccctataaagtcatatggaccatgcaatctttttagtttggtcctggatgaaggctaaagaaaaagacttcacctgtagtctcaaccactggtcttccaatataatgacttcctttgtttaggatgtcttcatattataattaggttgggtggtttttggagggcagcacttatgtgctttgtaatctcttttcagtacctctggtactggtttgattttataatatatatatatatatatatatatatatatatatatatatatatatatttttgccttccaaaaaaaaatcatctgctaaatttcggtatacaagaatgtccttgaccctaaccttgaaatcgaaaaagtgtggttgcctctatgagatggaattctatattcatcatttgcaaaatttcgatagataagaatgactctgtccctgaaatcgaaaaa

SEQ ID NO: 96815 - DNA, 288 bp, Glycine max
  Clone ID: PAT_MRT3847_58435C.1
ggtgtactatcattgcaacatcatggaaaaatggtgtaactgtgacgtcacaaacaccgcacaacaagcgtgctcaaatgctgcacaagtaaggtttaggataagtctagtgtgatccccgagatctccatgaacacttcacggcaaaatctcaggaaattagctagagattggtttatgatcaggatatcaaccagaattcaatcacgatcaactcctcctcagatgcacgaaggataaaggaagggccgacgaacgggttatagtccagttaagggtaccatggag

SEQ ID NO: 96816 - DNA, 128 bp, Glycine max
  Clone ID: PAT_MRT3847_58436C.1
aaagaaagagctcgaatatttctatgacaatgaataaaccatacaagcaggaaggtaatgcatgatcatcctatcacatgggaatggatttaaattttccgcactgatgtagcccttaaataccaaaa

SEQ ID NO: 96817 - DNA, 584 bp, Glycine max
  Clone ID: PAT_MRT3847_58437C.1
acccgtgcgcgtgcccctgcccccggttgatgtttgaattcggcgccactgcctctcacttttccattccgattcgcatgactttaattgtatccaatcacaacatggaggtctggatttcggtcaccatccagtgcatccacggtttagctgcatccgcaacgatagctttaaccactatcctaaggtatttaattgcttgtttgatagaataaggaggaaagaagtctgtttcctattgatagtggcactcccacaggctggcggggaactcccatatggatggctgagaataattcatatataggctataggcttgaaaagagtgctagctttcgttaggcctttcttttcctaaagatatcaccatgtggagtccggtcgagagccatacgcctcagtcgcagtatgcttcaacaccatccacagtggcaacactcacatcttcaacaaaatgatagtagcctccccctcccacaaacgcacatccccgcaaaaatgtgacaaaattgcatgcaaccaaacaaactcaccttccctttgattctcaagacattttcaagggcatcggtgatgagccttta

SEQ ID NO: 96818 - DNA, 754 bp, Glycine max
  unsure (1)..(754): unsure at all n locations
  Clone ID: PAT_MRT3847_58438C.1
ggtccggnnttcccgcgtcgaccccgcgtccgggaggaagctttgagggaaaaaatgttctcaacgccaagctagaagtcttaaaggagaaggaatactatgatattctaataaggaacacatctacaatgtgtgaaagtcaactccaaaaccatcaaaccttttgtaaaataatttggcgtaaactaagtatgtagtattaatttgttaggtagttttaatttgttgtaacaatcttttaatttttatttttaggaatcatgtttgatttgtctttttaaaaaaaaaattataaccatattttaatttgttcattttttttatttgtgaaacttgatcatcataaaactagttgttatgaaactagccgttgcaaaactagtcattgtataatttgctatttaattattcaattcttattcattcttgtatgtcttcttcaaataatctttttcttttactcgtttatgcaatcaattattcatacgatgactccaaataatgacatcgatagaatttggaaacaaattatttatgaaacacttgacaacaacattaatgaacaaatcatgagttactcacgcacgatgcnncancaaaaagaaaacantagtcaacacaaaaggctagttttaaattattagtactcacgcacttgataaaattggcttttttaaaaatttttanntttatataaatatattaatttgactattattantatattttatggggctattttatatgttattaa

SEQ ID NO: 96819 - DNA, 330 bp, Glycine max
  Clone ID: PAT_MRT3847_58439C.1
gacccacgcgcccggttcatcactcaatggcgacgagggcacggactatatggaaagaatacctctagccacatctgagggatcccctcatgtgctttcacgcaaaaatggtgaaaaaggcaaaaggagatttgttcccggggacggagaacagaagacaatgattccgggaaccactgttgaagaggcttacaacaagctaatagttgaacttgagaaaagtgatcctacattggctggcatagaacgtcccaaggatgagaaaccaccaagtcgcaaaatttctgacaaacctaagacgcgctgctcaactattctccctatggagca

SEQ ID NO: 96820 - DNA, 238 bp, Glycine max
  Clone ID: PAT_MRT3847_5843C.1
gctggtgcccctgctcgggccggtccggaatgaccgacgcgtcccattttagcattttacttgctcttataacaaagcaagagacccttggcctttttataccatcatctctgtagctttgatcaaagaccatgtatctggtggcctttaatgcaggaatccatggagatcagcatgtgggaaaaaatggaaacggtgtagccgctaacttgtgtcttgacatataaaaccaaaactg

SEQ ID NO: 96821 - DNA, 317 bp, Glycine max
  Clone ID: PAT_MRT3847_58440C.1
aagactgaaagaatggggtggaggctgcttcgaagcttgatgtcagatatgacagacatcatagttttggaacaacatactaacgaattactcatatgatataatgggatggacccggctatctcgcacgctaaacgtattggcggccttgatgctctgtctatatccctaattaccggtcatgggccaggatactcattggcatgcgatgaatctctaagagatggagtgcgtaatactgggcgaatgaatggaatccaggtaggtgtataagagaagcctgataccagagcaggtgctgaaggcttctcaactga

SEQ ID NO: 96822 - DNA, 1621 bp, Glycine max
  Clone ID: PAT_MRT3847_58441C.1
cccacgcgtccgtacggctgcgagaagacgacagaaggggactcccccgccttaagttgttccttcacctttcttatattcaggaaagtaagatcatctgcatcgccgacgcttccaacaataacaatggccgataatgcaacaacgcaaggaagcaacaccctattttctccttacaagatggccaaattcaacctctctcatagggtggtgttggctcctatgacaagatgcagagcgttgaactggattccacaggcagcgcttgctgaatactacgctcaaagatcaacaccaggtggatttctcatcagcgaaggcaccttgatctcccccactgctcctgggtttccccatgttcccgggatatattcagatgaacaagtagaggcatggcgaaacatagtggatgccgtgcatgccaaaggcagcattatcttctgtcaactttggcatgttggccgtgcatctcatccagtgtatcaacctggtggagctccacccatttcgtccaccagcaagcccatatcagacaagtggaaaattctcatgcccgatggctcccatggcatctacccagagcctcgtgcacttaccacttctgagatatctgaaatagtgcatcattatcgccaagcagctattaatgcaattcgagcaggttttgatggaatcgagattcatggagcacatgggtatctcattgatcaattcttaaaggatgcaatcaatgatagaacagatgaatacggtggaccactagaaaaccggtgcaggttcttaatggaggtagttgaagctgttgtctctgccattggagcggaaagagttgctatcagaatttcaccagcaattgatttcaatgacgcctttgactctgacccacttgggctaggcttagcagtgattgaaagactcaacaatttgcagaaacaagtgggcacaaaactcgcttatcttcatgttactcagcctcgattcacacttttggcgcaaaccgagtcagtgagtgaaaaggaggaagctcatttcatgcagaaatggagagaggcttatgagggaacattcatgtgtagtggagcttttactagggactcaggaatggaagctgtagctgaaggccatgctgatttggtatcctatggtcgtcttttcatctccaatccagacttggttttaaggcttaagctcaatgcacctcttaccaagtataacaggaacacattttacacccaagatcctgttataggctacacagattatcctttctttaatggaacaactgagacaaaattaagtaactagctaaggccatgcatgccctttaattttaatctccatatggctttttgaataataatgttcataacattcaaaactcttcagttgagtttatcctcagacaaacaaattaagtggttcattcacttgttagggtatttagatcttaggttaattagtctccggcattttgatttcatttcaatttgtattcagtctttcattttgaataaaataatattaagttttttgccttaaaaaatatataattaatggaaatactcttgtttgacttatttaaaaaaaaaaaaaaaagtataagggcggccgctctagagga

SEQ ID NO: 96823 - DNA, 1001 bp, Glycine max
  Clone ID: PAT_MRT3847_58442C.1
cccacgcgtccgtacggctgcgagaagacgacagaagggggaatcgagattcatggagcacatgggtatctcattgatcaattcttgaaggatgcaatcaatgatagaacagatgaatatgggggatcactagaaaaccggtgcaggttcttaacgcaggtggttgaagctattgtctctgcaattggagcggaaagagttggtctcagaatttcaccagcaattgatttcagtgatggctttgactctgacccacttgggctaggcttggcagtgattgagagactcaacaatttccagaaagaactgggcagaaaactcacttatcttcatgttactcagcctcgatacacagcttatggccaaaccgagtcaggtagacctgggagtgaaaaggaggaggctcatttgatgcagaacttgagaaaggcttatgagggaacattcatgtgtagtggtggctttactaggaagttgggaatggaagctgtagctgaaggccatgctgacttggtatcctatggtcgacttttcatctccaatccagacttggttttaaggcttaagcttaatgcacctcttaccaagtataacaggaagacattttacacccaggatcctgttataggatacacagattatcctttcctaagcaaagaaagtgagacaaaggagccaagggcacgcctttaactgtaatgttctttgactttttgaatagtcatattgtcgtcatatgtataattaattggagtatcccaatctcaagtgaatgtcttcattatgaaaatcttattgcctgtatagtcatctatattgcctgcaagctgcatctctgtatttattgttgaattacgttgtataataattttaatccaatatctgtctgtcccttcttaatataggggactatgtttctttttttcttttttcagcaagagattaatgatgtaaccaatgaaacctgggaaaattataatgctatatagcttctgtctcag

SEQ ID NO: 96824 - DNA, 567 bp, Glycine max
  Clone ID: PAT_MRT3847_58443C.1
attcataccagagtggagccgagaggaattcgcgaaagtgagaagagtgtttatattggatattggaagagagaaaaggagcagcggtccatacaattcaggagcagcatataagaatccttcaacacaagaggcatcgcctacaacaatggcagataattcaactgctcaaggaagcaacaccctattttctccttacaagatgcctaaattcaacctctctcataggtcatcacactcacacactacacttttccttacttcctattagttctctttatgactattttcttaaatctattcttttttcccctctttatgacttggattttatgcagggtggttttggctccgatgacaagatgcagagcgttgaactggattccccaggaagcacttgctgaatactacgctcaaagatcaacaccaggaggatttctcatcagcgaaggcaccttgatctctctcactgctcctgggtttccacatgtgcctgggatatattcagatgaacatgtggaggcgtggagaaacatagtggatgccgtgcatgccaaaggcagcatt

SEQ ID NO: 96825 - DNA, 158 bp, Glycine max
  Clone ID: PAT_MRT3847_58444C.1
tcggattgaagccctaacatctacaagattgggattatgattcacattctataggcgtctgtcaccctcacatcaaggatctttatgccaatgtagtgaaagcagactggagagagaaattacaagggtattgaataggcctagaaagaatgtggaga

SEQ ID NO: 96826 - DNA, 892 bp, Glycine max
  Clone ID: PAT_MRT3847_58445C.1
gtttcttaaacccctaaaatcactatgcaaaattccaaagtagctagagtcggagcttcgatcgttaaacagctctgcacaaggaattgtacatccttgtgtggagtaggatatattcgaagcgcaagatatcattacaagcaacctctgtttcaacatcattcatttactaagttatacaagggagccatgatagaaaagcataatttcctttcaacaatgactactaacaacactaccaaggaaaggagtgaacaagaacaagcgatatctgtaacttttattgataaggacggtgaggagaagcatatcaaagtccctgttggaatgtctatgttagaagctgctcatgaaaacgacatagaactagaaggagcatgtgaaggatcgattgcgtgttcaacttgccatgttatagtcatggacgtagaacaatacaacaaattggaagatccaactgatgaggaaaatgacatgttggatctagcttttgggctcactgaaacatcacgtctgggttgccaagtgattgcaaaacctgaacttgatggaattcgtttagctattcctgctgccactcggaacttcgctgttgatggttatgtgccgaaaccccactgactcatttttttgggttcaatgcaaagagtgccgctttcagttttgtaccttcaccgatttagataaattagcatttattgatcgtaggcattatctttgtctacagagcacctctatatatcaatttagagagagatcatggtgtaatttttgacgggctacagtttgcatgccaataaattacttgtactgtattattttttttgtaccaataacgtgaacaagcacgtccaaaaaatctaaatatatgaaaggcagaacggaggacaag

SEQ ID NO: 96827 - DNA, 294 bp, Glycine max
  Clone ID: PAT_MRT3847_58446C.1
atcacgcgtcctgctcacatgataggtcactatcctaagacctggaatgaggttgggacaaccacctaacatgtaaaccccgttgccaccaacagaaatctacgacaaaactgatcatattcaagagcaccaagcttgagggtaaactgacatctatggatcagtacatctctacaacgaaaactggtcggaaagctctctcttccacaactgcaaccacctgtgctcaaccctgaaagcgttcttcgcctgaccggctctagaagaaatacttctatgctaccctcttcacgg

SEQ ID NO: 96828 - DNA, 641 bp, Glycine max
  Clone ID: PAT_MRT3847_58447C.1
atctgtaacttttattgataaggatggtgaggagaagcatatcaaagtccctgttggaatgtctatgttagaagctgctcatgaaaatgacattgaactagaaggcaagagctttgattttataattctattatttcacctcaagatttcggtcttctgaattctgcttttttttaattcggctcgaggtttgagatagccagttggtcatatttgatccatctagccaccccacctgttgggttaatttttatttttttagtttttttagttttgctagaattacttttcattttgatagtctgcctttactttggaaaaagctcgccaaaaatgagactgtttctaataggtttagactcactacacttttacttgcctactttagagacaagttcacttgagaagaacattatctcctcctttgcttatgatggatatgctgacccttatcgtgtgcctcataatatttcaatttagcttacttgtccttttgcctaagctgatttcttacttgatgttattgcaggagcatgtgaaggctcgcttgcgtgttcaacttgccatgttatagtcatggacgtagaacaatacaataaattggaagatccaactgatgagggaaatgacatgttggatct

SEQ ID NO: 96829 - DNA, 453 bp, Glycine max
  Clone ID: PAT_MRT3847_58448C.1
aatgctttgaagagcttgttctgaagattctggatacacctagcctcttagccgagggatccaagggcaataaaaagaacatttttaaggacaagccatcccagactaatgccacgagtagttgttgctgatattaagagactagctatttcactcgaaacaagggcgttgaatccattttcagaatcagagttctaacactagcttattgattatttacagcagctgctgaagcctttgtacaaaacctgattttcctagaatgttatatgtaatatgacgacgatcgttatctgcttttcttttttctttggattttgttgtttatcattcacatttaatttcgtatatagacgtgcaagaatcatggatactatgctattgaaaccagttcaagttgtatataacttctagacaatagtgccgctctaacttttgatcggtttaatgagc

SEQ ID NO: 96830 - DNA, 364 bp, Glycine max
  unsure (1)..(364): unsure at all n locations
  Clone ID: PAT_MRT3847_58449C.1
ccggggtcggcccacgcgtgtcttcctcgcgggcgcngagtcgggggcgggcgggggntgtggtgcctnctttggttgccgtggtgggtcaactgcgggggcggctttgcttgtgcttggtgcttgttctntttgtggtgctgggtgttgtttatgcttgagaggcttttgttgtttgcttgcgtcggtgctgcgtggggggtgttgggggngctcgtttcttctttgttctgcgtggtggggggggtgaagtgtcaattggtgggacttgnggggctggtttcaggtgcggattggggtgtgcttgtggattgttcccggtgggaatgtgtgttcccttcttgggctgggtaggtggtggggc

SEQ ID NO: 96831 - DNA, 205 bp, Glycine max
  unsure (1)..(205): unsure at all n locations
  Clone ID: PAT_MRT3847_5844C.1
cnaccaccctctcccctaccataagggtgctcctcctctcacgccaacccccagactctcgttaccaccgagagccaccaagcagacatacaaggnagccttttgctcacctgcctgcntacgaccaacacccgaggagccaacttcgcggcaaaacactcctacttcccacacaagatgccannnnntcagcctgtcgncggca

SEQ ID NO: 96832 - DNA, 233 bp, Glycine max
  Clone ID: PAT_MRT3847_58450C.1
ccggtaatccccggcgaccccccgcgcgcttgttttttaaagggcccaacacagaagatctgttttgctttaagttttgcattattggatgctaggtgaatccaaaaggctaaagtagattcctaagatatgaaagttcttattgttgctactgacaatagaacaccttgatggtggctttgtgcaaatgtgaaccacctaacatggtgacaccggtgtgtctaagggaaacg

SEQ ID NO: 96833 - DNA, 715 bp, Glycine max
  unsure (1)..(715): unsure at all n locations
  Clone ID: PAT_MRT3847_58451C.1
ccacgcgtccgtccttttcttgtttgatttttctcgccttctgtctttcttaccaacggagcatagtgtctatgagtgttcgctactaattcagcagaagaaaatgagggcagagtcacaaattccccgaagcttaatccacagaatctacgctcccttggccaacgaatttcattttgcagcgccaatctccacctccagaacaaatgaacgcgaactcgtgcgaggtattctacgaatgctgcaagggttttctggtcccctattcttttgggataaaagtgctaacagtttccgtgcaaagagcggagtgtacgtgagtcatctctcacagaaaagtctacactctcttctcaatcagtttatccacgcagccacgtgtctccaattggtggcgattacacttgataaagtcgaaaccgcaatgccaaaatctcctcctactttgaacgcatttgcgtgctctgcttcagcgtgcctcgagcggttgcgtaatattgccttgaaggaggaaacgtccacgagcaatgcagatggtgtaaccactccaaccttgttaggattggctaattccttatcgagtctttgctcaggtgctgagttcctatttcaagtagtgcatgaggctattcctgctgtatactntgagtttggtgtgtctgtaccggctgcagaactcgcagttcatgtgcttgactaccttcataagaagctt

SEQ ID NO: 96834 - DNA, 469 bp, Glycine max
  unsure (1)..(469): unsure at all n locations
  Clone ID: PAT_MRT3847_58452C.1
tatacactaacattatcaaataggactttgcccaactaggatgagactgcaattattaaatgatttacatgtgaaactactactataggtcatgcaagaactctagctcattgctttaccatgacacccatgcttgtattgatgaatctacatatcttggtcaagaaacattgccaccttgcctttcaaggtgtttctttttttcatcaaggggaccatctcttctccagcacgtttatcttgactttgcctnnagaactcatgggtaatcttggccttttccacaacagatttgatcttctccttctcaagagttttcctcagcaacgggacccaagaacaggtccagcatgtcttgaccaggatcacctgtttgagaggtgcttgcannacctaattcaccagctnnnnaagtacaattnnataaatcttccctnncagacnnnnatgaaattctgnnctcacaaca

SEQ ID NO: 96835 - DNA, 481 bp, Glycine max
  Clone ID: PAT_MRT3847_58453C.1
gaagacagcaacagctaattttcaagggactatatacaggacacacaacgcacagtgatttggaacatgctctataattaagcgaggttcaaacgccaagcattatactctatctctttacacggagccttgccaaaggagtcaaaggcgagaaggagcaaaatattctatattgcctgaatcgatgcacgacacctgaccgtcactcattcaattctgtccagcatgaccaacctgtacctcctattccaacctgtgatagaggaagcaagggtgaccagtccaacaattatgccttttactgtattacgggtgcgctcgcgcccagagcacatattctgagttggaaaggtagtaagccttgatgagagtttcatccatttgcagctagggctttacattctgtgccacagaatgctgtagcccatctgatcaaaacctgcgaatctaacgacataagggctcagaccttcatcactac

SEQ ID NO: 96836 - DNA, 755 bp, Glycine max
  Clone ID: PAT_MRT3847_58454C.1
ggctcgagctttcttgcttgcttgccccatcatttctctttctctctcttttgccctaaaagcacaaccggcttcctacataaagctcactcctctcccctctctcccacttcattctccaacactgtcacatgggtttttctccacaaacctgttctgttccctaagccccacccttttctgttctagcaaataaccgttcttatcaatggctcacaactcagacagtgccacctccaaccttcttcttctctgttccgagaacagcagcacctgcttcgatgatgatggtttggaatgtgatgccgcagatgggtctaactccagaatctcgcaccatgagggtggtggtggatcggagttgttgctggcgtgttttgtggcgcagagtgaggaagctgtgagggctatggtggagagagaaaaagagcatttgccgagggatgattacttgatgaggctgaggagtggggggttggacttggacttgttgggtgttagaaaggaggctcttgattggatttggaaggctcattcttatcttggatttggacccctgagtttttgtttagctgtgaactacttggatcgcttcctatcggtttttgagttacctagaggtgtgagttggactgtgcaattgttggctgtagcttgcttgtcgattgcggccaaaatggaggagatcaaagggcctcaatccgtagatttacaggttggggaactaaagtttttgtttgaagcgagacccattc

SEQ ID NO: 96837 - DNA, 301 bp, Glycine max
  Clone ID: PAT_MRT3847_58455C.1
cctaccccagacgaacacatcgaaagactaaaagttatagtttttacagatccagccattgcactcaatacatgaactagattgggaaccatattacacatccatcatgaacaagagtggcttagagaagactcttgtaacccgaaacagcccctataaataatctctactggggcggcatttcttaaactggcaaatatactctttgtcaggtcctgcatatgaagagctattgccgccaacaatgaggggtccctgccccatcgaatagcatttgggaagatcattcaaccggggaaca

SEQ ID NO: 96838 - DNA, 360 bp, Glycine max
  Clone ID: PAT_MRT3847_58456C.1
ccccaaaaatccctgaatcataattatcgggagggtgttattcacgggtggttcaccatctctccttttcttttaaatgaccctaattccttttctacccaatccccttttaattcctctttgtataataaaatctccgtttgcactcttattcctaaccaaattattctctttactgtactattacttattgtctatctactttttttccttcttcaatttgataactccttgactcatctttttcatatcttcttctcccatcgatatttctgcctctcctaagcctttccaaaaactcccttttttcttcaaaactacccttcctctttccatagctctcatcacttactccttcat

SEQ ID NO: 96839 - DNA, 226 bp, Glycine max
  Clone ID: PAT_MRT3847_58457C.1
cctcacaacaaaacacaaatttttcctgtactgggtggattttattttctttttcgacactatctaactctatattacaacaactcatgtctctgaaatttggttatattcccccttcacgatcacaacccattaaaaaatctatttcttaggacatcttacgttccttagaaccatgtattccatactctccttcccaaaaaaaagcatttataaaaacataacc

SEQ ID NO: 96840 - DNA, 371 bp, Glycine max
  Clone ID: PAT_MRT3847_58458C.1
ctggggaatttttctcccgggcaaaccggggtcaaaccctaagaaaggattacaggcccaggccctttaaagtttaaacattgggggggggtccatggcttaaaaaaaccatggaaaaaaaaatatggggatttttatttttcccaaattataggggaccataaagggggggattttttcatttcccaatggggaggggaacttcaggtaggggttttttttttaaaaggcctgtaccttttcccccctttgccgggaaaccgctggggttggcccccccctgccccccccttgggtaaaaacccggaggcttttccccccggtttccccaccaacggaataggccgggtaaggtcccgcccccaacaacc

SEQ ID NO: 96841 - DNA, 3542 bp, Glycine max
  Clone ID: PAT_MRT3847_58459C.1
cgtgttgtgtttccaataggcacttttttcccactcttgttgttgtaagaagtattaatatcaccctgcacgtgtcatccattcaactcatagaagtcaatgtcatcattatttgcggggctgtggctcgagttttcattcgttgtgatcttcctcttccttgtacacagagtttatcacaggtgagcgactgaaaggtagcaatggcgaacaggaacctggaaaagatggcatccatcgatgcacagcttaggcaattggctcctgccaaagtgagtgaggatgacaaactgattgagtatgatgctcttctgttggatcggttccttgatattcttcaagatttacatggggaggatctgaaggaaacagtccaagaagtatatgaactttcagctgagtatgaaggaaagcatgaccctaagaaactggaagaacttggaaatttgataaccagtttggatgctggggactctattcttgttgctaagtccttttcccacatgcttaatttggccaacttggctgaagaggtccagatttctcgccgccgaagaaacaagttgaagaaaggggattttgcagatgagaacaatgcaactacagaatcagacattgaagaaactctcaagaaacttgtatttgacttgaagaagtctcctcaggaagtttttgatgcactgaaaaaccagactgttgatttggttcttactgctcatcctactcaatcaattcgtagatctttgcttcaaaagcatggaaggataaggaattgtttatctcaattgtatgccaaagacattactcctgatgataagcaggagcttgatgaggctctacaaagggagattcaagctgccttccgtacagatgaaatcaggaggacccctccaacaccacaagatgagatgagagcagggatgagctacttccatgaaacaatttggaacggtgtacccagatttctgcgccgtgtagacacagctttgaacaatatcgggattaaagagcgtgttccttataatgctccccttattcaattttcttcttggatggggggtgatcgcgatggtaatccaagagtaactcctgaagtgacaagggatgtttgcttattggctagaatgatggctgctaatttgtattattcccagatagaagatcttatgtttgagctctctatgtggcgctgcaatgatgaactacgcgttcgtgcagaagaacttcacaggtcttccaagaaagatgaagttgcaaaacactatatagaattttggaaaaaggttcccccaaatgaaccatatcgtgtggtactcggtgaagtaagggataggctctatcagactcgtgagcgttctcgccatttgctttctaatgggtactctgacattccagaggaagacactttcaccaatgttgaggagttcctggaatcccttgaactctgttacagatcactatgtgcttgtggtgatagtgcaattgccgatggaagccttcttgatttcatgagacaagtctctacttttggactctccctagtgaggcttgatatcaggcaagagtcagatcgtcacactgatgtgctggatgccattaccaaacacttagaaattggctcataccaggaatggtctgaagagaaaagacaggaatggttgttgtctgagttgagtggcaaaaggcccctatttggacctgaccttccccaaaccgaagaaattagagatgttttggacacattccatgtcatagcagaactaccaccagacaactttggagcctatatcatctcaatggcaactgcaccttctgatgtgcttgcagttgagcttctgcaacgcgaatgccacatcaagcatccattaagagttgtgccattgtttgagaagctagctgatctagaggcagctcctgccgctttggcacgattgttctctgtagactggtacagaaacaggatcaatgggaagcaagaagtgatgattggatactcagattcagggaaagatgctgggaggttctctgcagcatggcagctatataaggctcaggaggaacttataaatgttgccaagaaatttggtgttaagctaaccatgttccatggtcgtggtggaactgttggaagaggaggtggacctactcatcttgctattctgtctcaacctccagacacaatccatggatcacttcgtgtgacagtccaaggtgaagtcattgagcaatcatttggagaacaacacttgtgctttagaacactacaacgtttcactgcagccactctagaacatggcatgcaccccccaatttcgccaaaaccagaatggcgtgctttgatggatcagatggctgtcattgctactgaggaataccgttccattgtattcaaggaaccacgctttgttgagtatttccgcctggctacaccagagttggagtatggaaggatgaacattggaagtcgaccagcaaagagaagacctagtggaggcattgaaacactgcgtgcaataccttggatttttgcatggactcagacaaggtttcatcttccagtgtggctaggctttggagcagcatttaaaaaagtcattgaggaaaatgttaagaatctcaatatgctgcaagagatgtacaatcaatggcctttctttagggtcacacttgatttggtggaaatggtgtttgccaaaggagatccgaaaattgccgctctgaatgatagactccttgtttcaaaggatctgtggccgtttggggatcaattgaggaacaaatatgaagaaactaggaaactcctacttcaggtggctggacacaaggaaattcttgaaggggacccttacttgaagcaaagactcaggcttcgtcatgctcccattaccaccctcaatattgtccaagcttacacattgaaacgtatccgtgatcctaactacaatgtgaaggtgcgcccccgcatatcaaaggaatctgcagaggcaagcaaatcagctgatgaacttgtcaaattgaacccaacaagtgaatatgcccctggtttggaagacacactcattctcactatgaagggtattgctgcttggcatgcagaacactggttaagtttgtttgagtattttccttttttttattataaggcatgaattgactgaaagttagtgctctagttttgttctcagatacactttgttttgttttgttattatgctacaccacctttctgcactgaaagagtcagctaccacacaaatgaggcatgccattgatgtgttatgtttcaagacggaaattatgcttagtactgctactactaccctcttctgtacttctttgtatcttcgttccagaaggtcttgttttgttttgtttgccatcattaaatcaggggagtgtttagtactatctctatgtatactaacagagggtttgtactagtctcatgatatgaggggagaaataacaaggaagtaaaagaaattaaatttctttataagttaaaatcaatttcttccgtttaaaaaaaaaaaaaaaaggac

SEQ ID NO: 96842 - DNA, 104 bp, Glycine max
  Clone ID: PAT_MRT3847_5845C.1
catcttccggttatgcaatgtttccattgcatcaaaacggtaacattgcataaccaaaacataaattgtgagtaacaggagaaaaggaaattttatcagaattt

SEQ ID NO: 96843 - DNA, 362 bp, Glycine max
  Clone ID: PAT_MRT3847_58460C.1
gatgaatttgttattagggaagctatatcgaatttctagacatagccgagctgctgttgctatttacaaagagagggctaagacattgtccttttgtacttgaggctatcacagctttagcagaacttggatccactgcaaaggacatcattacattgattcctcagaccccgaatagaagtggtagagcttcatttgatcatactgattcaagtcgttggcttcaacgctatgttgaagctcaatgttgcatggcttcaaatgattacaaaggtggattggaactctttgcagatcttttacagcgtttccctaataatatacacttactacttgagatggcaaaagttgaagctattatt

SEQ ID NO: 96844 - DNA, 663 bp, Glycine max
  Clone ID: PAT_MRT3847_58461C.1
aaagaaccgtcacaaatccacacaacaacatgatgaacaattggagataggtttagtttcaatagcctgctcctgcttgttccatgaaatgtgcatatcaacggatgagttttgttggtaaataattagggggtgtttgagatgtgtcaatgtttgaaaggggcaccagaatttgctaattgctgctaaccatgattggtaatattacctaaaagggagagatgtgtgtgctggttattgttattgtggtatacgcatgatgcagcagcaactaggggaggatgttttgttggtctgaaacattgaagctggccggtagagagtttacctgatgtaatgccacgctctgcgaaggtcaagtcggtggcaacattggaaactgtacgggagattggtgtctatattcagaggtttcacaatcttgacctttttaagcagggatggtatcggattaagattactgtgagatgggaggacagtgaaaatatgtctttcggaattccagctagtgttgttcaatatgaagctcctgatatggatcctagcagtatatatggtgtatggaggatcgatgatacggataatagtttctcaacacagtcttttcggataaaatacgctaggcaggatgttcatttgtatatgatgaacgtgttcaactta

SEQ ID NO: 96845 - DNA, 400 bp, Glycine max
  Clone ID: PAT_MRT3847_58462C.1
cttagattttttttttgttttttttatttgttttcacaatttaactttaaagataactttatgagcatcaaccctccacggttttaagacgaacgggacaatgtacaacccttgaaggtgatttccgactaaaacccgatgaacgaaatccgtaaccagagaaatggtccagagaaattgaacttgacacactaaatgttttgctagttgaatattcccccctttagcattccacggtgggaacctgttgctgggcgtggctcataaagacagccgttacaacaatgtcagtgttagcacgacccttcaaaggcccagcctagtaaaggcaaacggtctgtgcaatctccacttgtgatgaccctgacggaagatagcaagcgggatcctggcctgttca

SEQ ID NO: 96846 - DNA, 429 bp, Glycine max
  Clone ID: PAT_MRT3847_58463C.1
cttcataggatcttctgcaatggaaggtcatgacaaacccttgataattgttgccagattggagacaatctaataaagccttattacaatgaggttcaggctcaaatggatacacatatagaaaaattgactctctgtgatgtccatactcacttaaggtgccatgttggatctgagaatttatcaatctaaatttgcactttccaagaacacaacatgaggaaccattctgctgaatgatctattgaccactttttcgactgagggcgttcttaaagcatgggtggatttgcagagtactcttcggataccatgactgattaaaatggcggcccctgtggggattgctgagaatacaggaattcatgggcctgtgctatgaatagatatattagagggcgcgccccttctgatatctacaccatctgc

SEQ ID NO: 96847 - DNA, 359 bp, Glycine max
  Clone ID: PAT_MRT3847_58464C.1
ttaatcattttatatatttgctatcttattttttttttgaatataatacactatcatactaatgcccctggtaaatgtaaaaatgtaaatcatttaaatacaaaacataaatccatcgaggtcagggaaagcaaggcaaaatggaaatgacaaaacattacatggctagtcctcaagcctaaaagccaaagagcaaatgatcacgaccctaaacaagaaaacagccttgttaaattaaaaagttgcaaagccagtctaaatgtttaaaaaaccttttagcggcagtttatttaaaagaacgcgatcttaacaaaattgcccattttacacagacgtgttaagtttatataaattccaaa

SEQ ID NO: 96848 - DNA, 507 bp, Glycine max
  Clone ID: PAT_MRT3847_58465C.1
tcctctagagcgtccgccctgagtgggaatctttttttttttttttttcttttttttttcgttttttgttgttttttttttttttttttgtaaaaaaattatttttggggagcaaacaattttttttctttccccttcccccaagacatttgattggttttttaggggataacttttaaaaggggggggaaacccgggggggggcgccccctttttaaaaaaccttcccccccaaatttttggggcccttcctgagcccccccccaaaaagaaaaaattttttttaaatttccctgagggggcaccaaaaagaaacactaattttttacggggttgtttggggggtggcgccccttttcggaaaaaacccctttgggtttttcccccctggccctccccttgggggagggtggaaaaaaccttttttccccctttttccccccaaaatttgtgtagagaacaaatggggtggggcccaccccttaataaaaaaatctttttcccctt

SEQ ID NO: 96849 - DNA, 198 bp, Glycine max
  Clone ID: PAT_MRT3847_58466C.1
cttccactaactattcaaaggcgatgttactacttgcgtcgagaagccaccaaccagaatcgttggattccctatcctaatatgtacatggaatcatgaacgaaagactaaaaaatattcgacgatgcacttgcatacgatatgaatgataaaaattgggctctctttaacctgctaccactgcaattacatgactga

SEQ ID NO: 96850 - DNA, 733 bp, Glycine max
  unsure (1)..(733): unsure at all n locations
  Clone ID: PAT_MRT3847_58467C.1
gcgtccgttaacttctttcaactaatttgttttctctatacacacaagagtcaagattggaagtctacttgcttcatgaagcacatgactttccatggtcaatgatgcttcatgcagtgatctaactttctgaaactgaaccaacaacggatcgttctcagtcaccaccccagacgaatgtttcctttattacgatcgacataatcaaacatcaatatcctcacacgtgtcttactcacgtgcacaaaacttaagcttatagttattgtcgtcatagtcatcatgggagaaggtacaaagtaaattaaaacaaccgaaagcataagcttggattattttattttgtctcacaataatgttattacttattccaaccaaagcatttatttagtcttacacttgtttctcactaggagaaaaaggttcttaatgctccttctattccacctcctctaagattagcatccaatatatatatagcaaaagcctttgttttcgagcttgttaccattcatgtcatacacaaatacaacagaggctgaaggtaggtatgaggtgaaggcacaaattaattaaagtagtagacactattaaaaaaacactnttttacgacacaatatttacaacggtcgtaaaaaaccgttttagtatgtataacgatgacaatctcttagatattgtaaatattttaaaggtggtttcacaaaaaccgtctttgaattcgggtcatttt

SEQ ID NO: 96851 - DNA, 505 bp, Glycine max
  Clone ID: PAT_MRT3847_58468C.1
ggttggcacagtgctggaaaactgttggggtaaaagggtgtagtgattgcttgaggaaagctgaaaatgaggtcaaaggatgtttgcctaagagggaagggagggccttgaatactgggtgctatttgagatactcaactgttaagttctacaatcaaggaggtcaagatggtcaaggagatgattcttccagaaaacgagtcattatagcagcagggtcagtcttggctgcagccgttgtagttctcactcttgcagtctcttatgtggccttcaccaaaaagagaagaaaaaacaattttattgaggttcctccttccttgaagaattctagcttgaattacaaatatgaaactctagagaaggcgacggattatttcagctcttcaagaaagataggtcaaggaggatctggttctgtatacaaagggactctgccaaatgggaatgatgttgctgttaagagattggtcttcaataataggcaatgggtggatgatttctt

SEQ ID NO: 96852 - DNA, 544 bp, Glycine max
  Clone ID: PAT_MRT3847_58469C.1
tggggggggggggggggggggcccgctaaaataaaacagacaagggaagaggaaaacaaagcgggcaaataagcatagacgggtatatcactcaagcgtaagacaatagagaagggaacgaagcatgaaaatctgacggcgccataaaaaaaggtagtacgttatggatgtaaagggccccctaaaaggggaaggttacagggccaagggtacaggggaacggggccaattgtcctacggaatagcataatgagagagccagcgagtataacgttccccggtttttaattccgggggaacaaaggattagaatgggagaacaaaggattataatgagagggcttggtcaaggtagggcattagttattaggttagcttatcctgatatgcgggcgggtgggggtgggggacaccagagtaggggagctactagccagagggtaaaagtgggggcgcgtaatgcgggttgtaagcaggtaagtattagggcatgggctggtaaggccgcaggcacgctggcaaggtggggtcagccctagtacgc

SEQ ID NO: 96853 - DNA, 237 bp, Glycine max
  Clone ID: PAT_MRT3847_5846C.1
aaaatcttcaacaaaaaggaagaaaaaaacgccaaaaataaacagaaatcgcgtgtttgtgctgctgagctgtgagcacatgaaaaaccccatttgcttccattgagctaaagctatccaattgctggaagtgttggttgcctttggacaggaattgaaagacggacaaattcaagaatggcaaggatattacataaactacaacctcatgagaagcgagtccagagtatgcccaac

SEQ ID NO: 96854 - DNA, 265 bp, Glycine max
  Clone ID: PAT_MRT3847_58470C.1
acggtcacacgaacgggactctcaacgcttacctgtaaggacatttgatgctaactggattcctcacactcgcttaagggaaaccaccgtactcagatcaagatgccagtctttcatggcaatatgcacttcttatgagaccacaaaccttgatgcatcatagctgaccagcattaagcttgcagtgaaactgactgctaggtatgaaacgacttatgtctaaaaattacatgaagacttgttattagtgcatgaaatggcattc

SEQ ID NO: 96855 - DNA, 506 bp, Glycine max
  Clone ID: PAT_MRT3847_58471C.1
acgagggtaagggaagattttgggagatttcttgtagaaggaaagcaaaataatgactattgaggaattttcagctaactattcataattctctggcgttcacctttctaatttttctcaatttggggaattttggaggagaaattaataatttcgaacctattgatattcatatcacttatcaatctatatctgtatagtaaattgactcgaattaaaaaaatatcatttagaattctttaattattcaatctataaatattgacttgagttcaatatatgcctgtattatcatataagccagcccaaatctagtttaatgagttttacccactccttgaattcaagataggtacattgttcactaaccccatacccattctttaaggaatacattgacaagtaactcaactcatttgcatcattcagttgaaatctagttttattcctatttttaggcccaaacccacattctaagatggtatcagagtctatcctagatccat

SEQ ID NO: 96856 - DNA, 480 bp, Glycine max
  Clone ID: PAT_MRT3847_58472C.1
atgatgtggaaccttcttttctgatctttgactaggtttttttttttttcaacgaaacttttatattctatgcataaaagcccggtatatcatcccaaagtcagatcccaaagaaacgcccttcatggccttcataaccggccatacccccatatgccattttccatcgacatgatccatttttgtagacaaacacttttattgttaactctatttcgcacacaccctaaccccctataagcaacatactcacttctgacatttttctgcctactattatttggctggaaatgcttgtaccccccgcatgacttgccatctatttaagacccagatgcttttccgacgccgccttcatgttcaacgtgctaacactcagctccttaccctgatgattattcttgcaggaaaaggggtggttaaccctgaccatcctttgccctcggccaaaaaacctttgatccatgcgcctgagtgttt

SEQ ID NO: 96857 - DNA, 375 bp, Glycine max
  Clone ID: PAT_MRT3847_58473C.1
ccacaagttgctttcacagtagttccagggtttaagaatggtaaaactggtttacaatgccaagtgtacctcacaacacagcacaaacaacaaagcaagggtaaattttttttcacttcaacaaagcaaaagtgactcatgactgaccccacacaactcaagtgattgaactgggaaggaattccttaattttcctaatggaaaaaaaaccttttggaaggaaattgaaggcctgttggttttgggaacggaccccgggcttggttaacccaccggggaacctttgcccatttgaattttggccattttgaaaagaaaaaccattggaccgcgttgcattggaaacaagccttttttttaaaaaccttttttttt

SEQ ID NO: 96858 - DNA, 383 bp, Glycine max
  Clone ID: PAT_MRT3847_58474C.1
tgtatttctaacaaactaacaccaaaaatgcgatagcaggcttctatatacccatgcttttaaatacatactattcctgaagcactttaggggagtatcgcttgactcgaatgcctcaggaacaccaggaataactttagcgtgggacattatggaggaagagacaatgactccagcattcatgatttttgaatagcgggaaatgcagacctgactgactcgaatgatttatatagatattgcccattaacctaaaaagaagtggactatgggtatggctttatactataaccgtatgcagtggcgtacatagctggcaaaacacgcatgatgaatctggtgaggactcaactcgatcttgatctttgactggcaatacgcat

SEQ ID NO: 96859 - DNA, 1225 bp, Glycine max
  Clone ID: PAT_MRT3847_58475C.1
caagccctcacttgaattgaaggaccatcctgcctttaatttctcatcaccacttcagtcaacaaaagatggtgatgatgaaatctctcccacttcttctaatagtactcttttcccactctaccaccaccttagcccagtccccggccgcggcaccgaccgccccggccacgccctccaccgcagccgccccggccccagcaccctccgcacccccgacagacatcataagaatcctcaaaaaggcaggagggttcacaaccctaatccgcctcctccaggccacacaagtctccaaccaaatcaactcccaactcctcaccacaagcggcggcctaaccctatttgcaccaaacgacaatgccttctccagcctcaaaccgggtttcctcaactccctcaacgaccaacagaagaacgagctcatccagttccacttgcttcccacgtacgtttccgtctctaatttcgacactttaagcaaccctgtgagaacacaggccggtgaaaaccctgataggttggcgctgaacataacaagctccggagggaaccaagtgaacatgacaacgggcgtcgttaatgttactttgggtggtacggtttacactgatcaccagctcgcggtgtatcaggtggacaaggtgcttcttcctcgggacttcttcgaagctaagcctcccgctccggctccggcgccagaaaaggctaaaggatctaagaagaaatctgtggacagcactgctactcctgcagatgatgctgaatcagatgctgtcagcgtgaaacagtggcatgttatgtgggttgcaagtgttgtacttttagtggcagcatttacgtggtgacaatgaggggtttgagaatgtaatatgaagcatattgaaggcttatcatattgggtggattgaaaggtactctctaatgattcaagtttcaggttttggtggaaattgtatttgattttatgaaggctttcttcgttctactagttctcttcaacccccctataagaaaaacttcatatctcgtgtattacttatgagaaatttgtgtataacttgcaaacgaagatatttgatctaatagaaaatgatacagaagttttgtttacctttattattgtacacagccaataattttagaggtctagctattattttatattgtaaaaaaaaaaaaaaaaaaaaaaaaaaaaaaaaaaaaaaagggcggccctcgagcc

SEQ ID NO: 96860 - DNA, 558 bp, Glycine max
  Clone ID: PAT_MRT3847_58476C.1
caccagctcgcggtgtatcaggtggacaaggtgcttcttcctcggacttcttcgaagctaagcctcccgctcggcttcgagcgccagaaaaggctaaaggatctaagaagaaatctgtggacagcactgctactcctgcagatgatgctgaatcagatgctgtcagcgtgaaacagtggcatgttatgtgggttgcaagtgttgtacttttagtggcagcatttacgtggtgacaatgaggggtttgagaatgtaatatgaagcatattgaaggcttatcatattgggtggattgaaaggtgaatgatcaacattttgcagatatgattttaaataattgttttttttcttaatttctctttactctctaatgattcaagtttcaggttttggtggaaattgtatttgattttatgaaggctttcttcgttctactagttctcttcaacccccctataagaaaaacttcatatctcgtgtattacttatgagaaatttgtgtataacttgcaaacgaagatatttgatctaatagaaaatgatacagaagttttgttt

SEQ ID NO: 96861 - DNA, 151 bp, Glycine max
  unsure (1)..(151): unsure at all n locations
  Clone ID: PAT_MRT3847_58477C.1
ggaaatagctgtttcattntnccaaacttgantagacttgagtacattcttttgtntttnagaacnatnagcnatctggtgtaggtnatctcagcaaacaatgcnataagtgacttcnctagcnatnntatttgaaccggagaaattaaaa

SEQ ID NO: 96862 - DNA, 265 bp, Glycine max
  Clone ID: PAT_MRT3847_58478C.1
gggtaaattggataacctgtgaatgtttatataaataattgggagtttttagtttccagggacttgtatagttcttgtggttcaagaactcctacaattctcttctatgcaaaattattgaatatgttgattgagttattagatgatgccaagactgcgttgaattcaatgggtgtctccaatgattatatgtttacttaagaatttgttagttcttgaggattattatagcttatggaatttggaaactcttatgattctcttc

SEQ ID NO: 96863 - DNA, 397 bp, Glycine max
  unsure (1)..(397): unsure at all n locations
  Clone ID: PAT_MRT3847_58479C.1
gctatctttctccctttatctataacttttcaactacttttctaaattctaacctatgctgcttttacaattgggacgactccaacntttcttactcttacccaaaaaactactatcctccttctcacacttgcccttgttttttaaatacacatttacttatcactactttttgtcttatacccttcatgcattactcccttatcaattccaatgaaattgtcttcatcaactataccttaaatatcatttttctactacaaaccaatattatattctttcactaacatttctttatgatgttattttttaataaactttaaactttttttcttcatctaattaattcttaaacataatttttaatccttacaatactcttatttaaattctcttt

SEQ ID NO: 96864 - DNA, 208 bp, Glycine max
  Clone ID: PAT_MRT3847_5847C.1
acctagtaagaatattgcggggttcatctatgcaatttgcaggctcttgcatagcccctcatgaacatatgtgccgtgacatccactaccaagatctaacttgcctacagttcaatgacaagccccttgcacttatggaattcgaccggaacatccttaatatttatgtgggcagactgcctcgataacccaaatcctactccacatt

SEQ ID NO: 96865 - DNA, 539 bp, Glycine max
  Clone ID: PAT_MRT3847_58480C.1
gaaggtttcccgtcatcactgtatgacgtcctccttctttggggggggggggggggcagataagaagccaaagagaggagcggtggcgatgggctaccaactgctaaagagaggaaagcagcacaagctctctggctgggctttggtaagcatgagaaaacgattttaaaacgactataacgcgacagggctggcaaaggtggcaaagcataaaaacggtaccctgtgtgtagtttgagaggaccattaaaacaagtgggggcgcaggggggtgggaataagcgcggtagtactagcgtataactggagcgtaagttcggcgaaccggagagcgttattagagtggaaacccatgaaatcaaagatatgtgcaccgaccgtaggccaccatgggcaaggctaacaagtcctgggtgtggggctgaatgtggcgctgtgggtaagctttttataatgtggcattaaaggcagcctggttgtaacccaattaattgtatgcaaggtacatgtcagcagagtttgtaagggctcggtgggtg

SEQ ID NO: 96866 - DNA, 670 bp, Glycine max
  unsure (1)..(670): unsure at all n locations
  Clone ID: PAT_MRT3847_58481C.1
tatcaaactctacatacaaatcaatcggatatgaacacacccaaaatgcattacaagactttgatcgatgaaaatggacttaatatcactcgcttacgttaccttaagtacgttaactccactgtgcacagtgtcaacgacacaaaatacagaaggatgagttacaagaacagatcaactctgaaaaaggacttttatagtcttaaaaaggtcaacaagcttgaagtgaatgaagtccactcctaccacgtcacgtcatttgagcatgttcatagattgaccaagggattgaaaaagataactttcttgcaaaattataactctcaattctctattagaggagttgagaccaagcagcagttgctaatgctcagtaagaatcttaaatcgcttgcagtaagttatgaagttcagaatcctgacttgaccgggtatgagaagttttacgaatctatattgactcttaacggcctaatgccaaataaaaccactcaaaagagtgtacatgataatatcagtaatatgatccagcatttaaacattgtcttgccaagtgatattgtatctgaaggcgactttagactttcaaatgaagtccatgaccatcctnctattgatagatttaagaatgatccagaacatttcatttgggaattagctgcgggatact

SEQ ID NO: 96867 - DNA, 295 bp, Glycine max
  unsure (1)..(295): unsure at all n locations
  Clone ID: PAT_MRT3847_58482C.1
cataaactctctcaagcctagaccaaccatacatcgcatctttgctctaaccaattctatcagcacgatcttctcgtagatcctccacaacataccactccgtatgactaccaacacacatcataataactgccaacgaaccgcacttaatgctcacaggatgacttcctgcagataaacggcttcgtcatgcggacgagacgatctgtccgactccatctgcgagcttatngatagactgcaccacacgcagagggcatntctaattcgccgctagggctgctcttattccacc

SEQ ID NO: 96868 - DNA, 242 bp, Glycine max
  Clone ID: PAT_MRT3847_58483C.1
aatcatctaactcaagaatcagatatttatagatttggtattagcttgtctggatataattaccggaaggaaagagatttacaattaaaaatctgcaggagagcagaatattgttacgtggtaagaaaatcgtattgttatttcttctcataggtctggctcattcgaaagcctgagagtacaatagtgaattgttaaataaacattgtggatagtttcattcgcatagtaatagtaataat

SEQ ID NO: 96869 - DNA, 458 bp, Glycine max
  Clone ID: PAT_MRT3847_58484C.1
aattcggctcgagacgacagaagggggttataagatataggtagcaaaagcaaaggttggcactgtgcatatcagccaagggagaggacaagaacgcttatgctttttttttttcaatttttacaaccattatatccattcttatttgtcatttcagggaatcctcaccgtccctttttgccgtatgagcagctggtgtatctgactttcctctacgctataaatacatccactgctactccatgccaaaaccaaccaacactcacagcaagagctccccaattaagagggtacattttgcttagagttcaagtaatctatttccttgaaaaacctcaagctgggtgtttttgtgagtgtttttgagtgactcttataaatcatcatcatcagaagaagaaaaagagagaataagttacatattcattatgggggctaataagaagccatcatcatca

SEQ ID NO: 96870 - DNA, 1155 bp, Glycine max
  Clone ID: PAT_MRT3847_58485C.1
gatacggctgcgagaaacgacagaaggggaagcaacaccccttctatcagtgtgttttcttttccctaccaacttcttctactcttccccacacgatactactacacaaatggagaaccaactcgaactgaaccctaactcgctgaccgaactcagtgagtcctcggcgccgtccgacgacgacgaaccggctctgagctcccacaccctcgccgccctcaaagaattcctcgccgagcagcaacgcggctccgacgccggcggagagtccgaggtttctctggtgtctgaggattggaggctgagccagttctggtacagccccgaaaccgccacaaccgtcgccgaagaagttctcgctctctgcggcggcggcatccgcgctcgcgtcgcctgcatcgcttgccctaccctctatgcttatctcaagaaaatggatcctaatgtgcctgcgcaacttctggagtatgacaaacgttttgggcaatatggaagtgagtacacattttatgactacaatcaccctgaggatattccatcagaattgaagcattcctgcaaagttgtagttgctgatcctccttacttgagcaaagagtgcttggagaaagtggctgaaacaattcatctgctcgtacaacctggagagtcatttttgcttctactcacaggtgaagtgcagaaagaaacagcagcagagatcttgggcttgcatccttgtggttttaggccccagcactccagcaaacttggaaatgagtttcggctgttctcaaactatgaccctggaacgagactaggagggtgggaaaaataggtgtatgaagctgcagttgcggatttgattgatgttggagtgattggatgcgatcatgtctgccactaagaggacgttgaagtaaacatttctgtggaattaatattagcctctaggcaacagccaacaagtgtgattttgacattggtggttggagatattgtctagttgtatcaatttctagtaataggcacagttttgggtagtatttgattattacgaggaaatgagtttcaaatagaccgattaaatttgtcttttctgatatttgaaagttgaggtaaatccttgaccccccccatttaagattattatgaatgatagtatgtactcctagc

SEQ ID NO: 96871 - DNA, 368 bp, Glycine max
  Clone ID: PAT_MRT3847_58486C.1
agaagcaaaaacttgtgggcatggtatttaagtgaaaacggacactccatgcccagctcgctgacaaaaaaaaacttgctaaattaaacggggtttaattataagatgaacgatacaacggctacatgggtgtactagacagaacatatcttttaccagctattccagcaccgcgatgttaggggtagcctagcacgaataccaagcttgtggctcaaccatttgtaactagctttgtaataataacttttgccattcaaataggcatccttcacttttatgttcgccaccagttctttccacatgattcattgcctcttttaaaataaatgatagcgtgccgatacacaccagcacaggcgctgtgt

SEQ ID NO: 96872 - DNA, 348 bp, Glycine max
  Clone ID: PAT_MRT3847_58487C.1
aaacattgtattctgactttaacattgctatacctttctaattggttgcaagggacaaaactatattaacaaacaagagacaaacgagggtaaaattgaaccaaaggccttaagaagtacactgagccaacaaaaaaagggatcatataacctacacataaatcacaggggtaagaacgagggatgggaccatagggattcgggaagaaccaagtcatatgcggtctaagaccctggggaaaacttaggggggtagacccaagcgttgggggccacagggttgtctaggaaggccaaaaggttcttcaaaggaccttgggaaaagacaatagcttgaacccagaattc

SEQ ID NO: 96873 - DNA, 482 bp, Glycine max
  Clone ID: PAT_MRT3847_58488C.1
cgggaaatgtggtaatacaagacaaaatgcagtttccaagtggtgctggtggcggtggcggcggcggcggtgctggcggagagatccaccagccccaccactaccgcccgcaatggtttgttgatgagagggatggacttattggttggctgcgaagtgaattcgcagctgccaatgccatcatagactccctttgtcaccatttacgtgttgttggtgatcctggggagtatgatatggtcgtcggggccattcagcagaggaggtgtaattggaaccaggtgctgatgatgcagcaatacttttctgtggctgacgtggcatatgcgctgcagcaagtggcgtggaggagacagcagaggcctctggatccaatgaaagtgggtgcaaaggaagttaggaaatccggttctggataccggcatgggcagaggtttgagtctgtaaaggaaggttataattctagtgtagagtcttatagt

SEQ ID NO: 96874 - DNA, 325 bp, Glycine max
  Clone ID: PAT_MRT3847_58489C.1
ggagaaagaaggtgttgggcttgaaatcactactgagctaaggttgggccttcccggtggggaattacctgacaagaacgataagatgaagaagagggtgttttcggagattaatcaaggtgatgaaaacagctcctccgaataatatcgcataatccaaaccaaaaaccaagtggttgggtggccttctgtgtgttcgtaccgtaataagaacaccatgaatgaaaccaaatagttcgtcaaagttagcctggacggggctccattcttgcgtaaaattgaatttgtgtgctcaaaggtatattttgtactagtccttggcttg

SEQ ID NO: 96875 - DNA, 720 bp, Glycine max
  Clone ID: PAT_MRT3847_5848C.1
ccacgcgtccgcaaacattctaaagaaggttgcttccgtgagaatgtttcatcaaccaaatgatgttccaaatattagatcatatccacttaatagattggttcagcaaaatgttgaagccatgcatgatggatgcctctttgcttcaacctcttattttgaaagaaacaaaattgctaaccttcagaatgatatagaaagtgagaacgttggtgatagagacatgggtttttgggtggggcttggcccagagagtgagtgggagagtattcgatcgttgcttccactatcagtggctccaatatcattacagaatgagtatatcggtatggaagttgtgatgaaaaatggaaagaagcatgtaattttcaggggtcttgttacagtagtgaatgattcagatgttattttgaatattttgacttgtcatgcatctcatggttgtgattccttgcttggagtaaacagttctaacactgtaacagcagaagtctttcaaaatcagtattatcagccatcatctggttggggtaacaattggccagctgtgcacaatgataatcctggacattggagcacaagggacttctcatactcatctaaggatttctttgagcctccacttcctcctgggtggaaatgggcttcgggttggtccatagataagtctcaatatgttgacaaggaaggctgggcatatggacctgacattaaaagcct

SEQ ID NO: 96876 - DNA, 608 bp, Glycine max
  Clone ID: PAT_MRT3847_58490C.1
ccacgcgtccgcgatgttctgcgcgcgtcccaccaatacggtgacgcatccgtctttcaaatcttcttctgaaatgcaaacctccatttccccttttctctctcttcaccctcagtctcactcgttccttccttccacgcgccacactctctcactctccgcgccacaaagctacgcgcctccctcttcgccgccgctactgatccaccccagaccgccgcgtttcgattatgccccttcctacgagacgcgtccgaacggtatatacctcaagcgcaggaaggtagaacttgcgcgccaagtgtttgatgaaattcccaaacgagacgttaatgcgtggagtaccatgatcaccggtttcgcgcgcaatggaatgctgagggaagtttgggagtacacgaggttgatgttagaggaaggaataaatccaaatttggtgggaatgacagttattcttgatgtcataggaaaatttggtggtcgaaatttaggtagggaggctcatggttttgtgttgaagatgaatatttattacaagggaattgtcgattcaatcggcgctgattgatatgtattgcaactggggtgatgttggctcaagggagccg

SEQ ID NO: 96877 - DNA, 604 bp, Glycine max
  Clone ID: PAT_MRT3847_58491C.1
ctctggcattgtcaagttttatgtaataagaaactattactttggaaatgcaaaatgagtaacatggatggcaattgcagtttggagaattgcaggttgaaggtaaccccagataaggccaatattgtggctgtcattgggtctctttttgggtcagttctccaagttaaacttgactattataagaggatggagacaaggaaaacgtcaattcttgtttaaatttggaacataggattctttgttggcgaatagcgcggagagttcaaaacgttcctgacagttcattgcaatatgcaaatgacaatgctctgctgcttgctaaggtgctttgacataacttctcacttgcatcacttcaacttgtttctgacaactactggttactgatcctcactaaatgttcagctgcattctttaaagggagcatcgcttgctatatactactgctaaacgttcttgcatgcatttatctcattgagacttgttctacttgggttacagctcaaatcaaacaaaaataaagattgagttctaggtgtgcccttgcctcagttttgcttgcaaatggagtacatgcacggtctacggttggggagtaata

SEQ ID NO: 96878 - DNA, 427 bp, Glycine max
  Clone ID: PAT_MRT3847_58492C.1
gtggtgggttttttttttttttttctttatcggttgtctggttttttccaaaggaaaacaaagggcggtccactagacagcaaaccatgaccaccaggcaaagagaaccatcggctccagggggacaaaaaaattatgtgccttgaaaaaggggcgggggggcttattctataagaccttatttcgaaccctacaccaagtggggtcaccaaacacgggtctaaaaagagccctatttgctcattcggggagggacttcctcacaataagaaggcacattctaattgcgaggagtggaggcttcagagggactgcttgaggagccacctgggggtggccccagtggggaccccgttgcaagagaaccatttgcactctcattgcttccccccccctgggtcttggacgggggctgctcgctccctct

SEQ ID NO: 96879 - DNA, 224 bp, Glycine max
  Clone ID: PAT_MRT3847_58493C.1
actcataatgtagtttgtatatctctatatgcgaatgctcgcagagcgattggataattaggtggtaatgccatccattcgattctgcagctttgatcttcgttttccttgtgaccgtgtaaccctctgtgacagtatagagttgtgccctagttaagtcgtttttttttttcgaattttggggattcacgttgtaagggaatgcattgttgaaaggaattctt

SEQ ID NO: 96880 - DNA, 266 bp, Glycine max
  unsure (1)..(266): unsure at all n locations
  Clone ID: PAT_MRT3847_58494C.1
cncnttttgtttccncncagatatttatagattagttaggggttttaggattcttctttcccaggtggctgcgatgtgactgtgagtaactgaaaatggaaggtttaacgatgacgatttcggcgaactctacactntcgacattgaagttcccaatgccatccccnnnnnnnnnnnnnnnnnnnnnnnnnnnnnnattgatgtaaacagtaacattgtgaatcttgataaggatatggacagcnagacagtgaatgatgactgtc

SEQ ID NO: 96881 - DNA, 277 bp, Glycine max
  unsure (1)..(277): unsure at all n locations
  Clone ID: PAT_MRT3847_58495C.1
tggactacttcantcntcttagttagttagcntcttcattncatttnnttctttcntcaaaaagantcnacnccagccntgttttangctntctttntgtcagttgtgtttatccaagcacaccanaaacagagaaaatgaggatggattatntgaagcaaaagtttccnttcaaccacagaaanctctnccctcaaattgctcctnagaatacttgnttataggcctcgctttccgcatcctcttcttncantccctgtnngcttntcgtcgcctg

SEQ ID NO: 96882 - DNA, 1120 bp, Glycine max
  Clone ID: PAT_MRT3847_58496C.1
ctcgagccgaatcggctcgaggctagccaatcctaattcctattcctatccttattactacataactctaaagtaagtaagaaaaatagagcaatttcacaacacaacacaactcttataattgtgtgagttattaattgagtatgggaaggtccccttgctgtgagaaagctcacacaaacaaaggtgcatggactaaagaagaagatgacagactcatatcttatattcgagctcacggcgaaggctgctggcgttcactccccaaagccgccggtcttctccggtgcggcaaaagctgccgtctccggtggatcaactacctccgccccgaccttaaaagaggtaactttaccgaagaagaagacgagctcatcatcaaactccacagtctcctcggtaacaagtggtctttgatagctggaagattgccggggagaacagacaatgaaataaagaactattggaatacgcacataagaaggaagcttttgaacagaggaatcgaccctgcaactcataggccactcaacgaagctgcaactgctgcaactgttacaactaatatatcttttggcaaacaagaacaacaagagacaagttcgagtaacggaagcgttgttaaaggttccatcttggaacgctgccctgacttgaaccttgagttaaccattagtcctcctcgccaacaacaacagactcagaagaatctttgtttcgtttgcagtttgggtttgcacaacagcaaagattgcagctgcaacgtttccaacgctgtcactgtcaacaacaccactccttcttctgctgctgctgctgcttatgatttcttgggcatgaaaaccagcggtgtttgggattgcacccgcttggaaatgaaatgaaaattcaaccaaattatatcaattagttagtgttgttggagagaagtgagagaatgaaattcgttaatttttgaattttctctcctattttttcttttttttcttctcttatttgtataaataattagtcgctgatatgcataatatatagtaccggtacagttgaacatttttgccccccttttgttgttactcttcactttcttttcttccggcaattgatggtagtcataaag

SEQ ID NO: 96883 - DNA, 215 bp, Glycine max
  Clone ID: PAT_MRT3847_58497C.1
ttttaactcttccacgccatcttactttcgactctcaaacaatctttctctctaattacattccaaatatatattaatatatatatcatttacatcaacatcataaagctataatattaaaccataatatgaatattaaccataacaacttttcaacccattgtaatattcatccaaattttaaatctatttccacaaactcataaatctattct

SEQ ID NO: 96884 - DNA, 471 bp, Glycine max
  Clone ID: PAT_MRT3847_58498C.1
cccacgcgtccgggcttgttcattctctgtttctgcactgaggcaatttggatcaaattttgtcatctttagtttgggtgattcgccccctactttttttcccctctttgtattttttaaaatattttttctttttttttgaaggtacggttgtcggaaattttttatttttttcatcgtttttgaataaataggcgaatttatgagatgggtttgggtttttatgcttaatttttcgattttgtgcaaacttttaaaatgggttgtggtggagaggtcgaatccagaatttttcattgggttttgccttgagttgactttttggggatgcagaagataactgataaatctgatgataggaccactgggggttgtgaatcaatgcaagttgggaagtgggaatgctcaagttgcataaatatgtagtcatgaattgatatttgatatttagtgtagccttttttttattga

SEQ ID NO: 96885 - DNA, 523 bp, Glycine max
  unsure (1)..(523): unsure at all n locations
  Clone ID: PAT_MRT3847_58499C.1
ttgttttttaaatgttgtacaaggatgcgtgaattgtaattggaaaccctgctaaggaaaacagcaggacaaagaatttggcactataactcatgctaggcttccctcttagctttttaaccctgatgcgtgagaccctgagactgggtaaccaatctataccctttcttatgcatatgcaaaggtgttgctagcattgcctattgagaaagttgtgtgcgtgaaaccgcagttactaactggtgaatgataacagagtcggaacacacgtactctgctaaagggaaaaacaagcttctacttgcatggactagtgctgccgggcgtctgtgaaaacagaggggccacactatgctgccggcgacggggagaaccccaatcaactagtgcctgacacagacactgaagggaggttcatgggatctacctgatgacctgaaagagcaaaacgagatggactaccancagcctccaatatttgctcgacaaggatgtgaaatcacattctgtagatgctaaatgc

SEQ ID NO: 96886 - DNA, 227 bp, Glycine max
  Clone ID: PAT_MRT3847_5849C.1
gaaaacaaaaaaaaggggggggaaacaaaggaccaaattttaatctaggccatacagaaaacctttagttgtgaaacgggccctagcaaaaaaaaaggggaaaccattgaagtttaaaaaaaagcaaggaaccccgaaaagaaaaccctggaagaccaaaaaatgccttgcccagcccgcccaaggggcaacaaagggggggcaaaataaaccctggcctgaaggga

SEQ ID NO: 96887 - DNA, 461 bp, Glycine max
  Clone ID: PAT_MRT3847_584C.1
gaggagcataagcaatctcttggtgttgcatgtgttaaagctgttgaagcgtttgttaactctgaagctgacaatgatgtcaatgaatatgatggggggagtcctgatttttatatgccggtcaatgctttcatcgtataagatctaccgtctttcagaatgagcacgaatttgatggtgcccatgtcaaccctgctcaagcttgggatcttgctcacactagttcgaaagatctatgctcctctcacctgagatgctctcttagcaagcgttgctgacactgagaatcaaactgtaatggctacaatggtttcagcttggaaacaaaaaattgaggacaacttggtagatcaggacttgcatccaccatttgatatcctagactatggtgagaggattcttgacaagttctccctgctttcccttgtagcaagcaagtgtggtgtcctatccttttctga

SEQ ID NO: 96888 - DNA, 141 bp, Glycine max
  Clone ID: PAT_MRT3847_58500C.1
aagacgaaccaaggggcggctcatatctgagggatccaagatctcgtccgcgatcatgcaactacctgcctcctgtatggagtcgccaaactttaactcattggcccaagatacccaacctcaagcactgaaaaaccctgt

SEQ ID NO: 96889 - DNA, 248 bp, Glycine max
  Clone ID: PAT_MRT3847_58501C.1
caaaaaccaatttctgaaatttatcaattcaaggggggcttccccaggggattaatccaaagttaactgagggaaaaaaaaagacacttcccaggacttgactacttgttagcggggggggggtaaaccacatggggaaaaaaaaaaaaatttttacaaatcccaaaaccctttaataaaaaaacttgaactccagtcccaaggaaacatttaccaaccccttttgaccctttttttggaccccgggg

SEQ ID NO: 96890 - DNA, 132 bp, Glycine max
  unsure (1)..(132): unsure at all n locations
  Clone ID: PAT_MRT3847_58502C.1
tgttcgagtttgttatatcgccttgtatcgctcgttccatggtggtggcttctaaagtggttgtgcggaataagnaagccactataaacggttttttaacggtgtgcacttttcaatcatttttcatgtttt

SEQ ID NO: 96891 - DNA, 280 bp, Glycine max
  Clone ID: PAT_MRT3847_58503C.1
ggctcgagcggcaaccgacactattgtgcctgttgccctgtcgggttcttcatgaagggaagattgtcgaagaccgaatgtacgataccagagccaaaacggctgtcgttaagaggggcgacgatcccacggttgggaaaccgaacgacatgggggcggcagagactgaccctagcatgcacaagaggcctccacgtgcttggttcgccttcatcgaggagctcatgagtgtataggactacgagcatcctgacagcatagcagtggatgtttaggacaa

SEQ ID NO: 96892 - DNA, 198 bp, Glycine max
  Clone ID: PAT_MRT3847_58504C.1
ccagcgtccggctgaacaccaaaaaataacggcactaagcccatcgaacggttaacctcccatcgccacctactcgattcataatcccccttcgctgcagtgctgacccgtgccgatgccctggactactcatggctgctccaccggcgggtcctatgctacattctccttgtctgttcgtcgctcatacttattgtt

SEQ ID NO: 96893 - DNA, 235 bp, Glycine max
  Clone ID: PAT_MRT3847_58505C.1
tcgtacggctgctagaagacgacagaatggggagcttgagaagagaaagaggatctcatggtggcccttaaacttcatttcactcacataaaaatagatatatagatagagaaagtgctgtatactacacacatactctccatcttttcaagatagagaggtgtttgaatgaaaataataaccgaaattaaaatttttgcaaaggaagatatgtatcttttctaatttaacatct

SEQ ID NO: 96894 - DNA, 262 bp, Glycine max
  Clone ID: PAT_MRT3847_58506C.1
ggtgcgaatcacaacactgcacaaggattagggtttacatttgggaggtagcacgagagcagtaggtgaagcgtgcattctcaacagttgatctctctcctttcctgagagaggatgacgatggataaccgagagccatagatgcaatcacccaagtctggtctgcatatggcagcttccatattgtgaaccatggagtatcccttgatttgggtaaagaggccatgcagctatctaagaccttgtttagattactcggatg

SEQ ID NO: 96895 - DNA, 597 bp, Glycine max
  unsure (1)..(597): unsure at all n locations
  Clone ID: PAT_MRT3847_58507C.1
ccgggccgacccacgcgtcaagagaaatctatcaagacaaaggttggagccttttctgttttgaaagaacttgtggttgtattgcccaactgtcttgcagaccatattgggtcactcattccaggaattgaaaaagcattaaatgacaaatcatctacctcaaatttgaagattgaagccctaacatttacaagattggtattatcttcacattctcctgatgtttttcacccttacatcaaggctctttctgcccctgttctgtcagctgttggtgagcgttattacaaggtcactgcagaggccttgagagtatgtggagaacttgtccgtgttgtgcggccaaacattgaggggtctggttttgatttcagaccatatgttcatcccatatataacggcattatgtcacgcttaataaaccaagatcaggatcaggaggttaaggagtgtgtatctcctgcatgggcctcattgtgtcaacatttggcgatcatcttagtgcagaattacctgcatgcncttcctgtgcttgcngatcgaagggaatgagataatcgattactgctgtcaagcatgtgctgtcttgctgcttcc

SEQ ID NO: 96896 - DNA, 265 bp, Glycine max
  unsure (1)..(265): unsure at all n locations
  Clone ID: PAT_MRT3847_58508C.1
tccaagtnaggntgtncctcgggtgcntngntgcttgagcaagtaatcngctccgntgagagccccgcaagcttgtnngacggtnnccagtcccagagaaccgtcatttacaataaagatgcnattgaagctgncttggtgaanattgaaaaccctgccagngccaagggccacatatgtaatgaatcaaccctaacaataggccactgtaggcagcgtgcnnaaanaaggagcaggtttacgcanangaagtntanancaaacc

SEQ ID NO: 96897 - DNA, 361 bp, Glycine max
  Clone ID: PAT_MRT3847_58509C.1
ggctcgaggaacccaactgaattctctgctgccgagctaacctacacaccggaggggcctgtaagttccacattgacttgtatcccggtttctccatcccaaacaggtcagcgttgagggtgcacatgagaaccaccgacggttcagataagaatcaccgggtatataagaacgataaacaaccctggaaccagctccagccagtgaggctcctgcaacacaacatgctggatccagaggtatctgctcaagacgatcaacatgcgactgagggaactgccgcagaatgaaccacctgaggaccaaaggaagaaaccaccgaagcaccaacagcactgacagtagaaacatcatcttcaga

SEQ ID NO: 96898 - DNA, 398 bp, Glycine max
  unsure (1)..(398): unsure at all n locations
  Clone ID: PAT_MRT3847_5850C.1
natccgntgtggattcgctcgacgttacaagcacgcatgccacacgctacggaattctcggtcgtggaatcaaccgaactgggtaaaaaagcaaaagaactgaataaagcacttgagtcacttgataaggaggaacgaggcggtctgaagggaagcgaaatgacctaaaaacgtgacatcatttggacactgatgtgtctgaaccgtgagatgatgtctcgcttctagccgtgatgtgtacacaacgggaaaaggctgatacaacatgggcactaacagcactagggtatctggcaaaatttgatatgggcattgtagggttaatcgaagatgtggcatggaccgctcatatcatcatctatctattgaacgagcctcctctatctcctttcttgaat

SEQ ID NO: 96899 - DNA, 938 bp, Glycine max
  Clone ID: PAT_MRT3847_58510C.1
ctcgagccgttcgtgttcgtgactcactcactccaaattcttattcttttctttgcttcgccattgattgtctgaatttgtttgacaaaacctcagaaaaacttcattcttttccctcatattttatctattttttttttttgcttgcctccatttcgattcctatttttaatttttcaattgttcccgagaaatgaataactgtatgaatgggattacgatgattccgatatcatgttttctttgccgagaagaaatctcactaagttcttattaatcgatttacggacacataggggtttcacttttctctacgcagattaattgagatggaagtctctgggcagaatattgtgaaatgtgatgaagagaaagcattgaagtgcttgcttgatgcctttggctcagttttttctcttgaagagattgcttctgcctattgcaaggcgagccgcaatgcggacttggctggggaaatgttgtatgaaatgaagggaagttcctcaggatcatctacaacccttgattcatctaatgcagatgttatgactgaagggtcttctgagtcatcagatgcatattcccttgagaattctttccaagaaaggaaaacttcaaggcccaaaggtcgcccgatttcaatgggtactgtttctagcgttattgggaaggattatggtagacctgcccgatcagcaaatgggtcttttgcttcagtaaaaccaactaagttggatgcaaaatcactacccatgactggaatctggcgtgagaagggcaaggcagatgtttccatttcgaagcatgatcagcttcaccaggacatggaagatttcttatttaaaatgcttggagagggctttcagcttgacagaaatatgatacgccaagttcttggtatgaaaatttcactttttttttttggctgttttgaaatg

SEQ ID NO: 96900 - DNA, 433 bp, Glycine max
  Clone ID: PAT_MRT3847_58511C.1
tgcgagaagacgacagaagggtgccccacctaccactaccattatttgattactccatccaaacgtggctcctaatcaatgctgcatatgcaacccacctcagctcaataccttagcactgatgataagtgttactaactagttcttcctacatatatatcccaacactgatattttaatcttatactctcttttttactatttttagtgccaaggacattcttgatcgatcaaagactaattttttgaaatataaatattattatacacacatggagttaagaaccaaactcttaattatatacataagaaacataatatttgcctattatcacaccatattggttcaattttattcttatacttatagttatagttcattgcttcctcatcttaatttttagacccttttatggataaaccctttttttta

SEQ ID NO: 96901 - DNA, 645 bp, Glycine max
  Clone ID: PAT_MRT3847_58512C.1
ttttaaatttttgacaaaatttggtttttggttccatttttatatgtcaaaatctatttttgttccagatcttgttaatgtgttgaggtgtttctacctcacttctgctgtatcccaatccatcagaccccttgaatggagaagctgccgctttaatgatgcgtgaccgaccaagttacgaacaaagggttaaagagtactgtgagaagtatgctaaacccgaagacataggggaagccacagaagagaaatccagtgatgaggagatgagtgaagatgaatatgattctagtgatgaacaggttgttggtaaagcagacccctagctttgcatgcatgtcctgttcttaactttgcattttatctgtacatgatgttcttcttctagttctgttaattcacctcaccacatgtgagcttattatggataaggggggaaattccccttcctttctagtttccctgtcgctgtaaataaagtaccattgatttcctgatgcaatcttatttcatgtttagcactttcaagtgactgtgctgtgctgtttagccatggtaatttaatcaacaatgttagcacacagtgtataaatgacactccttgtattgggtgattcatgtttgttccattaaatgatgagaatc

SEQ ID NO: 96902 - DNA, 2121 bp, Glycine max
  Clone ID: PAT_MRT3847_58513C.1
taaataataaaaaaaattatttaacccggacacaattgaggtgatatattgaacaattaaatttagtcttagggaattttaactaggaagaagaaccatacactattgttgattacaaaacacagacaagtaatcaccagttcagttgaccaatagggaggttgtaacttcaaattcagagaaaacaagacaactattgaaaaataagtcactcttcgcttgacttttgaatgtaacatcgtataacaagaaaattaaattattagaaagaaaaaaaaaatgcctaatgccataaaccttgagctaagtgacacatttgtgatgtttttgttaagccaagtatccaccctccctgtgccacagttgagatgaatatttaagccaaaatgctcatgcaaagccccacacgaacgcggacgcgtgggtttatatgtcaaaatctattttgttccagatcttgttaatgtgtttgaggtgtttctacctcaacttctgctgtatcccaatccatcagaccccttgaatggagaagctgccgctttaatgatgcgtgaccgaccaagttatgaacaaagggttaaagttgttttattttggtcttcctcatgtcagccacaatcaaaatctaagccaagagggactattgaactaacaacattttagacctctgggtagtagatgtagacctaccatcactactcagcaaattggatgtgcacatctgcttgaatgtgtcatgcacatatacactctcacaaacaattataagaactttgttttttataattcttaacctcatttgattatcttattaatatcattaacacaacttgctgctcttctactaactgcattataatctttaacatttcaagtttgatccgccaatggaattgaccttgttgacatctgctaccaatatcatgctgctttgttttatgatagcatcaaatccataacataaaaatgagaaaggttggagtagccgagcaggacaaccatttaatggaacttcttctgtgttataagaacacgagaaattttggttcagctacaattgtagtggtgatataaaaaatgttaaaaagcatggaatggcagaattttgatctctggcaaaatactagtggaagtatggcaatggtatactcagattatagttttaatattttcatttgaaaatttggaaactaaaccaggctttggtggagcttgttttgtttctacttcaagcaaaaccatttttttgggctatgtttggatttaaagaaatggatggaatagtgtaatggaatggaattatattaggttccattgtttagattgtttaaaataaaatggattggaactaaacctaatggagtgcattttattcatttcatccaatgccttgttatctatctagttatctatctatggacaatgaatgctaactttactctatttcgtttcattctattctgcacatcattagatatcccaaaatagccttctttatctaactttttagacagtatctcactttaatattttttaaaaatctaggcttaaattcttctgagaaccaatttctggtttttatttcagaaacaattaaggtttattttttatttaattcacaattgactgatgtgtcattggcttcgatgtcagagtactgtgagaagtatgctaaacccgaagacataggggaagccacagaagagaaatccagtgatgaggagatgagtgaagatgaatatgattctagtgatgaacaggttgttggtaaagcagacccctagctttgcatgcatgtcctgttcttaactttgcattttatctgtacatgatgttcttcttctagttctgttaattcacctcaccacatgtgagcttattatggataaggggggaaattccccttcctttctagtttccctgtcgctgtaaataaagtaccattgatttcctgatgcaatcttatttcatgtttagcactttcaagtgactgtgctgtgctgtttagccatggtaatttaatcaacaatgttagcacacagtgtataaatgacactccttgtattgggtgattcatgtttgttccattaaatgatgtgaatcttactctatttatttagt

SEQ ID NO: 96903 - DNA, 234 bp, Glycine max
  Clone ID: PAT_MRT3847_58514C.1
cattggtattcaaaaactattcttattcatgcgaacattattttagattaaattacaacaacaccactatacttttatataataccctcattcttattcacccaatcgtccggctcacaacagcttaagcacacaataatcccaccttatctataatctataacgtccaccaatatatctacttctacctaactatctaaactactgacacaaggcctttaacattactcaatc

SEQ ID NO: 96904 - DNA, 151 bp, Glycine max
  Clone ID: PAT_MRT3847_58515C.1
ctcgagccggccttagaatgattcaaacatgtatacaaaatcaaaatatgcaatcagtttgcatgcaaactgattgcataactagtattaagtttaagacatttcttgattatgcagtacaagaaaaatgaaacaaaacaacatatatggg

SEQ ID NO: 96905 - DNA, 376 bp, Glycine max
  Clone ID: PAT_MRT3847_58516C.1
tgactagtgattcgtgtaattggtcaggcaccggggtgcaagtgtttagatggatacaagccaaaatcgccccggaatgggaccgaaatgagttggaatcaggggtgtgagcacaaccaaacatggagctgcaggaaaaaggtcagggatggctttaacacagtcagtgacgtgaaggtaccagacactagaagatcgtgggttaatgcaaatatgacacttgatgagtgcaaaaacaaaggctgggaaaatgactcatgtacagattatgcaaattcagacatcaagggaggatgatgaggatgtgccctttagttcagagatctgttagatataagactgatgcccaatgctgggcaagaactgggtattagaa

SEQ ID NO: 96906 - DNA, 153 bp, Glycine max
  Clone ID: PAT_MRT3847_58518C.1
gacaaaataaatcacgtgttgttattatatgatatatgaattacaatactaaaacacattactgagtttttaaaatatctattagataacgttattctagacaaagattattatggggcgaggaatacggaatatgactgaagatgaacgaaa

SEQ ID NO: 96907 - DNA, 458 bp, Glycine max
  Clone ID: PAT_MRT3847_58519C.1
tcactataggcaaagctgcctccccgtgccggtccggaccggaattcccgacccaacccacccgtcatacgtacggatcaggctcacatagaaacaagtgggtttaaattgtctctagatgatgttgaaactcctaaaggctccacgtcggatcttaaaatttctaaatataaaatgtgacttcccaacaacacagatggaggaaccatactgcgtaaagatctatgaacaaatttttggacagagggcaattttatagcaagtgctgatttacagcgcactcattgcattaaaggaatgactaataattccaccacagctgttattcctgagaatacaggcatagcatgagccagtgctatgagtagcacctttatggggcgtgccagctatgacatttacaccatctgctctcaagactgagaattatggaatcctgcttgcacaaaagcagtgac

SEQ ID NO: 96908 - DNA, 512 bp, Glycine max
  Clone ID: PAT_MRT3847_5851C.1
actgtccaaggtcctgtcactcctcttaatatcatcgtcgtgaccggtgttggtggtaattctgtttgtattatctgttctaatcaattattcttctacaacttcttctactgccattcggtctgtatcaactgtcgtcaagttccctctcctcctcctcctcctcctactcgtcgtaactcttgtgctactggtggtcaagttctaaaattggttgtgttccaaaaataataaaagttaaactgtaaatttgtcaaaggaagtcaaaatgtaaatgttcaggttctcgtcaaagtctgtcaggtcttcctcagttcaggattcccaattcaccagtccagtcgcggcgatggtatgactggctcgccaaggtcaacaattgatcaacaggctgatctccgctccagcagagggtccccagggacccgggcccggcatcactctcatagggtcagccatctcaagcgattcgaccacggcagcactctcggcgggccacacaagaataagaa

SEQ ID NO: 96909 - DNA, 150 bp, Glycine max
  Clone ID: PAT_MRT3847_58520C.1
ccccgacggctatgctctgcctaaaacgacgggcgactaccttccccaatcctactctgacgacttgcctttcacttctgtttccaaaaccaccgtcgacacgtgcactcatccatattctggtacttcgaatgtcctgaccactactgc

SEQ ID NO: 96910 - DNA, 256 bp, Glycine max
  unsure (1)..(256): unsure at all n locations
  Clone ID: PAT_MRT3847_58521C.1
tcttactatcattttattcgagcgactataaacacaacttgatttgggggttaaaaacccaaacgagtggtgtttttacgcaaccagcacagctaccgttcctttntcctgacacaaacgagcccttaaaattttcgaactgattgataaaccatacttaccgggcttacgcctttttaacagaagcatcggatccaccgccttcccgagggtgagagaacagggaacttgggttaccacgaaaaacagggaccgt

SEQ ID NO: 96911 - DNA, 323 bp, Glycine max
  Clone ID: PAT_MRT3847_58522C.1
cttatatttttatattataataagatgaaaacatgaatgactccttttgaaaagacaggggtatacatacattaattggaatattacatggacaccataaacaactaaaccaaacaaaaactattgggaaggagcacaggtatcaacgctttgctacggataaaattcaaggaatctaattgtagaaaaatatataactattttgataatcagaagaagaaaccttttgccaatataagctgcagtagatacagacattacacacaactcaaacaccaagtcgtttgatccatcagtcctacttttgccttcgaagcaataag

SEQ ID NO: 96912 - DNA, 936 bp, Glycine max
  Clone ID: PAT_MRT3847_58523C.1
tgcttccgtttcggagattctatggccggtccggctgcccgggtcgacccacgcgtccggctcagagttcgctgatcaaaaaggcggtggagttggacggcgccagatcgaaaacggagcggaaatcaacggaagcgtgcaagagtcacagggaagctgagaggagacgcaggcagagaatcaactctcacctctccaccttacgtaccctccttcctaacgccgccaagtcggacaaggcgtcgttgctgggggaagtggtggagcacgtgaagcggctgaggaagcaagccgatgacgtgacgtgcggggactcgtactcctcgcgcagcggcgaaccgggttcggtccggtcggaggcatggccgtttccgggggagtgcgacgaggtgacggtgagttactgcgacggcgaggacggggaaccgaagcgggtgaaggcgacggtgtgctgcggggaccggaccggtctgaaccgggacgtgtcccaagcgatccggtcggttcgggccaaagcggttcgcgcggagatgatgacggttgggggaaggacgaagagtgttgtggtggtggagtgggaaaaggaagaagaggaggttggggcgctggaacgggctttgaaggctgtggtggagaatcgggctttggtgggctttggaatgggcccagtcattctgggccagaaacggggtagggattgctgtgcttcgcctagtagtgaggttgactctgacttcttgctgaggaatgggagcttttgctaattcgtaattagtttctttttttggtaaaagaaataattagatgcttagttagctttcgggttggtaatcttggagatgccttttttttatttatataggcatgatgctttagtttataccatagtctaaaatctataatttatagtaatatataattgtggtaattttattt

SEQ ID NO: 96913 - DNA, 506 bp, Glycine max
  Clone ID: PAT_MRT3847_58524C.1
ctaactaggctgcggccgccctttgctttcttttgatttggttttacagtttatacttgataatcccaaaagcctgcagctgagggaccttaattgctaaagaagatggcaggtgccatatactaacgtttaatgtattattaatagcctgcccgcgttcccagatgctgtgacttaattcatggtttgaacacgaggagaccaattcacgtttggtcctgaccgaatatgatatgttcaacagagaccccactggatgcacactaagtcactaccttcatgtaggccacgctgatgacacatttttggtgcccattccttattatccaggttcagacctgcatatgagtggaaccaagaattaaacttgcgccagtggtgggcgataactcaaacaacatccaggtgacatatcatgcttagggagaagcctatgacaaggccctggaggactatttgaaaatacacggcttgctgatgaccaattcattaaacccattatgcac

SEQ ID NO: 96914 - DNA, 2153 bp, Glycine max
  Clone ID: PAT_MRT3847_58525C.1
cagagtggtctgattctgaaagtagtgatggtcaagattatgatgatggcaatgattcgtcatgcattgacagtgatagagatgatcatagtaatgctggtaaagatgaaggcaattgtgattcaagaaatggtgctcgacaggtagatgtagatctagagggcatagaagatactagtggagagaatgttaccaatggaaagactcaagtgaacgtgactgagcaaggggggcaattatcaaaatcagaagacgagaaaggagtttttgattcctgtcggttgtttgtccgtaatctgccatatacgaccactgaggaggaactggaagaacatttcagtcgctttggaagtgtctcacaggttcatctagttgttaataaagatacaaagcgatccaaaggaatagcatacattctttatacagccccaaatattgcagccagggctcaagaagagttagacaattcaatctttcaaggaagattattgcatgtaatgccagccttacaaagacattctgataatcaagagaacaatgttttgaaggaccaaagctcgaaaaccctcaaacaacagagacaggaaaaaaggcaagcagatgaagctagcggagatactagagcatggaatagtctgttcatgcgctctgatactgttgtggaaaacattgcccggaaatttggtgttagtaaaagtgatttacttgaccgagaagctgatgatcttgctgtacgtattgctttgggagagactcaagtgatttcagagacaaaaaaggcatttaaaaatgctggagtgaatgtggaggctttggaggaacttgctaataataaaacagatgaattaaaaagaagcaatcatgtgcttttagtgaagaacttgccatatggttctacagaaaatgaacttgcaaagatgtttgggaaatttggtagtttggataaaataattctccctccaacaaagacattggcgctggttgttttcctcgaaccagtggaagctcgagcagcttttagaggtttagcttacaagcgtttcaaagatgctccattatacttggagtgggctccttccaatattcttagccaaagttcaacatctaaaaataatgaaataaatggtgcaattggtgaaaatgaagccaagaggcagatattggagcaacaagtggaaagaataacagatgtggatattgattcagacagagtacaggcccggtccctgtttgtcaagaacctaaatttcaagactatagatgaaagtctgaggaaacatttaactgaacacatgaaagagggaagcattttgagtgtcaaggtgaagaagcatttgaaaaatgggaaaaatgtttctatggggtttggatttgttgagtttgactcccctgaaactgctacaaatgtttgcaaagatttacaggggacagttttggacagccatgctcttattttacaaccttgtaatgtcaagaatgatgggcaaaaacaaaagacacttgagaaggataggagttcaacaaaattgctcataaaaaatgttgcttttgaggcaacagagaaggacctgagacgattgtttagcccattcggccagattaagagcttaaggttgccaatgaagtttggaaaccatagaggctttgcttttgtagagtatgttactcagcaggaggcacaaaatgccctcaaagcactttcaagcacccatctctatgggaggcatctggtgatagagagagcgaaagaagctgagagcttggaagaactgcgggctcgaacagctgcccaatttagtgatgaacagaatggatttcaaagtgctatgaaattttccaagaaaaggaagcaggttgacttcttggatgaagggaagatgaagtttggaagaatggctgactagtacagctccaaagatttaaacagtattttgcgtatgtcctggaaattctgggatcacaattttgtcataggtttccaagtttatataaacatgccatgttgcttcttatcatcaagtgttaaaataacttctctaagtttaggtttctattcttcatccataattctatctcccgtaaaattgtgttcacctatttacactaaacttttatattcccatcattgtaattccattttatcatttttttta

SEQ ID NO: 96915 - DNA, 128 bp, Glycine max
  Clone ID: PAT_MRT3847_58526C.1
cccacgcgtccgttcgcgcgtccggctttcctttacaagatatattcaccacatggacaacgagtcacttacaggattacattactataactcaaaggcatacaacgattacatttcattctaactag

SEQ ID NO: 96916 - DNA, 106 bp, Glycine max
  Clone ID: PAT_MRT3847_58527C.1
ggagaaagtgagaacggagatggcggagcagtgagtgaggcacacgagaatgtggataacggcgattcaagaagccgcgtcgaacaaactgacggagaaagacgaa

SEQ ID NO: 96917 - DNA, 329 bp, Glycine max
  Clone ID: PAT_MRT3847_58528C.1
gacacacaagatgtgaaacccatgtcatggtgtctctgctaagatttcaaatttttctacatctatggttggtcatactgcttcgtgctcttggacttattctctgagtaatgtttccttaaatgctatattgtctgcttatcattgcttgtttttgtccacagaccacaatgtatgagttgggcttaatcccgtaacaagcagagataataactttcttcagaaccatcacatgggtagtgccgctaactgtcgctgaattcaacctcaaaatatctagacatactataattagaatttagaagactatgtgctgaaaatgtataggg

SEQ ID NO: 96918 - DNA, 363 bp, Glycine max
  Clone ID: PAT_MRT3847_58529C.1
cgtttatgtgtatgtctcacatcagatcctagctcgacacctcatgttgttatccaggccgattccagctaaacagttcatcaagagggggacgaagtggattatgtcccttgtgacattgactatggaggggttgggtatggctcgtaccttcggggggggactgttgcaattcaaaatcaggtgttggatggaaaggttatagacccatatacgggataatcacagacaaattccttatgtggtatagagagtcgcttgtacacattagaacgccttcctggcattaaagctgaataaggttcaccgacttgtgacctttaatgatccagagaagaaaacggaaattgtcaatctaaacac

SEQ ID NO: 96919 - DNA, 402 bp, Glycine max
  Clone ID: PAT_MRT3847_5852C.1
caactataaacccttcaccatctccattcttattttcagtaactcctaatttctctggctcaacgaggaggagaaacaggcagaagatcacagggggagtcacagaattgtacaaccaacagtccatttgtgcttcaattcgttgaatagagttaggaaataaataaccgatattgtctctccatctgagtgtttgtctagccaaagctctggacaatggacatcatattgttaatagtctataacttcattgcctagaattttggtcattcacatcattttgttttttgccaatataataagtgcattcgggatttgcttattctctgctatagtaggttttgttctgatacttggaaattttgttttatcaataaaaagctgattggcaactttttaatc

SEQ ID NO: 96920 - DNA, 277 bp, Glycine max
  Clone ID: PAT_MRT3847_58530C.1
tcggctcgagcagttaccaaactttatcttgtctactcaaaaacaaaatgggggggggtgttcataagaacacccacggaatgcccatgagtcacaaaggcagccagactggaacaccattggaccggacctgcggagtgagagaaccccaggcccactctgtaagggcaactgcaaccatgtgatggaagccacatgggtaccattgatcaatttgggaaaaccaaagtccacttgcacggaggtcagctactagaagatcctaaaggacctgaag

SEQ ID NO: 96921 - DNA, 2347 bp, Glycine max
  Clone ID: PAT_MRT3847_58531C.1
acccgcacacgcattgcactcactcttcatttcatttcagtttcggtttctcaatctcaaaagaacccccaccaataccctatcatctacaccatcagtggcttcttttgacatgcgcgactataacccaaactgctatgtaacgttgcatcgactatcagataatatcgagggcaagatcaactgtggttgagaaaactgggaagagtgaagacaaagtgaagaagatcatcactattatcatttcaatggctacccaaacccaaacacagtcacatccaaacaccaccactatcgacccaaacagcggcttctgttctcattccagaaccttccattccctccgtccaaacgttcctctccctccgccctcccaccccctctccctcaccgactacgtcttctccctcctaccctccgccgccaccgccaccgcctcctcatccatcacctccgccatcatcgacgccgccaccgaccgccacctgtcctactccctcctcctccgccaagtcaaatcccttacctcctcccttcaatccctcacacctctctccaaaggccacgtggcactcatcctcaccccttcctcccttcacgtccccgtactctatttttccctcctctccctcggcgtcaccatcgcccccgcgaatccactcagttcccaatccgagttgactcacctggtcaaactcgcgaaacctgtcatcgcgttttccacctcgaacgccgcgaaaaacattccctcctccctcaaattcggcacaatcctcctcgattcccctctcttccttcccatgctcaacaacaacgaatacgtcaacgccgattcacgaactcgccgagtcgaagtgagtcagtctgactcggcggcgattctgttctgctcgggaaccacggggcgcgtgaagggcgtgctccttacgcaccgcaacttcatcgcgctgattggagggttctatcaccttagaatggtggtggatgatgatccgcacccggtgtcgttgttcacgctcccgctgttccacgtgttcgggttctttatgctggttagggccatcgccgtcggagagacgcttgtgttcatgcataggtttgatttcgaagggatgctgaaagctgtggagaggtatagaatcacctacatgccggtgtcgccgccgctcgtggtggcgctggcgaagtcggaactcgtgaagaaggatgggatgagttcgctacggtatttgggcagcggcggcgcgccgctcaggaaggaggtcgccgaggactttagagcccaattccccaacgtggaaattgggcagggctatggtttgactgaaagtggaggaggggcagctagagtgttggggcctgatgagtctaagcgccatggttctgtgggtcgactatcagaaaatatggaggccaagatagtggaccctgttactggagaagcattatctcctggccaaaaaggggagctctggttgcgaggtccaacaatcatgaaaggttatgtaggagatgagaaggccacagctgaaacattggattcagaaggatggctgaagactggtgatctttgttattttgactctgatggtttcctctacattgtagatagactgaaggaattgatcaaatacaaagcttatcaggttccccctgctgaattggaacatatacttcacaccaatcctgaaattgctgatgctgcagtagttccgtatcctgatgaagaggcaggacagattccaattgcctttgtagtaagaaagtctggaagcaacatcactgcagatcaggtcatggagtttgtggcaaagcaggtttcaccatacaagaagatacggcgagtttctttcatcaaatctatcccaaaatctccggctggcaaaattttgagaagagaattagttgattatgctctatcctgtggttcatccaaattgtgatcaagaaaagagcatggagaaaatgtacttggcctcgaaactattgtgacctgttcagatgcaacaaatgcacgatatcgtgtgaagcatctggcctaccatgtggttcatcgccctagtccaccactaagaatgttggtggtttctacccaaaaatcagcaatcattttattcacgcacacctttcagaaatttaatcattttaatcaactacctcggtttccctcattttatttaccaaaataaattatgcacctttaggtttgttcacaaaataatgtgtgcaagaaacattttcattcgttgtaaactatttgttcattttgtatagttgcatttatatattttctttactcttcaaaaaaaaaaaaaaaactcgaaactagttctctctctctctctcc

SEQ ID NO: 96922 - DNA, 368 bp, Glycine max
  Clone ID: PAT_MRT3847_58532C.1
acaattttcgttttttatctgaacaccatctttagagcctgcctcaaaacgtcccttaaagatcgaacttggccggggaaaacacggcggcttgtgaaagtgcctccatcaacaggagcagctgaacattctcccatccgccgtttctttatcctaatgatccttgtttattcctatacgctcgacggtatggtcctttactccgttatagacccatgacgagaaacgcatgccattgtgggagggcggctctctgttacttcttacctgcgttctgactgtaccccgcatgaccaaccgagcactgggcgctaactttaatcggccgccataaccagcgctgaatctctgcgagccattgtcagcaa

SEQ ID NO: 96923 - DNA, 438 bp, Glycine max
  Clone ID: PAT_MRT3847_58533C.1
aaaacacagtagatttagaacaatcacaaagttagtcaaccaacccagacaacttaatacagggagccttgaaaaaccaaacacaatacaagcgccgattgatctacttaacctgatatcaactccagaacctatcataaaaaatccgtcaagccttgctcactctatcttagccatgacctattataacactacacaagaaataccaatcacgacaatcacgatacacacatcttattgaattgagccacatacacagatacatactcaatacccttggaacagattatgcactagagtacccttatgaaacacactgatcttataaaatcctcaattctatcctataatcaatttcaactttttctatatacttaatatttcatcactatatcatacaattcattttttactgacatattcttatacttataacaa

SEQ ID NO: 96924 - DNA, 430 bp, Glycine max
  Clone ID: PAT_MRT3847_58534C.1
cccccccggctcgagctagtatcgaagcttttataataaacacgcagaagagaagttggggcgaattcgtgatcacgtaatttttcatcatatagtggcataggtgagctaaccatcgaggaagaagcacgatggaaggtcggatgggtaatgacgacgatctgatttgtgagtgcgggggcagcaggataccatttgtttctatatatggcagataatgggatgcaacagcctgtgtcacttatgcgtgtcaaggatcccttgttcaaaaggaggggagcattcagataggttagttcagcggctgatgatgaacgatggaagaaatatagcgagatgggcggggtttaggaactcttacatgtgttaaggactgctaaagatgaccgtacacggaaagaagcattgtacgcctcttgatgcatcgtca

SEQ ID NO: 96925 - DNA, 342 bp, Glycine max
  Clone ID: PAT_MRT3847_58535C.1
ggaaaccaaaaagaaaacaacattccccaaagcggccaaaaccccgccccaatatgtaaaacaggaataactgacccgggataagctccgggcatctgaacccccggcaaggcgaccccccctcaaaataccccctccgggggggccaaatgggaccccccaaacccggcgcgaacaaaggcacaatggctgcacaaaagccccaaggttaaaaacccctagcctaacaaaactatgccttgaacccggatcaaggggtgccccaatcgggcgcaaggccacacaacactcccaaatggcaagacccgacaagggcccaaataaagatttccccccgacata

SEQ ID NO: 96926 - DNA, 249 bp, Glycine max
  Clone ID: PAT_MRT3847_58536C.1
caatgtcagatgacatgctcattcatttctcaatcaactcttccaaccaattatatcagtcattgcctacaaagattgctaagttggaagcttgattggttggtaagggttcctccaccgctgctcagcaattatgtttgtcctttgctttttgttctattgctgggaaatttggcggagctgctgaatatacgtcatgatccttccatttccatttattctgatgatgattatggtgggaaattctta

SEQ ID NO: 96927 - DNA, 516 bp, Glycine max
  Clone ID: PAT_MRT3847_58537C.1
ggggcgaggtagccagagagtgatacaatacagagtgcgttgttgctccttcgccacaactccctgccaacatgggtatctccagagattctatgcacaagaggcgtgccactggtggcaagaagaaggcatggaggaagaagtggaagtgaagctgtaactcgcaagactcgtatactagatgtggtttacaatgcctcaaacaacgagcttgtgcgtactcagactcttgtaaaaagtgctattgttcaggttgatgctgctccattcaaacagtggtaccttcagcactatggtgttgagattggtaggaagaagaagacagctgccaagaaggaaactgcagaggaagcgtgctgctgctgtagctgtggaagaagccaaaagagtaatcatctgcagagaaaattggagaagcgaccacaagatcgtaagcttgatgctcacattgaggagcagtttggtggtgggcagctcgtaggttgcatatcctctcggcctggtcaatgtggcaga

SEQ ID NO: 96928 - DNA, 1342 bp, Glycine max
  unsure (1)..(1342): unsure at all n locations
  Clone ID: PAT_MRT3847_58538C.1
ccttggtcgatccttcttttccgcactgtttgataagacgacagaagggggcgaggaagccacatagagacacaatacagagtgagttgttgctccttcgccacaactctctgccaacatgggtatctccagagattctatgcacaagaggcgtgccactggtggcaagaagaaggcctggaggaaaaagagaaagtatgagcttggtcgccagcctgctaacactaagctgtcaagcaacaagacagtcaggaggatccgtgttagaggtggaaatgtgaaatggagggcattgagattggatactggaaattactcctggggaagtgaagctgtaactcgcaagactcgtgtactagatgtggtttacaatgcctcaaacaatgagcttgtgcgtactcagactcttgtcaaaagtgctatcgttcaggttgatgctgctccattcaaacagtggtatcttcagcactatggtgttgagattggtaggaaaaagaagacagctgccaagaaggaaactgcagaggagggtggtgatgctgctgcagctgcagaagaagccaaaaagagtaaccatgtgcagagaaaattggagaagcgccagaaagatcgaaagcttgatgctcacattgaggagcagtttggtggtgggcgtttgcttgcttgcatttcctctagacctggtcaatgtggcagagctgatgggtaatttatttgagttgtgattatttttaatatgtttataacgaaccctttcgtatttgttaattgtgtttttttcttcttgaatttatgcagctacattctggaaggtaaggagttggagttttacatgaaaaaactccagaagaagaagggaaagggtgctgcttgattttagtgttttccaaatttttatatggctttagttgcttttatgtgttgctggtaccatttaaggtgatgttttgagccacaggacatcgattagtgcaaattatcttgttagtccttcgcaaattggcatcgtaattttgttttgaactgtttttgctactgatgagttataatttttattaaaaaaaaaaaaaaaaaaaaaaaaaaaaaaaaaaaaaaaaaaaaaaaaaaaagcggacagatctaaaagaaacaaacttaaaatacacccccctgcaaaaaaataaaatattatataanntcccccccctttaaaagacccaaatttttctccccggggggggaaagtgtaattttttttttttggcccccttaatttattttccggggccccgtttttaaacggggggggggggaaaaaccgggggggccccaattttatttccttggaaaaaaaccccttttt

SEQ ID NO: 96929 - DNA, 1223 bp, Glycine max
  Clone ID: PAT_MRT3847_58539C.1
tgcctgcgtatgtcggctcgagctcgagccgtgcaatcaaatgtgaagttttttattttttagttttctcctttatttcttttttttttctcaatgaaagggaacatatgataataaatgccaatggtggatggggttggaattagtaggaaaaataagaatatatttatcttgaaactttgcaaggaggaaaaaaggtgggaattgagtgcttgatggaagctgaaaaagttgttataaaaactattgaaggggcgaggtagccagagagtgatacaatacagagtgcgttgttgctccttcgccacaactccctgccaacatgggtatctccagagattctatgcacaagaggcgtgccactggtggcaagaagaaggcatggaggaagaagagaaagtatgagcttggtcgccagcctgctaacactaagctgtcaagcaacaagacagtcaggaggatccgggttagaggtggaaatgtgaagtggagggcactgagattggatactggaaattactcctggggaagtgaagctgtaactcgcaagactcgtatactagatgtggtttacaatgcctcaaacaacgagcttgtgcgtactcagactcttgtaaaaagtgctattgttcaggttgatgctgctccattcaaacagtggtaccttcagcactatggtgttgagattggtaggaagaagaagacagctgccaagaaggaaactgcagaggagggtgctgctgctgttgctgtggaagaagccaaaaagagtaatcatctgcagagaaaattggagaagcgccagaaagatcgtaagcttgatgctcacattgaggagcagtttggtggtggggcgtttgcttgcttgcatttcctctcggcctggtcaatgtggcagagctgacggctacattttggaaggtaaggagttggagttttacatgaaaaaactccagaaaaagaagggaaagggtgctgcttgattttagtgtttcccagatttttatatggctttagttgcttttatatgttgttggtacaatttaaggtgatgttttgtgccacatgacatcttttagtgcaaactatcttgttagtcctttgcaaattgacatcttaattttgttttgaactgtttttttgccaccgacgagttacaatttttattaattgaatgtcttgcaaaaaaaaaaaaaaaaaaaaaaaaaaaaaaaaaaaaaaaa

SEQ ID NO: 96930 - DNA, 473 bp, Glycine max
  Clone ID: PAT_MRT3847_5853C.1
ccaacactttcatttgaatcgatcaatccttctgttggtccaccaatcatggcggcctctatttctcaaacttcaatccttttgctcctacttttttatgcatctcacattccaaaaagcgatgtctaataatcttagggaggctcgttgcaatgagaaggatcgacagacattgctaatcttcaaacacggcattgatcgggagccatataacatgctcgagacgtggccaagtgaaaaagactgtcgtgcatggaagggtgttcagtgtgacaacaccacacgcggagatgctgaacttgatctatctacacactctctggaaggtgaaatgaacttagctttgctggaacacgaatttataaatcacttggatttgagtatgaacaactttaatgctattagcattccatctatgcccaatgatgtgatatacgactgtaacctgcagcacctggacttatctttgagtg

SEQ ID NO: 96931 - DNA, 763 bp, Glycine max
  unsure (1)..(763): unsure at all n locations
  Clone ID: PAT_MRT3847_58540C.1
catatttgatcggttatgtattaacataatcttactggaagtgactttcctttcactctatatcatacatgcagtgtgatctttgcaagtttttagaaagcaaaaattttgaattaaggatagaatatctaataaagaatggataatatataaaagttctacttggtctaacatgtgcagtgtgaagattgataattttgaagcaggttggattttgaattggtttacattgaaattttatctgtgtacaagttcaacccttttccatagtatcagcttaatttagtctttttttctgctttataccataaacatttggtatgtcaagaacctgaactctgtctcctggttttttccttcacaatcttttgttttgtagccttctaaagatctctataaccaattggttgaattttcatccctagagattgtctctgctcaaattaaaccttataaactgcctagactcatcctgttcaactgaagagattgtactacaaactgaatttgacatgttttaatggggaactttatttgacaaattaacattatggattatgcagttnttcatacacttattccccagacatttgtttntgtttcttacctttgtatcttttccttgagaaaaaaaaagaagaagactaactgtttctgcctttctccatctatcatctatgtcatccctaagctttttttcatggtcttatgaatagggtccttaaaatggccaaagcactcaatagatttggcatgaaacgag

SEQ ID NO: 96932 - DNA, 336 bp, Glycine max
  Clone ID: PAT_MRT3847_58541C.1
gaatataatttaatttaattttaaatacaatgatatataatattagatattatatgatgatacaatataaatacgtgcggagctcttgaccacggaggacattacggctggctgagcctgactacgcgtgctctgcgtatgcagacagaagcgattactgttcacgagaggccacggcgactgcatatgaactgctaactgaaccgaaagtcgcatacacattggtcgtgaagtggagcccagaggacattgcggtgtacacacgcatggcgcttgcagacgggacacctcacttcctctagaccgactaacccaagtgcaagtgccagctacatg

SEQ ID NO: 96933 - DNA, 134 bp, Glycine max
  Clone ID: PAT_MRT3847_58542C.1
agaccagtgcgagtgcgcctaaagtcggaccgtatgcccattgtggcaagatctggaccttgactataaatctctccgaccataaaagttgatggaacgactgacaagcccataacaaccggcaagaagattgt

SEQ ID NO: 96934 - DNA, 242 bp, Glycine max
  unsure (1)..(242): unsure at all n locations
  Clone ID: PAT_MRT3847_58543C.1
gtcgtgctcgttgggcaagttgttcatgtgatagagancaanagttnncgngcatgtaggggaacangaaacgnganatgtancngatgtctgcggtgtgagtatannacgtgagnnttgtgcatgttanagatatgatnncatcattgngattgggtntcactaattgagntgnattgttttaggcaagtnnnatatttgcctaatcancatgtaaganactgcaanttttgataatnnag

SEQ ID NO: 96935 - DNA, 752 bp, Glycine max
  Clone ID: PAT_MRT3847_58544C.1
gaggaaaactccaccctttgtatgatccttgttattccagaattacaaagctcgctgataataaaaacatcccaatgatatctgtccacacattcttatccaagttaattcccaaaattcacagcaaattgattctgccatgactaaaccctagtgaaataaggatcctgctagttagagatagtgaaagaaaacctatatatgtcctcatcttcaaaagtgcacacactatcaaattagcaacttcattcataaagaggaagaaccaagtcatcaatatatgcatcattttaatctccttggtgactcttccttttccctagtttttccacctattcatgcaataaagagaagggcgtagcaccatggcagagagccatactagtactagaccttggtgcatgagttggaatagcagttggaacccaagtattgcatgcagatccttgatcatatgcactagccttcactgcatcaacagaagatggttgctgttgagtaagataatacaagttccttgcatgtgcatgataaggatcagttgtagaaccatacacactttcataaccaagtgcctttatctcattatcaccaaaaccatgattgcttcttggattttgatcaccatcatttgcaacaacagtagtagtagtgcccataggaatcacattatagcccccaccacctgcataaccatcatatacaacagaggtagatgaagaggctttgagaatggaagcagaatccatgct

SEQ ID NO: 96936 - DNA, 469 bp, Glycine max
  unsure (1)..(469): unsure at all n locations
  Clone ID: PAT_MRT3847_58545C.1
ctatccatttgttagaatatgtgccaaccgaattaaaagaggagcgatgtgtatagcgcttcgcgatggcacgatatagagaaagaatatgggaaggcaataggtttcccgcagttttaggtcttttcatataaaaaaaaatgtttaaaatttatttaatttnnttctatagaataaggatttgggttttctttagtccttttttttctccttgttttataagaaattttcgagtggtatttttaaaacaagtttggtaaaagcaacttcttgcggcttcttcttctgtcattggatccattgttacaatcttaccaaggcattgcctcctcttggtagttttttccaaaccctgccttggcgctttgcaagggggtttggttaaaacctaaatcaaataattatttaaaattaaatttaccattcttggcttttcttcatattatttcattattttcgtttttttggt

SEQ ID NO: 96937 - DNA, 247 bp, Glycine max
  Clone ID: PAT_MRT3847_58546C.1
aacgcttgactttatcgcagggatcatgcgagcataaagtccaccaagtgtacattatcaggactaactattaccatacacgataccaaacaatcacaacttcatttcccaccatcgacgatttacacataagatctcagcctaaaagatcttagtctatcaccacattcaacatgaaccacctattgacactctacatctgattgcacctcaactgctatcaactaaaaattatactccttgcaat

SEQ ID NO: 96938 - DNA, 1950 bp, Glycine max
  Clone ID: PAT_MRT3847_58547C.1
acggctgcgagaagacgacagaaggggatgttaattattagttagttaacattaatctttcaaaaggagccactcgtgtctatatgagccgccttgatcctgtatataacgttgggagagaaatcaagatctgagaagtttcacctttcttcaacccctcttgctctattataatttaatatcttctagagattcttctcgtgccaacccatttatttttctcgcaggtttcatgtcaattctgtttgtgtccgaggtttgccaagttttgttttttattttctgaaatctcattaatatattgttcagacattcccattttgagattttatctgttaggaagaggtccttttgcttctgaatgagagtgtccaatgaaagtttggtccttgatgcataattaaattgttctattgagtggtggcaagtcaaaaaggtctcggctttttcgtaagagaatattgtttttttttagtaagattatatatggtgttgttgctatatttaaattaaagaacctgcaaggccctgtgtgcttcttgtttcagcattgccattatcttcttcttcttcttcttgttcttcttctcatggctcttatgttaggctatgatccttgttcccatttaagtagggccttttcccattttccttctgtttcttcctctgaggctaacagaaacgttggattcactcttaaagcctgttttgatgccaatagcggtgataatgccaatagggtctttgtgaaggaaaagaaaaaacccaatggttttgcatgtgttcctcaccctcccttgttaggtggtttagagaagggtattgatgttgaagatagatctttgggtggaagtcccaccaaacccttttgtttctctgatcaacaattgccccagaaacttgttgttgctgttgatgttgatgaagtattaggaaactttgtgtcagctctgaacaagttcatagcagatcgatactcatcaaattgttcagtttctgagtatcacgtgtatgagttcttcaagatatggaactgctcacgtgatgaagcaaatacccgtgttcatgagttttttgagacaccatacttcaagtcagggatccaacctatcccaggtgctcagacatccctgcagaagttatcaacattttgtagcctatcagttgtaacatctcggcaaaatgtaatcaaggatcatacacttgagtggatagagaagcatttttcaggattgtttcaggagattcactttggaaaccactttgcccttgatgggatgtttagaccaaagtcggagatttgtaggtctataaatgctacggtcctcattgatgataacccaagatacgccatagagtgcgctgaagccggaattagagtcctactttttgattatgaaaactcgtacccttggtccaagaccaattcagctgatgagcatcccctggtgatcaaagttaagaactgggaagaagttgaacaacaattgatgtcattggtagctttgtagttactaaaatcctgcagcaaggatttgttaaaagcactcttattagattaagtagtggatagtttcttatgcctgaaatatctaattaagacaccataaaggtgaaattaggggaagtaactgcaagaagttatagtcctgtttggaaaaatataaaattacctgattatatttttttttcccaatatgagaagtaacaaacagaagtttttcactgtgagggaaattatcacgtattcctatatggatcattaggaaagatttgtttacatactcgatgaatatttaagtgaaatgcatgtcatagggttctatcatcatctaacaaagcattctggaccatcaagttctttaatgttggatgtatcttggtgaatactacagaggtcttgtcccattagctgttggttatatgaatcaaatgaaattatgttgtccc

SEQ ID NO: 96939 - DNA, 1210 bp, Glycine max
  unsure (1)..(1210): unsure at all n locations
  Clone ID: PAT_MRT3847_58548C.1
ccctcgcgtccgtgttgagggagttcatatcaccaagttatttattctggtccctcctttgctcctcgctcatcctcatagctatcatggaagcctctaactcacattcgtttcgctctcgtgtgcacctttttgtgcttttcttgttatgttttgtggtcacaattgaagctaatttaaagaagaaggtctcagccttttatgtgtttggggactccacagtagacccaggaaacaacaacttcatagacacggctttcaggagcgattttcctccctatggtagagattttgttaaccaggctcccactggaaggttcacaaatgggaagcttggcactgattttctagcttcatatttaggcctaaaagagttggtgccaccatatttggatccaaatctcagcgacaaagaacttgtaactggagtcagttttgcctctgctggctctgggtttgaccctctcactccaatgctggggaatgtaattccagtagcaaagcagttggaatatttcaaagaatacaaaaagaggttagagggtacgcttggtaagaaaagaaccgaatatcatataagcaatgctttatttttcatcagcgcaggcacaaatgactacgtcattaactatttttcgttgccaatacgaagaaagacctacaccacccccttaacctacggacacttcttgcttcaacacgtaaaagaattcatacagaatttatggaaagaaggtgcacggaaaatagctttggttggagtacctccaatgggatgcttgccgatcatgatcaccttgaattcccataatgtctttctcgaacgtggttgtgtggacaagtattctgctgttgcaagagatcacaatatgatgcttcaacatgaattgttcttaatgcaactaaatttctccaatactaaccctgccggtgctaaaatatcttacctcgacatatatggatcccttggatgacatgattcaagcgcatcaaaacctaggttttgatgaggttgatcgtggttgttgtggaagtggttacatnnaaacnncttttatgtgtaatggggttgcatatgtgtgctctgatccatctaattttgtcttctgggattcaatacaccctactgagaacgcatactatgacctatttatggccgcccgtcccacaattgatgcccttatcaatggctaggaatacatatattctt

SEQ ID NO: 96940 - DNA, 255 bp, Glycine max
  Clone ID: PAT_MRT3847_58549C.1
gaaccaaaaaagggtccaacaaaacccaatccaatttcggcccgtcccgggaaaaggaaacctcaacggaacggtccgatccatttccgaatggggcaaccgctgaacttcccggccggaggaattcggctaagtttcccttcgtcggtcaacggctcggcaagctttcaacggcggtcttcggtcggcgccttcgcggctaaggcggtggatacgcagcggccggcggcaagcctttacaaggtgctgcaattc

SEQ ID NO: 96941 - DNA, 187 bp, Glycine max
  Clone ID: PAT_MRT3847_5854C.1
cagcgtcacacccgcacgtagagctgacgttaaaccagagctcacacctgatggcccaatgagaggtgctaacgtgaagattcttacgaaggaatcttactggcacacagtgcaccggtcgatggctgctgttgatcaggaccccgacactcggtaccgtgttgtgagtagattcaattacgcagat

SEQ ID NO: 96942 - DNA, 259 bp, Glycine max
  Clone ID: PAT_MRT3847_58550C.1
tgtcgagccgattcggctcgagaaacaccaattaaggagaaaaaaagacgtattttaacacaaaacgctcaatggtttggacggacatttgttgttaatttaagcttttatgcttttcaaacctttatttgctatttttcacaacttgtttacattgacaaaaaaaggttaaacatgcataatccaattaagaattaagaaaatcgtatctaagtgcagcaataattcgtttactttttgttttttctttgcccttttt

SEQ ID NO: 96943 - DNA, 801 bp, Glycine max
  Clone ID: PAT_MRT3847_58551C.1
gtcaaaggaatgacaaaaagtacccctgtaaatgaggaaattccacctttgcttgaaggaggtggaaagatagaggtatggcgaatcaatggaaatgccaagaatgcattgccaaaggaggagatcggtaaattttatagtggagattgttacattgtactgtacaacctaccactctggtgagcggaaagaagactacttcttgtgctgttggtttggcaaagacagtgttgaggaggaccaaacaacggctactaggttggccaatacaatgtctacctcattaaagggtagacctgtacagggtcgcatatttgaaggcaaagagccgccacagtttgttgctattttccaaccaatggtggttctcaagggagggttcagctctggatacaagaaactaatagcagacaaaggagtatcagatgagacatacacagcagagagtattgcacttattcgaatttctggaacttctatttacaacaataaatcagtacaagttgatgcagtgccatcatcattgaattccactgagtgttttgtcctgcaatctggctctacaattttcacttggcatggaaatcagtgttcctttgagcagcaacagctagcagcaaaggttgctgatttacagctactttaaagcatgctaaagacagaaagctcagcttgtctgcactagaaaacaaacagcagatgaatttgttcttttaacaaaagggtgcatcagatgagacatacacagcaaaagagtttgcacttattcgaatttctggaacttctattcataacaataaa

SEQ ID NO: 96944 - DNA, 422 bp, Glycine max
  Clone ID: PAT_MRT3847_58552C.1
tccaggccaacgacatctcaagcactgacattcccaaacactcctatcacaaaactctaaggctacatataggaatccttcacaactattactagataaaagactacacctcttacactccctagattcatgtacctaatcacacctacaactcatattttacccactcaaacccaacctaagctcactccaccttctacaacattaattcataaaacatatcatcaaacattatcgctgaaacagatcatcctacatcataccctcatgaactggctcgataaagtcccccatttataataactaattacgcaacacattaccctactcgtctccttttagaccgcaaagagattaaaacaccacaaacgcataacgcacatcttctaaaacacactcctactgtaaaacactattcacat

SEQ ID NO: 96945 - DNA, 244 bp, Glycine max
  Clone ID: PAT_MRT3847_58553C.1
tacatataactgtcacttctcagtgccccctactgtctgcaacagagccgactatcactctcctctcgtgattgctcaatctgactgtcattcatcactagcaaacaatgagaacattggtacctacatatataacaaatgatctaaacttgcatgaataattcatatacatgaggtatcgctaggaattgggcctacatgtacagacttacgactcctcatgattcatggggggaaaaatgat

SEQ ID NO: 96946 - DNA, 1179 bp, Glycine max
  unsure (1)..(1179): unsure at all n locations
  Clone ID: PAT_MRT3847_58554C.1
ccacgcgtccgatcgaaatgcaccattatttaaatttctttctaagagaagttcgaaagtataataaataattttcagaaacaaattgagttcatataaatgaaccacacgcgatgtttaattttgatttaattgttatcgagttagcatcatcgttattattaatattttttggtacaacatcgttattgatgattgataacaatatgtaattaaaatagagtaggctttacttgaagaaaaagaaaagaaaagaaaaggcgaggaatctccgttcaaaattcgaatctacccaatacatttcgctctcgctccgaccttatccaaatagcttcaactggactccatcatcaccgttaatcataaaacaatcaacggccagaaatgaacttcacactacgttcccatacaccgttaattaaaactaataaatgacctgtcgtccggaaaaagagtctcaaatttctgttaattttagttttcgtttcgtatcacgcatttcatcttccttcttccctctccattttccctcactttctctccctccaaacagcgtgcaattcttcttctttctctgcgatacatggagatgtcgtcaatggaggattcgcgctcctacgagattctctccacggttctcgacgctttcctccgacgcggacgatctccacgattaccgaacagttctataccgattgccccacgaatatctccttttacgccctcgttttaaggtcctttcttcgctctccatatctattcgtttctttcgctgtttatgctcggaattccaacagtaggatatcgttgactcgtgatttccgtttcattcgtcaatcatgtgttgttagtgactttagattggttatttgtctctgtgcaaagtttggatataggagaatttttagcgcgagttagtctcggaaaattttctgttatgctatgttagggtttggaaccaagtctgcaatgtctctgaaaccttgatctggaatttaagggagattcctgttaggagtttcgtggttttggaatttaagagaggttcctgttgtgtttgtgtgttgattgattattgaatattgtctagtgttgaatttttccgttgactttttggttggggaaattttaatggctggaaagttggaattggngcctccgaagtctgatgtttccaat

SEQ ID NO: 96947 - DNA, 2437 bp, Glycine max
  Clone ID: PAT_MRT3847_58555C.1
cataactgtttttctttctttctttcgtccctctgctctatcaacgtctctctctcttttcgggctacattcctgggatctgctggctttgcttttcaagggcaaaaaatgacagatgcaaagccagataaacccttgatggcatcttcatcgcgaaaccttcctgatttcaagaagtctgttaagttgaagtatgtcaagcttggttatcattacctcatcacccatggaatgtacctctgcctttccccccttgtggtgctgattgcagcccagctttctaccttctccctccgagacttgtatgatctttgggagcatctacaatacaacttgatatctgttattctttgcttaactctccttgttttcctgtccaccctctactttctaactcgtcctcgacctgtgtaccttgtcaatttctcctgttacaagcctgaagaatctcggaagtgcacgaaaaaaatatttatagagcagtcccggttgaccagttctttcacggaggaaaatcttgaattccagcggaagattcttgagagatctggccttggggagaacacttaccttcctgaggccgtcctcaacattcctcccaacccttcaatgaaagaagctagaaaagaagccgagaccgtgatgtttggtgccattgatgagcttttagctaaaaccgctgtaaagcctaaattcatatggaattctgattgtaaaatttacagtctggtcaaccctactccatcactttcggcaatgattgtcaatcattacaagcttcggggaaatataaagagctacaaccttggtgggatggggtgcatcgccgggctaatctcaattgattctagcttatgtgcgtctccctatcagcattaggtggtagctgttggactggtgaaattctcctgcaaagttgttgggtttcttggctacgttcggataaatctagtctcttattgtgggattcgcttgggtggaactgcagttctgctctccaataaaagctcggatagaagaagatccaaataccgattggtcaccacggttcgcactcataagggtgctgatgaaaagtgctttagctgtgtaacccaagaagaagatgctaatggcaaggttggtgttactttgtcaaaagatctgatggcggttgctggtgatgctttaaaaaccaatatcactacactggggcctcttgtacttccaacatctgaacaactgctattctttgccacgttagttgcaaaaaagattttcaagatgaagatcaaaccttatattccagatttcaagctagcttttgaacatttttgcatccatgctggtggtagagctgttttggatgaactggagaaaaacttgcagctatctccttggcatatggagccttcaaggatgacgctctatcgttttggaaacacctccagcagttcactttggtatgaactggcttacactgaagccaaagggaggatcaaaaggggagatagaacatggcaaattgcatttggttctggattcaagtgtaacagtgcagtgtggaaggctctcaggaccatcaacccttctaaggagaagagtccttggattgatgagattgaccagtttccagtcgatgttcctagggtatcttccatttaaacaatgaattttttaaatatttgtgtatcactatcagcattaggtggtagctgttggactggtgaaattatcctgcaaagttgttgtaatacattgctaatttcggagtactgtaggattttatttttaggacaaaacttagatgccatgcagttcataagatgtttttgatattatattctaatcaaaattgaagtttcacctcggtaacttgtgttgatattcaatacaaatctttattatgcagattaccgagattaaacttcaattttaattagaaaacaataccaaaaacactttagaaagtgcatctctaagttttatcctttttattatggtatcctgcgtattagtgtgtgtctggtttgttggcagcatgcactccgagaccattgaacggagaagtatgtgagagagaactttgaaatgaacagacggttgggatggttgaacggataaccaaacacacacttagtagatctaacttgtgggtagtttttgttaaatccaatctagtcaatggtgggtgtttgatctttggttgccgggaggtgtgtttcccattggtctgtggactgtggtagtaaaatgcgtagggcatctaaaatgtatttccaaatttctctaatgaaattggaattgaacaattccatttcaattctttagtgtgttgatgctgaaaataaaattccaaggtatattattgcattgtaatttgtatcagcatctgtaacaattcatgatctatatgaggtaatttttagcttcatggctaaaaaaggtatctgaaaaa

SEQ ID NO: 96948 - DNA, 388 bp, Glycine max
  Clone ID: PAT_MRT3847_58556C.1
ggggagaagccgcacaacattttcgtcggagacgacggagactgcttcggcggtgtctgtggcttccaaacgacgcgacgattcgatgatgcagccacaggatggtattaaaggcgccattttacactgcaggagatccttcaatccatgcagacctgagtgtaagtcatcacaactgccgtgatctgagagccatccatgggacgagataggcatacatgaagccaatgacatgctcctttcaacatagccagcttccttgcagcggtgtcagagtgtaccaagggaaatgtatgtgattactattagactatatgatacactccaatgagatcaagaacaagatgatatgcatagtaagagtagagtcttggtccagcatgatatg

SEQ ID NO: 96949 - DNA, 498 bp, Glycine max
  Clone ID: PAT_MRT3847_58557C.1
gcccggcactgcaacccatcccaccaagattgtagctctttatatttccccgaagcttgtaatgattgatcttgctaaagatcttctccaagccaatcccaactcctatgcattggtcattagcatggagaatatcacgttgaattggtattttggaaacgatcggtcaaagcttgtctctaattgtttatttcgtatgggaggagctgcagttctgctctccaataaaagctcggatagaagaagatccaaataccgattggtcaccacggttcgcactcataagggtgctgatgaaaagtgctttagctgtgtaacccaagaagaagatgctaatggcaaggttggtgttactttgtcaaaagatttgatggcggttgctggtgatgctttaaaaaccaatatcactacactggggcctcttgtacttccaacatctgaacagctgctattctttgccacattagtagggaagaaaattttcaagatgaagatcaa

SEQ ID NO: 96950 - DNA, 180 bp, Glycine max
  Clone ID: PAT_MRT3847_58558C.1
gctaaggactaccagatcaacctaaaggagtgcgggccgacggtcctcgatgcactcatcaatatcaagaacgagattgacccgagcctcacattccgacgctcatgtcgtgaggggatctacggctcctgtgcaatgaacatcgatggctgcaacaacctctcgttcctcaccaagatc

SEQ ID NO: 96951 - DNA, 329 bp, Glycine max
  Clone ID: PAT_MRT3847_58559C.1
gaccgtggagatagaaggagcttgagggattcacatcactgtccacagagaaatcgtagattgcgagaaagattctgaatcatgtcgaggacagcctatgtctgagattaacttctgtgtgacaatctatagtaagcatctcagtcatgcggatagcatcagctacaacagggacgtttaggctcatagtaacggattccctcagttgcaacctgacgagatagctgccatcatgaattactttaatgagcctagatcacttgctccaactggattgtatctcggtggcaccaaatatatggtcatccacggtgaaacccgtgctgtca

SEQ ID NO: 96952 - DNA, 199 bp, Glycine max
  Clone ID: PAT_MRT3847_5855C.1
aaagaaacacgctcggatcttgtcttttcttaaagaggagccgggggttttttacaaatttttcacaccctcacaaaagtcggaaaggggaacgctaccctacattggaggggtatttaggcattccaaacagcaccccgggggggaactgaagggagggcccctttttcaaaaggaattcatacacactcggacgggt

SEQ ID NO: 96953 - DNA, 904 bp, Glycine max
  Clone ID: PAT_MRT3847_58560C.1
gaaaaagagagaaagaaaaatggtaggaacaaattgctactcaaacccggcaaccctgaatgcatcaagtggtgctggctatgttaccaacattgctggtgttaattcctatgtcactggttcccctctctccgtgctcgtctgttttatggtctccgatatttttgggatcaatgcaacactttttagggacttggcagacaaggttgcaagaaaaaacgggtgttattgtgtctgtcccgacttcttcaatggggacccttttgatcctgagaatgagaacaggcctttacctgtttggttaaaagatcatgaaccggaaaaaggtattgaaacagcaaaacctgttattgaagccttaaaaagggaaggtgcttctgctattggagctgctggtttttgttggggcggtaagactgttactgaccttgggaaatccaaacatgtccaagcttcagtgttattacatccagcatatgtcgaagtggatgacatccgtggtattaagactccaattgctatacttggaggtcagaatgatacaattactcctccaaagcttataaaacaatttaagcaagccctacaaaatgctaaacctaaggttgatagttttgtaaaaatatttcctaacgtttcacatggttggactgtgaggtacgaccctaaagatccaaaagctgtgaaggctgcagagaaggctcatgatatcatgataggttggtttgataaatatctaaagtgagaaatcttgttttgtgatatcatttgtgtccttgggtggaggatggaactccacctagttgtatttatgaaaaaataaattgtcatgaccaatcctagggacgtgacaggtgcaataagattttattattaaagagatataatatcaatttcattattg

SEQ ID NO: 96954 - DNA, 741 bp, Glycine max
  Clone ID: PAT_MRT3847_58561C.1
gaaaaagagagaaagaaaaatggtaggaacaaattgctactcaaacccggcaaccctgaatgcatcaagtggtgctggctatgttaccaacattgctggtgttaattcctatgtcactggttcccctctctccgtgctcgtctgttttatggtctccgatatttttgggatcaatgcaacactttttagggacttggcagacaaggttgcaagaaaaaacgggtgttattgtgtctgtcccgacttcttcaatggggacccttttgatcctgagaatgagaacaggcctttacctgtttggttaaaagatcatgaaccggttaattcttacttaatcatacttggttgtttatgatttttaaagcaagatttttttgtttgttaaattcaattttggtttccttattcgaaatttcataactggttttccaagaggattgagatgtctggcttctataattttattatcatttttgcgactggcttgccaccatttcaggtggtttccgatttgtaaattggatattgtaaattgtttcaattcagatgtataaaaatcgtgacttgttaataaactataatacattctgatgcatgtatatttattttgtaggaaaaaggtattgaaacagcaaaacctgttattgaagccttaaaaagggaaagtgcttctgctattggagctgctggtttttgttggggcggtaagactgttactgacctttgggaaatccaaacatg

SEQ ID NO: 96955 - DNA, 415 bp, Glycine max
  Clone ID: PAT_MRT3847_58562C.1
gggaaaaacaaaggaagtctaaagcaaattccaaatatgtgactgactgcaaagtatatggaattaaattcttaggccaactagcttgactaattttgtgaactttcaaatgattgactgtttttgagacttgattgagttcagagtgttaaaatcaccataatatgttgattttgtaattcagacacaccgtgtaagggctacaatacaaaacatagaagagggaaatcagaaactctgcgtgttcaatacataaatacaaaggaactgagggtaacaattggcacatggaatgttgctggaagagctccaagtaaggatcttgacattgaggactggctttgtaccaatgagccagcagatatttacattattggtttccaagaggttgtccccctgagtgctggaaatgttc

SEQ ID NO: 96956 - DNA, 616 bp, Glycine max
  Clone ID: PAT_MRT3847_58563C.1
gggcacattactgaaggacccaagttttatttcacctgctcaagagacaaaaactcgaacaatagatctttgacctttaaataagcaaaatagagtaagaaaacaagaccccaaactttttttggggtcttttctattttcgataatccatttcattttagaatataatacataatcaaataacaaatagaccaattaagaataagatgaaatcaaatacaatgaaacaagctcatgcatgcatgcagatttcatgtgtcttctaaaaatcaacgacccccagagagaagtgattcagcaatcgaagaagtatgagatattggcctatccatagatgaaggataagacattggacagtcctgaaagtcttcatgcagaccaaaagttaagccaattgaagataagctaagcatagacaaatctggcagaggcacatctttctccaagtattgcacaacctggcgcatgcttggcctagccaaaggctcagaatgtgagcacaacaaggcgagtttcaaccccaattccacctcatttggcctataatttgcgcccaagtttggatccattgactcaagaatctcaccctttttccaacaattttacccccaatcga

SEQ ID NO: 96957 - DNA, 203 bp, Glycine max
  Clone ID: PAT_MRT3847_58564C.1
ggaacacagtctatgacaggctccataaagggcgaaaaacacgggacatcagtgcatctttgaaggttaagctggtcaacagcatataactcatataaagggccggataagcttgtggtcctacagaacacacacgaaacacattgcgctttcaaaggcaacagaatagtgacactcttatgcacacgcacaccttgcaatag

SEQ ID NO: 96958 - DNA, 324 bp, Glycine max
  Clone ID: PAT_MRT3847_58565C.1
tggacgcgtgggcggacgcttggacagacgcgtggtgtacaataactccttcaacatatgctttgtaaagaaagtgctgaagaacggtggggactggggacaagtcccatggtttagtagggcaaggaagctctttctgagactaaaccttacgaaaaggcaacaggtgtgactacgtggtgattggactctattgaaggattcattacttggcgggagcttctttagaagacggcttgcaagctagaaaggcaactttacatgcaggaccatgtttacaggagccaaaaaaagaatttaggtgggaatgagattctgcgaaaa

SEQ ID NO: 96959 - DNA, 162 bp, Glycine max
  Clone ID: PAT_MRT3847_58566C.1
aaaaacaataattttcggccaaatgaacaagcatcaataaacgctgaaaggggattattaaataaaaccactttaacaaacaactttcctaagatcttgaaacctaacctcatttaagcctctacaggagcaacaaaagtttttttattgtaactaaatcca

SEQ ID NO: 96960 - DNA, 464 bp, Glycine max
  Clone ID: PAT_MRT3847_58567C.1
gcttaggtccgtttattccctccgtgccgtatctcaaacccctcattcattcattttgtatgagttttttcatggaatccctacaattcacaccacagtcctaccaactccaattccatttcatgaacaaactctctcccaaattcaaacccacaatttcctccattcacttcaggaccttttgtgattcttcttcttctccttctactaccctcacccaaacccagaatccgagtgaccctcaaatcatagttcctaacagaaagcgtagggtgaaggcttcttctgatacccaattcaaagagaattggttggcttcactctcttacccttttccagaaaagacgcattttttgagtggagagcatgaaccgacccaccaaaatgatggctctaaatgggtccttggaattgatccagatgtctttggcgctgttgcactcttgaaaccacacggtttgttg

SEQ ID NO: 96961 - DNA, 554 bp, Glycine max
  unsure (1)..(554): unsure at all n locations
  Clone ID: PAT_MRT3847_58568C.1
tgtgtnttccttnntgagatnnntnaaaanntttctttataatcaatgtcagaatgtcatccttttgagccaaaccctcaacaataagtttgaccttgcaacgttaaaggtttccataaggttcaatcatcaatacgatggtgggtcttaattgggatgatctagttcagggcgtgtgtggcagtgtgagttcttcgtggctcatgatcataggcctttgttgtatatgctcttggtatggcactgtgcatggttggcaacgaaaacataatgagacgactaggcttataccaagagaagatggaggtttttgtggtgagagtatagcattgttggagtcttacaatggtggccacttgcatgcatggttaggcgggttgaggacatggttttgtgatgctagcttgatgattcggtggtgtgagatgtgaattaaaggtgaagttgcagaggtttacagaggatcaaaagctaagaataccnnnatataatggaggagttcttggtaggatctaaanntaaagttgtagaggttcacnnagtattattatgng

SEQ ID NO: 96962 - DNA, 221 bp, Glycine max
  Clone ID: PAT_MRT3847_58569C.1
cggacaaaacaggagcaaggaccacacttatacaaaatcctccaagaagcaacaagccaagagtggctgcaaggaagaaaggccccataacgggcaagacagcgaagcctgggaaaggaacagaccaaaggagagaacgggccccaatggaacaaggggaaggaacaaacagcaacaggacaaaagcaaaatgaagcaagcaaggggacaaaaacggcacc

SEQ ID NO: 96963 - DNA, 349 bp, Glycine max
  Clone ID: PAT_MRT3847_5856C.1
agaaatcagcacaccacacctccttggctcctccggcatggccaaaaagcgcaagcccaagaagaaaccccacaatcacaatgtaaacctaaaccaaaatcaaaaccaaaaccaaaatcaaaaccaaaacgtcgccgctttgatttcgcgagtaacacatgcagtacagtccttcctctcccaaaacgacctcgttctcctaccttcccaatccctccgtctcgaatccctaatctcatccatcatctcccactctccctcgccgcctctctcttcgccgcacagcgactcctggttccgccgctttcgctccgtctccgattccctatggctccacgccttccgcatg

SEQ ID NO: 96964 - DNA, 467 bp, Glycine max
  Clone ID: PAT_MRT3847_58570C.1
ctaatagcaaaacctacaaaagcattccccacacttaaaagagggggggcatttgccacacacatagaacgtactactcaccagggtcatcccccacaatcgtaattgcataaaaccaatcaacaagctttcgtaacacattccatctagagattgccagcaatttcatcttttaaaaagaacagcttgttggcaactgaacaaaaaaagcttgtttatgaacataaccacctccttaaaatttttgaacacttcctacaaggagaacctaaacctgaaactgctttcatttgttaaaactgaaattaacaacttgttaatgttgatgaggccccacataacacctcactttctaacccttactaagaccaaattcctttattgggcggaataacccccagaaattgggccttgtttttctaccctagcacttgaaaaagcgtctgatctcgagctgaggcctaaaa

SEQ ID NO: 96965 - DNA, 1508 bp, Glycine max
  Clone ID: PAT_MRT3847_58571C.1
ctgctcgatggcggccacagagccggcggcaacagagtagagaagagtgggcaagaatggcgacggagatggaagaactcgtctcctttctttcttccacgtcgcctcagatcacaaaagccgccgttgacatagtccgcggcttaaccggctccatggagggcttgcagtccctggcaaattactcaaacgccctcttacccgctttgtctcgcctcttaacgttacccaaggaggtttcggaggctgctgcggaggcgctggtgaacctgtcgcagaattcgagcctcgcggaagcgatggttggaattggtctggtcaaaacgacgatggatgttctgtacaagcccgagtgtagcattgctcgcttgcttgtcatgctgttggtcaacctcactcaactcgaagctggtgctgcttccttgcttcagactgaagatgagaaggtgcatggtttatatgttatgaagcttgtgagatcattttgtagaacctcccatgagagtaatgatgatgcttttgaacatgttggttcaatacttgttaacatctcaaaacagcggaaagggagggagcttctacttgaccctaaacggggtctcttaaagcagataatcagacagtttgattccaacagttcattgagaaagaaaggggtctctggaactattcgcaattgttgttttgaagctgagaatcagctacaaaatttgcttttggtatcagagtttctctggcctgcattacttcttcctgtagctagcaacaagatctacagggagcaagacagattgaaaatgccacttgaacttgggactgcactctcgattgaacgtgaaccagttaatgatccagaaattcgtattcaggcattggaagccatatacttgatcatattacaggaggcaggtcgaagagccttttggtctgtaaatggacctagaatagttcaaatcggttacgaagacgaggaagatccaaaggtgatggaagcatatgagcaactgggatccttgttggttcacagtagcagtgcagaggaaccactcagtgataccacaaagtagttattttgtattaccatcaattgaccctgcaatatctctccataagaactctgtaatacttatgagggtcattcattccaagtcaaatttccattttgaggttagaattaccaattttagaaatatgtaaattatgcggctcggagtagttagtcaaaattatttatacacatggcagaatgagtgaaagatgttctcttgatgcaaaagttcagtttgcttcttcagtttctgtatttggaattttgaattctctaaactgcaggtacaatatttcactttggagaatcccgtttcttatgtagcctgttttctttggattattagtaatcattcatttggctggtaaacgccactgataattcctagcacctatgtcattagtgtgcatttggttgtagtatttgagaatttcaaataatttaacatttaagaatttta

SEQ ID NO: 96966 - DNA, 224 bp, Glycine max
  unsure (1)..(224): unsure at all n locations
  Clone ID: PAT_MRT3847_58572C.1
gtnnnaanaaaagagcaacggaaacgcacaaaatgggcccaaccctctaaaataaaaaagaaggcttgaaacaaaccgtgggcccgcaccataaaacaaacggggatccggggcgggttaaagttcaaattaaaaaagaatgtttttccggggttttcactgggaaatttatttcaaataatgccagcccggcccgccccccggcctaaaaaaaattatttttt

SEQ ID NO: 96967 - DNA, 343 bp, Glycine max
  Clone ID: PAT_MRT3847_58573C.1
aattcggctcgagcgaatactcacacgcagatagctcatggctttattcctgtggttgtaaccgtgcctgcttctctgcataagaagttttcatctcaatgtggggataagactaccgaatcactgatttgattcgttcaaatgccaagactatgatcggagcactattagatccgatgctgctgctaatgttgatgcatcttggtacctttcaccggcattttccgacttctccatatgatatcatgtgactgacacgctaataactacgctgtgcgttgatgacgcgcgcacctactacatcggcaagcgtgcttattgctgcgccccagacagaatactt

SEQ ID NO: 96968 - DNA, 255 bp, Glycine max
  Clone ID: PAT_MRT3847_58574C.1
caacatgatagacatggacgacacatgctaacttgctgcctattataatgttggttttccaactgatgcatgtgataactctatgcataaaccgtgattgttgagggccaataataccacccttggccaccactgttgcacgtcgtctagttgaaattggtatcatagacgtatacaccgtacctggagatttcaaccttattcttcttgattacttattatcgtaacctgatcttaacctcatacgtcgttgta

SEQ ID NO: 96969 - DNA, 303 bp, Glycine max
  Clone ID: PAT_MRT3847_58575C.1
tcctctctggtcgacctgcgacctggttggcctgctttattcctaggggcaaatggattcaagggaagactaaatctttaattccaaactatggttgcttttgcttttttttttttattccttttggccgcaatctataatgataacttatctccttttctttactagaaaattggtattcccttcataagtgatatatattgtgactgctctaaaaaaaaaaaaaagcgcgtctaaggatcactacttacctctgcactatacttttataggtactaatcaattacggcgcgtttacactct

SEQ ID NO: 96970 - DNA, 358 bp, Glycine max
  Clone ID: PAT_MRT3847_58576C.1
gaggacaaaaatgaaatctcattcttcaggataattagaggcagtggttcttacataccctcaacgcccttgttaggtaacattggaggttactggatacacacaatagacaaagactacatgcatcttttctgactattgtggtaaatctgaccatgtttgctctattcacatcgcacaataaaaaaaaaaatgcacaacctgctaaatgtgcatctagagaaaggtaatactatgcgctggctgacatcaacaaaagcctacttcatgtttactgcacaaggcatgtcatgttgggctagaactattggcttgtgagtgtaaatatagtaaagcagtactcttacacctactttca

SEQ ID NO: 96971 - DNA, 567 bp, Glycine max
  Clone ID: PAT_MRT3847_58577C.1
tgcaaaaccctaatttcatatttcactctggagaatttgtgaaccagaatttttgtttttctctgtaattgtagaatttttattttcaaaaattttgtgttattatttttttttgaagctctttccgctctctgcaatggtggagatttgagttactgtgtcgcgtctttctcggagttcaaaattctgcttctgggttttcgtcatttcagacaaaagtttctatttttgaagttttttctgtgcagttacaactttttctgtgctcaaacatcactgtactgtttctgggtacgtcagttctgcattcaagtacatttgtctccactgagttaaaaaaaaatcaatattttccgctgtttttgagtttgttaatgcttgaatcttcaatgggtagggtttaagcgagttttaaggttttgggctgtcctaatttttctttgattcgcacaaaaaatggaggaaagagagatatctagttctgggcatgctgttaagtcaggtgaggccccccagagcttccacgtagcactaaactgcggagacaccgcaggggcaccagcaccg

SEQ ID NO: 96972 - DNA, 525 bp, Glycine max
  Clone ID: PAT_MRT3847_58578C.1
aaagaaaaggccaaaagccaaacttgtttaactaaaggggggcttgtttaacataaaaaaggggtgaattagcatttgtcccagggtaaatttcagtttacaatcaagggcgggcttttttttttttctaaaaaattgggggagaaacttccaatcaacaaatggggttttatcccgccgggttttctttcttgtaaagggggcccccccttccaaggggttttaacaaaagaatagggggaacctgggggcctttttcattctttttttagggggggggggccgcctcaaaagggaaagggaaaactttagctaaacccagaataaccccccgggggatttctttaatcctcccatttttaaggaatcagaaagaattttctcctcccttcgcaaataagtcggccttaatcgggggcaagatttagggtgcctaacttgggactgggaaaacacggggggggcactaagcctggggccaattttcccgatgttttacaggatgggcgcatcctgacgtaaatt

SEQ ID NO: 96973 - DNA, 409 bp, Glycine max
  Clone ID: PAT_MRT3847_58579C.1
ttttttttttttttttttttttttttttttttgttttggttttttttttttttttttttttttttttttttttttttggggcccgcccaaacgggctttggggttttttgttaaaaaaaaagttttgttttttcccggggggggaaaaaaaaagggggtttaaataaggggccccgccccaatgtttccgtttttccaaattgggaaagaattttttaaccccaatggcaagggggatggggattaaacaaccccccaaattttggggcccaacccttggttttgggcccaaaaattttttcacctttccgggggggtttctttttggtgtggtttggggaattaaatttttttacctttgcccaaaatggccccaattggttttaaaaaaaacgggttctggcttggg

SEQ ID NO: 96974 - DNA, 227 bp, Glycine max
  Clone ID: PAT_MRT3847_5857C.1
acggctgcgagaagacgacagaagggtttgtctttaatacttactgtatttcttgtcggagctcccctccaccccaaaattgcatccacctgacttataagcttttgctgaatgacctaacttataagttataacttaatgcataaagggatgatttggttgtgttcaaattgctagcaaacgagagaacaatttcaaattttatgtggaatacacactttactatt

SEQ ID NO: 96975 - DNA, 354 bp, Glycine max
  Clone ID: PAT_MRT3847_58580C.1
gcctgactggcacttagtagctaggagatgtgcctttctggtctcttaattctaggtgttgagagaaaaatccctgccagaaacgatgatttacgagatgctgcttggccaaacactcccattacatgttccttgtgagatctactaaagccgggacctgccagagtcaaaatccttgatcaccctatgcatactgaagaaacacaggaacccctgaccgtgttgtctgaacaagaccttgattcaagcaaaacactgatactacatgttaccaagcctaactttgaacaacattggagtgtcagcacatgggtgaaggatactacagactctactccagaacgatgtaatctt

SEQ ID NO: 96976 - DNA, 275 bp, Glycine max
  Clone ID: PAT_MRT3847_58581C.1
aagattttgaaattgctggtaatactcttatgccagctgtttctgttccgcattttcaggagatctctcagcagcctgcggaacacaatgcgcgagctggaaagtgtgaccaccaacgcctgttccacaggctacttccataaaggaaaataggcctgaccctcttgctgagtatgctctgcctatttgaaaatttccacacctcttttaattgtcctaatgatgtgtgaagtgtgtgttattttgaacccaaccccatttctattatacaaaac

SEQ ID NO: 96977 - DNA, 316 bp, Glycine max
  Clone ID: PAT_MRT3847_58582C.1
acagattcacgatattcaaaaacaggacaggctatcggcgcaaacacagatacgccattgcttggtacatcttttcctgcctgtagggccaaagcagaccaggttgcaaactggagtgtggagtccccctttcccccttcttgacaaagaattgaataaacatgcttacagataatctacggagactctacatggtgtacgagacgctcagatcaatttcgaactcgtacatgaaacacatcctagggcaaaataaacagcggcgtacgaagaccacactacctatcacctagcactagcctcttctactactgct

SEQ ID NO: 96978 - DNA, 498 bp, Glycine max
  Clone ID: PAT_MRT3847_58583C.1
ctcgagccgattcggctcgagattattattattattattgtatcaccgtcgaaatcaaaaaacaccatcaccatgaacggaaaaattgtcttgtgtttcgcggtcgtctgtattgcacagaccatgtcagctgcaactggttctaccgttgatgtcgatgacattaaaaaagtttctgatcaaatatcacaaacttttttgtctgtcaccaatcacttagtgggaattgcccctaactctgccgatgcccaaaaatccattgataaattcagaactattatgtctaaaggattcacagacattgaagccgaagctaacaaattgaaggacatcattcgcaaaaacgctgacccgaaattggttgaaaaatacgatgaattagaaaaggagttgaagaaacaccttagcaatgccaaagacgctttcgaagacaaagtcgtcaagcccttaggcgagaaggtagaattaaagaaaatcaccgaaaacgttatcaaaact

SEQ ID NO: 96979 - DNA, 121 bp, Glycine max
  unsure (1)..(121): unsure at all n locations
  Clone ID: PAT_MRT3847_58584C.1
gtcacacgtggtcaaacagggtcaccttaactccatctctgttttccgttnnnttctcttngctcccagctccganaaacagcacaanacaacgtcttcatccatttcaacacctctcatt

SEQ ID NO: 96980 - DNA, 925 bp, Glycine max
  Clone ID: PAT_MRT3847_58585C.1
ctcttctttctaattcggctcgagacacgagcaaagcaaattaatatccatttggcgtttcatattcaagaggatcttctattgactattgaatgatgaagatgagttccaaaagcgagacaataaaaccaaagactgattttgaactcgttctaaattattctaatcaaggtatttggaaagatgactcgggtgcaggtgcaaatgcagcttgtcgaatagacaagacattttctgccactgaccccctatctgaaatagtttggtctccagataaaggtttcggtctcaaatgtgttgattcaagttttactaataaaaagacctctcttttgggggaatgttgaactaagcattatggttcttgctctgctccaaagtgttactgatgaaagttctgccacagataaaccaacagatgacgtttttgtagaacctattgctgtaatatgctcaaagagtgatgtttcctccacagatactcctgctagtcatccaacaagtgattattgatacaggatttggtgataatatggagaaaatgaacactgcaagagaaacacctaatttgccaaacagtaagaaggagaatgtaatgaatgacttggagaagaatatttgtgctcaagccaacattggaacagctataatatctgagataaagggaaacaaatctactatttcagatatgtcctgtcatcatcattttatggtaccaacaagacaataatttaggcattttaggaaagttttgttactcttgcttaaaagcacgttctaaattctgttatttgtaaacaatttatatcaattatcctggatcatagaaaataattcccattattctggcaggttttttttttctgaacacaggatccaaatttaacacatttcctttatatttaaaggacacttgctgaaaaaa

SEQ ID NO: 96981 - DNA, 292 bp, Glycine max
  Clone ID: PAT_MRT3847_58586C.1
gtgttgtttattgaaattaaagatgcacattatataagggcacctgttgcagattggatatttaagatgtcccatatctttaagtggtgcgacttttgatacacaatgtaaacattctattggataaatatacatggacctttcccatacttaatgaagaaggttgcggaagaaacgatgagggtgccacggcgggtggtctaatattgccttggggagcataacactggaaggggagcctctcagcacatgttttacctctataatcaaaaactgctcactgtcaacattt

SEQ ID NO: 96982 - DNA, 253 bp, Glycine max
  Clone ID: PAT_MRT3847_58587C.1
ggttcaaggcaaacgtcaatataactgaaggattcttacaaaccaataatataaacctataaaacaaaaaagactctctcaatactttattataactactgcactccgaccagtcagctatttcacttccaaccattatggtttgaacggttgagagtcgaaaaaaaacaagagcttttacgagaagacatcaaaagataggggattcggtagaactctttcctagagaacagttggaccaaatacagtccct

SEQ ID NO: 96983 - DNA, 732 bp, Glycine max
  Clone ID: PAT_MRT3847_58588C.1
cgcaattcggagcgacggcggaatccctgaacaaggcgtcgacggcggtgtttcggatcggcaccgacgcgcacctctacgacgatcccgaagacgtgaacatcgcccctctcctcgacagcaagttcgattccgagaagtgtgaagctctcaagcgccttctcgctctcatcgctcagggctttgacgtctccaacttcttccctcaggttgttaaaaatgttgcgtctcagtccttggaagtgaagaagctggtctacttgtacctcctgcattacgctgaaaagcgtccaaatgaggcgttattgtcgattaattacttccagaaggacctcggggacacaaatccgttggtgagggcatgggcgcttcgtgccatggctgggatccgccttcatgtaattgcgcctcttgttattgttgctgtgcaaaaatgtgcgagagatccttctgtctatgttagaaaatgtgcagctaatgctcttcccaagcttcatgatttgcggatggaggaacatgcttctgcaattgaagagattgttggactacttttaaatgaccattccccaggagttgttggagctgctgcatctgcatttacttcagtttgccctgacaatttttcattgattggaagaaatacagacggttgtgtgagattcttcctgatgtggaagagtggggtcaaataattctaattgggatccttctgcggtatgtaatagcaaggca

SEQ ID NO: 96984 - DNA, 160 bp, Glycine max
  unsure (1)..(160): unsure at all n locations
  Clone ID: PAT_MRT3847_58589C.1
gtcgcngcncgcgtacgtnagctcggnnttcgggtntacntcacnnagtcttgaaacctngttgcaagnccntnaanccnnnacctgaancccttggtgntgctgnnctagcactgcnctatgnnnatgttatcantgtgattgagaagctagcagctng

SEQ ID NO: 96985 - DNA, 1447 bp, Glycine max
  unsure (1)..(1447): unsure at all n locations
  Clone ID: PAT_MRT3847_5858C.1
gatacacaggatagacatgaaaagtaaactccataccatatatgcttaatttaatgtatgccgtactgtaatagttgtaatttggtacttattttagagcacttgcctacggcctgcttggtgcttgcctactatctacattaataatctaaagattagattacattatattaaagagagaatcaatataattcagagacatgcactttacctgaccaggctcttctataaagggctccatcatgttggtttagtttgcaagattttggcagtaaagaacggcatgcaggaagtgctgaaaatggtgaaaagcaatgaacaagttgttcctggggccaaatattgtgtcacaggttccacagggtatatcggttcatggctagtggaggctcttcttgaaaggggatgcacggttcatgccactgttagagatcctgcaaagtcattgcaccttctgtctctgtggaagggtggtgaccaattgagatttttccaagcggatttgcatgaagaaggaagcttcgatgaggctgtaaaaggatgcattggtgtgttccatgttgctgcttcaatggaattcaatgttagggacaaagaaaacaatgaggcttttgttcaagcaaatataactgaccctgcaatcaaaggaaccataaaccttctaaagtcttgcttgaaatccaattctgtgaaaagggttgtcttcacatcttccattagtaccattactgccaaagacatcaacggaaagtggaaatctattgttgatgaatcttgccaaatccaccctgacactgtatggaacacacaagcaagtggatgggtttatgcactttcaaagcttctcacagaagaagcagcatttcaatttgctaaagagaacggcattgatcttgtgtcagtcatatcaagcactgttgcaggcccattcttcactgctaatgtaccaacaagtgttaaagttctagtgtcaccattaacaggtgaaactgagtacttcaggatattatctgctgtaaatgcacgaatgggatcaattgctttagttcacattgaagatatatgcagtgctcacatattcctaatggagcatgctaaagcagaaggccgatacatatgcagcagccaaagttgtgcattgtctgacttggctacccttatttccaaagtgtattcaaattcaaatatctaccagaagaccgagaaaatttatgacaaagttccctctgagatttcatcaaagaagttacaagatttgggctttagttacaagcatgaccttgaagatataatttatcaaacacttatgtgttgcctagactatggttatttacctcctgtttagtcagtcgtagtttttcattaccattgtacatgattttaaacaattgagtttaaccaatttgtattttgccactcaaattaaatgtagtccacttgccncccc

SEQ ID NO: 96986 - DNA, 419 bp, Glycine max
  Clone ID: PAT_MRT3847_58590C.1
acgaggtttagttgtcaaccttgcaaaccattttgctaatgaaaagaaaatattcaaaaaaactttttggtaaaataaaccttattgaattattgttgattgaaacctatacctaaaaaggaagtttacgcccaacctttattttattttcatcatctggtcaattcatgtttggtggatgggtatgatcggagtgtttccatttctcttacgttgacttttccgtgcatcttatcagcaagaacatgaatttggtcttcgtttctctcccttgtacttctttccatatttacttagtggcatgacatcataaggtttgagaattgggacacttatggtactcgtcttctgaaatttaggtgccatgtacagaatgtacttaattgttcctggctactggtattatatttaaatataaa

SEQ ID NO: 96987 - DNA, 585 bp, Glycine max
  unsure (1)..(585): unsure at all n locations
  Clone ID: PAT_MRT3847_58591C.1
gaaatatcgcaacatagccgtcgacaaatttttttacagttatttctcccccaataaaaccaaagtatgttctcctttgcaacttggacttcgagttgattcatgccaatctaaaatacaaaaacaacacagaaaggaaaaatgtgtttgcattctaaaaggaaaacatagaagggcatgtagtacaagtcataaatcttattacaacaacttctatgataacaaaaagtttatatatcagtttatgcaagctttaacaatttttccttgtctttcagatactgattcattggcatgcttccaagaaacaaatggttgagttggtctttaatatcaaacaatccatatttaatatactcagaagcatgtataccaagaacatcttgcaacttctcaatgaagttcccatatgctggcaacaagatgtgttggagtgacattattattttttcacttagctgcttatcaaaggcaagccatctagattgagtgctacatatatccttgaagtgcatgttgaacaaattgaggctgcctttcnnngactctgcgttcgcattnnnnnccactnnntcgttnntctct

SEQ ID NO: 96988 - DNA, 1580 bp, Glycine max
  Clone ID: PAT_MRT3847_58592C.1
ggcaatccaagctctcaagcctttgaggataagagttggaggttctttgcaagaccaagtgctgtatgaggttggaagtttgaagtccccttgtcatccatttcaaaagatgaaaggtggattgtttggattttcaaagggatgtttacaaatgaaaaggtgggatgagctgaatcattttttcgatgagacaggggcccttgtgacatttggtttgaatgcactccgtgggaggcatcagattagtcatactgtttggggaggagactgggacccatccaatgccaaagattttatcagttacactatttcaaaggggtacaaaattgattcatgggaatttggtaatgagttgagtgggaagggcattggggctagtgttggtgctgcacagtatgggaaagacttgataaagcttaaagaaattttacacacattatacaaaaactccacgttcaaaccttcccttgtagcacccggaggattctataataaggagtggtttgataagcttcttcaggttacaggtccaggcattgtcaatgtgctgactcatcacgtgtataatttgggcccaggtagtgatgagcatcttgataggaagattctagatcctgagaacttgagcaagatagaatcaatttttagcaatctttcagaaaccattcaaaaatatggcccttggtcttctgcatgggtaggtgaagctggcggagcattcaacagtggtggtcgttcaatttctaacacatttgtgaatagcttttggtacttagatcaacttggaatagcatctagatacaacactaaggtttattgcaggcagactttaattggaggaaactatggtcttctcaataccactactttcattccaaatcctgactactacagtgcacttttgtggtgtcagctaatggggaagactgttcttgcagctagtagtgatgttttttcaccatctttacgcacttatgcccattgttcaaaaggcagagatggtataacattactgctgatcaatttaagcaatcagactcatttcacactcacggttcatgaccgggtgcctgtgagcaatggaggaaatgaaaatgctaaaagcatccatacagaaaactcattctttagtcatctcaagagggcattttcttggattggaacaaaaggatcagatgtcacattcagggaggagtaccacttaactccaaaagatgattaccttagaagtcaaaccatgttgctgaatggtatccccctagaattgacaaatgatggagaaattccaacattggatccactactcaataatgtacattctccaatacacttggctcctttatccattgcatttattgtattccccaactttgatgctccagcttgtgcgggacttagaaaaccttaaccgaaaggctccttgaatcttgtagactaggtattaggactaagggaatgtgagccctgccattgaaattgtatttaattggctatatatttgtatccacagcaaagttgtgaccacctttgcaataatttattatgaaagacacttgctagaagcatgattatactttgtt

SEQ ID NO: 96989 - DNA, 278 bp, Glycine max
  Clone ID: PAT_MRT3847_58593C.1
ggcagggcctgagcctacagggaggcacagggcaggtgggctagccatgaacagaagaggaagctggagtcgctttgggggttcatgcatgtaggctgggatttggggctcacacctcaacctgcatgcccagttccatgcccctcccctcttgtgaaagcacctgtctacttgggctgaggatgtgggggcacaggtggcaggtgaggctgccctcaggaggggcccaggcccagcttgtaccccagctccaccagtacctgaagaagtggggctct

SEQ ID NO: 96990 - DNA, 1002 bp, Glycine max
  unsure (1)..(1002): unsure at all n locations
  Clone ID: PAT_MRT3847_58594C.1
atccatttcaaaagatgaaaggtggattgtttggattttcaaagggatgtttacagatgattcagctcatcccaccttttcatctgtaaacatccctttgaaaaggtgggatgagctgaatcattttttcgacgagacaggtgcccttgtgacatttggtttgaatgcactccatgggaggcaccagattatacatactgattagggaggagactgggatccttccaatgccaaagattttatcaattacaccatttcaaaggggtacaaaattgattcatgggaatttggtaatgagttgagtgggaagggcattggggctagagttggtgctgcacagtatgggaaagacttgataaagcttaaagaaattttacgcacattatacaaaaactccacgttcaaaccttcccttgtagcacctggaggattctataataaggagtggtttgataagcttcttcaggttacaggtccaggcatagtcaatgtgctgacacatcatgtgtataatttgggcccaggtagtgatgagcatcttgacaggaagattctagatcctgagtgcttgagcaaggttgaatcaatttttagcaatctttcagaaaccattcaaaaatatggcccttggtcttctgcatgggtaggtgaagctggcggggcattcaacagtggtggtcgttctgtttctaacacatttgtaaatagcttttggtacttggatcaacttggaatagcatccagatacaacactaaggtttattgcaggcagactttaattggaggaaactatggtcttctcaaccactactttcattccaaatcctgactattacaggcaagtgccaattgaaaaatgtaaaatgaagagaaaaagaagaaaatatatatttgtttttctaaagtgttataaacatattgcttaacatattgtataatctaggtcctggtgttgtttttgagcagtgcactgttgtggcatcagctaatgnggaagactgt

SEQ ID NO: 96991 - DNA, 331 bp, Glycine max
  Clone ID: PAT_MRT3847_58595C.1
cttgcattgagggtctaacccgtaccatacatgtgggccaactactgcgattggtgtggacacacgtgtcatttactaattcagcgcaggcaccagtaatatcaaccacggacataaatactgaatggtggcaccgtgacttgacataccgggatattcctactcagtaatgccaacaccttaatatgtctttcgttctcgcgtctatggcttcatagggagctgttgccacattagaagaccgagggtgtgaagagagtggggagaagattagctgttgacgtcatagcggagcataggagaactgggattgaaactgaagccattggta

SEQ ID NO: 96992 - DNA, 263 bp, Glycine max
  Clone ID: PAT_MRT3847_58596C.1
acgttaaaacaagcataaacagtaggagcataagcaatggcgctgaacaagccaagaaccaggagggggaaccttgatggggctaggggcataggcttgtattgaacgtaacacatgaactacaagacgggtatctgggccatcaaggacaaaaacggtgatgttttgggacgctactatcacaaacataaattggaggacctggaccagaatacggccaatttctatcaatggaacgaaattaagaatttgctagacaacaa

SEQ ID NO: 96993 - DNA, 2020 bp, Glycine max
  Clone ID: PAT_MRT3847_58597C.1
ctagtccgaccggttctactacgtatcggaggttttatcagcttaacttgcattcgaactggtcttacccagcgccaaccggctaggttcgttgcaacttaatttttttttttttttttaaaaaaaaaatcaaaacagagacacaaccctagctttcacatccgcgaaacccgtcaccaccggcgcacccaggccaacgttgttctcttatcgtcgccggcgctcctgattgtcgtgctgtttggacactcgagcacgtcgccctcgcacacgctctccatctcgccgtcgcactcgcacgttctgagtttcagtttgaaccgaagcaaatatggtgcggcacaagcgtgggaggccttcaccggaaaattctccgtccaaacggagaagaagacgttctccgttggaatgtcgtaggagatgggttgtctcttccaaagactcttctaattgcacggataaggttctggttgtttcatacaatatacttggtgttgaaaatgcatcaaaccatccagatctgtattctaacattccacatagtttcttggagtgggacaggcggaaaaggctcatacttgaagagattaataactataatgccagcatactgtgcttccaggaggttgatcattttaatgatctggatgatcttttccagaacagtggctttaaaggtgtttacaaggctcgcacaggagaagcacaagatggatgtgctgtattttggaaagacaagttattcaaacttttgcatcaagaagatatagagtttcaaagatttggtatgcgtaacaatgttgctcagctttgtgtttttgaggcaaaccatgataagaaagaatctgatgcatgtaacctaacaacaatgacaccatccaccggaaaaagaagatttgtagtaggaaatatacacgtgttgtacaacccaaatcgtggtgacatcaaactgggccaggtcagacttttacttgataaagcttacaagttgtcacaagaatggggcaacattcctgttattattgctggggatttaaatagtgttccacagagtgccatatataaatgtctttcttcatcagagttagacatccaattacatgatcgcagaaatatgtcaggacagcttgaaatccagactaacagagtcttcagatcacagattggtgatgacgctagcatttcaatgtctgtttcaagacaattgtacagatggagtgtggaagaactaagactcgcgtctggggcagaaggagtcactcgtcttcagcaccagctcaaactctgcagtgcttatagtggtgttcctggaaaccatagaacaagagatgatattggggagcccttggcaacatcataccactccaagttcatgggaactgttgattatatctggcattctgaggatcttattccagttagagttcttgaaaccttgcccattgatactcttagaagatctagaggactccctagtgagaaatggggaagtgaccacctagctgttgtatgtgaatttgcttttgcaaacaatgccaatgtatcctgatggcctcattatgcaattccaacgctgtgctgaatgatctcattcttaattttgtttacaaagagtatgtatgaggtctgagatttaagctgatcaacaaatatggagatggagatgtgcaaactctcctttctagctgtgatgttgcttggaacatggaattgcttaaaaatttatcaagaactttctgcatagtgagcttgctaggtaacctctcattaagaggttcagagagcaattgatgtttttctaaagtattatgatattccaagacaaattggctgccatttccactaattattttttttatatagagttctatgcagcaccttcaaatagaaactccaattctccaaatatcatgtgaaatatttatcaattcatgagatattgctttttaggtctaacacccctaattacacattacactttgaagttttaaaataaaaaaaaaaatatggggcggctctt

SEQ ID NO: 96994 - DNA, 245 bp, Glycine max
  Clone ID: PAT_MRT3847_58598C.1
ttgttgcataacattctttttctttggggattgggttaagaaatagggtttttactgcttgaacatttattctttgaatccaatctaaaagcatatgtcgcaaaacaaaaaaaatattcttccgcccgccagaggacaccccccaatttattcctcccatatttacaaaattttgtgcacataacattggcgtcccttcaatttaatataaagggatttttggcttaaaaaataccatccccggc

SEQ ID NO: 96995 - DNA, 361 bp, Glycine max
  Clone ID: PAT_MRT3847_58599C.1
cttcgacagaacagaagataaatactttttcttcgaaggaaggcgattctaaagactggtcatgtccatgacgactctgatcttaaagaacaccaccttagaagagcttgcttaaactacacacttgaggaccacactcgatcattgggggagccagattattttgcaaacataattctgctgattcccctgcgaagccgcagcgtgcatgccctcatatggcatgccctggagcttctttatccacaacaggctctcttcagctcgaaaataggcggctcgcctcgctaatggcccacatgaccaaccaccacatatgtgaatctgagcctttaccttaagccatattccatatgaactc

SEQ ID NO: 96996 - DNA, 610 bp, Glycine max
  Clone ID: PAT_MRT3847_5859C.1
ccgggaactatcttctgggtttctccgagctcctcccacttcagtccaaatgaatcacaccaaatttattaaaatcttgttttcatggatcttaaaagcttgtttcatggggctagctttgtttgccacggtgacatcatcggaggaaaaagtagaagacccttcaagtggtcttttctgcatcagtgattgtgccaaatgtcctgtaatatgttcaccccctcctccaatgctaataacaccaccacatcctccaacatcaccttccgttccacattctccaccactatcttatttgtcaccacctcctccaaaatcacaattaccaccacctccaccaccatcaaggattgctccaccaccacctttcaagtcctacaacacgccaccttcaggtttgacacagccacaacctacggtgatctcagcgccacatgacttttcctatccctattactatttttacgcttccggtgctgcttctctctcatttcatccacccttttttggtcttgttattgttcttaattgggtattctgttgttggtgaaatgtgttaattatttgagaaaaagcagggcttctcatcaatgtatttgttttcctacgc

SEQ ID NO: 96997 - DNA, 459 bp, Glycine max
  Clone ID: PAT_MRT3847_585C.1
ccccgcaagcggggcgaggtgaaggacgcccagaaatataataacagagcggaacaacaaagagtggtgatgcgctaggaaactaggaaagtatatagagtaggaaacggaagaaaatagacatgttgaggacttggagaaagggaagagttaattaaaaaataagaagaaaactaagatctaatgcaagtaaactaaaaactaaaatacctgatacaaatagacgagggttacttaaagagtgacgacgaaaaggaaagcaaagaactttgtaagcaaaactatagagaaaactgtctggataagataaactaaacagaaacgtataatggaagaaaggttcaacaatagaaaaagtaaaaaaattaaacaactagatgtaataagaaaataattctacagcaattcagaaatatattaaatgaaaaaagcaactaagaagctaaaaaagagaataag

SEQ ID NO: 96998 - DNA, 349 bp, Glycine max
  Clone ID: PAT_MRT3847_58600C.1
ggctcgagcagacctaggacaaaggctctcctctccccgaggaaagaagcaaagggaggctgctgagactagcttgaagagaagtcaggcgaagaggtagctgcagaccttgctgatcctgctgcttgaactccacatgagccacaggacatcatgactggtgtacaccctgcaccgcgagagtctctcgcctctgaacaaggagcaccaggagctgatgatggtgctcaagagggcgatactccagctgcacaccctctacattaaagcatatgattgtgaccaaaccgaccatgtgaaactggctgaatgatcactgggcccagcacactatgagccctttgacatg

SEQ ID NO: 96999 - DNA, 2002 bp, Glycine max
  Clone ID: PAT_MRT3847_58601C.1
tacctgccattttcccgggcaaaggaagaaacgaataacgctcaagttaatgtggttgtatcagacaaacagcttgttaaacatttacaaaaggaagttgcaaggctggaagcagtgttgcgcactcctgatccatctaaagaaaaggattggaaaattcaacagatggaaatggaaattgaagagctgagacgccagagagatcttgcacaaactcaggcggatgaattacgcagaaagcttcaggatgaccagaaggtctcaaacccagttgaatcaccacatctgccagtgaagaaatgcctgtcattcactggtgcactatcatcactaaaaccagagctaggatgtgagagagtaagaagctcaacattaagacagtcgatgaggcaatcctctactgctccttttaaccttatgcatgaaattcgaaaacttgagcacctaccaagagcagctgggtgaagaagccaatagagctttggaagtattacaaaaggaagtggcatgtcatagactaggtaaccaagatgcagctgagacaattgcaaagctgcaagcagaaataaggggaatgcgtgctgttaggtcaaccacacccaagaatgttgaagttggaagcatggtttctatcaacaagagtgtcagtgctaatctcaaggaagagattacccgacttcattcacaagaaagcaccattgcaaatcttggacagcagcttgaaaatgttcaaaggtccatagacaagttggtgatgtctctcccgaacaacttccaacactcacccagtgaagcatcccctaagaataaaaaggaacacaaaaggaaaaagttgcttcctttgtcttcaagcaatgctgccaatcgccaaaacttcctaagatctccctgctcaccattatctgctacgcagcaagttttggaatctgatgttgaaaatagagcccctgagaatgatgatattgtttcaactgatactcttcctgagtccgagaaggagactccatcaaagagtgaagaagctggagatgtttcatcaaaggaaaataccccagtttatcgacgctctagttcagttaacatgaagaaaatgcagaaaatgtttcagaatgcagcagaggagaatgtaagaagtataagagcatatgtgacagaattgaaagaacgtgtagccaaactgcagtaccaaaagcagttacttgtttgccaggtgcttgaacttgaagcaaacgaagcaaatggccacaacatagacaatgaagagtactcatgtgaaccggaggagccccagatttcgtggcaaatagcatttaaagagcagcggcagcagattcttgaattatgggatctatgttatgtctccattattcacaggacccagttttatttgttattcaagggagacccagccgatcaaatatacatggaagtagaactaaggcgtttgacatggttgcagcaacacctagcagaacttgggaatgcaagcccagctcctcatgttggagaagaacctactatctcattgtcttcaagcattagagctttgaaacgagaaagggaatttctagccaagagactgacatcacgtttgtcgctggaggagagggaggcgttgtatatgaaatgggatgtccctcttgatgggaagcagaggaagatgcagtttatcagcaagctttggactgatcctcatgaccaaatccatgtacaggagagtgcagagatagttgcaaagcttgtgagtttcaggacaggaggcaacatgtcaaaggagatgtttgagctgaactttgtgcttccatctgacaataggccatggttgatgggctggaatcacttgacaaacttgcttaatttgtaatggatttatgtttgtaaagtaccattaaaatcttgtacatgctcattattttggcgcttttctctattcaaaattattgttttggactaaaaaaaagaggggggggggggagggggggggggggggggggggggggtg

SEQ ID NO: 97000 - DNA, 411 bp, Glycine max
  Clone ID: PAT_MRT3847_58602C.1
attccctatcatttttaaaaaaatcataaatttattttttttaaggcgggttattttttgtaaccttctcaacaccccatctgttcaaacccctttaatctgtttaaaaagattttgaaacctttaagggttttgtatcaaattttaccccagtaaaagggtccaggggtgaataaaggggtttaaaataagataaaccggggtctggtatcatggggaaaaaaaagggaaaagggttttttgatcagggagttttgattaaagggttcggaaaggccctacccccggggattttttcggatgcctcaaaggccgaccttttagatgtttatttcgcaggcctcaaaggcaaaacccttaaccttgttcacccccaataattaacttatttgcggccttatggaaaaattt

SEQ ID NO: 97001 - DNA, 293 bp, Glycine max
  Clone ID: PAT_MRT3847_58603C.1
ggctcgaggacacatacaacgggcgttattcgagatgatagattgaaccattgctttttggctatcagatgcattgaacaatagcctttgcatgcgaatctctttttgagtcttcagtagcactctacaagaccttgcaagggagaggtacaatcaattttgcaagctactgatggttcacctgtgcaatgcatccccaccagcacatcatggctttccatcaaaactcgtctctatgctatgaagctcctagtcacctagagaagagccgatccaacgagtcggagtatttt

SEQ ID NO: 97002 - DNA, 264 bp, Glycine max
  Clone ID: PAT_MRT3847_58604C.1
ggaaactggaagcagttttattttgggagagagagagagagagagagagagagagagcaataaatccaagttccaagcaggaaggggcccagggaaaaaagcttttgtatttttcgggggcacaaaattccattcccttagccttagcaaagaaaagcccctctactcggatctcattctgtaaagcgggttgagggccggttgcaaaatgttgaacaaaacccaaacaatcgggggggaaaccacaaacagaaaaagctgccc

SEQ ID NO: 97003 - DNA, 257 bp, Glycine max
  Clone ID: PAT_MRT3847_58605C.1
acactgtaaaaagttgactctgtttatgttctttttatttttatcttcatttcacaaaacatgaaaaaagagcacagaatatatttattcattaatacaaaacaaaatgacaagaatttcatgtttaaacatataatatgacaacttaaatacaaaggagactaagcccaccatggggcaaaacctgttctgaaacccgggcatcccaaggaacaaacaccacctatccatcatctatatcacaaaaagctaatgcc

SEQ ID NO: 97004 - DNA, 295 bp, Glycine max
  Clone ID: PAT_MRT3847_58606C.1
attaaacagctagcgcgaccacaaaataatcatatttgatttagaacttgggaccatgaagcaagatgcaaaatacgaggtcccaatcactagaatgctcaccgtggaatacccaaaaaccgggcccctcacactaatgcctgcaacataacaagattttatttcaacatttgaataaacacctaatggcagaaaataacaggcgctgaactttatgaatactgtactctacgtcaggcatcccaaagatattatctcaattaccaagatccattgtgcttttgcaatacactct

SEQ ID NO: 97005 - DNA, 256 bp, Glycine max
  unsure (1)..(256): unsure at all n locations
  Clone ID: PAT_MRT3847_58607C.1
aaaattaaaacattttttttnggaaacgaaaaataatataattaagatatatatgctaaaacaaacaaggtcgctttcctaactgaatattccattctattaatacataaatcaaaacgaaagttacaagaaaaaaaggtgggaatcatgaaatgcaaatttgactatatattttacaataattcaaaaaagaatacatataccacttatcttaaagaatcaaatattttctaaaacccccataacacaactttta

SEQ ID NO: 97006 - DNA, 218 bp, Glycine max
  Clone ID: PAT_MRT3847_58608C.1
gctaaatcttattttagcaatagctacccgtatcacaacggtacgtgtattaggcaaaaacacgaaatgggaggggataaagagcagcctaagaatgaatccgtgtggaatcccgaggaggccgccgtatcctccaggaaagacgacagacccattccttactgttacatactcgacttgcatctcacgtgatgcgccatggacatctaacgcacatg

SEQ ID NO: 97007 - DNA, 165 bp, Glycine max
  unsure (1)..(165): unsure at all n locations
  Clone ID: PAT_MRT3847_58609C.1
caccngagangaatttgttcccgnccgcggcgcgcagaccgccnccacagccanggaaacaagaccctccaganaccagagcgganggcggccccggaggcacccaagnactngacacccagaggngcgcccaactcccaaaaggaggaaggaaacgcgccaagc

SEQ ID NO: 97008 - DNA, 785 bp, Glycine max
  Clone ID: PAT_MRT3847_5860C.1
ccacgcgtccggaacattccagaacccctctcttcccgcatccgagaactctctagttgtacttttcgttttctataagcccttccggctctccttatttttcccacttcatccaatcaaatcaaatcaaagtcattcacctaaaccctatggccgacgaagccaaagccaaaggcaacgcagccttctcctccggcgactaccccgccgcaattcaccacttctccgacgccatcgccttggcccccaccaaccacgtcctctattccaatcgatccgccgcatacgcttctctccaaaactacaccgatgccttagccgatgctaagaagaccgttgaactcaagcccgactggtccaagggctacagccgtctcggcgctgcgcatcttggcctttcccaatacggcgacgccgtttccgcttacgaaaagggactcaaaatcgaccctaataacgagcccctcaagtcgggtttggccgatgcgcagaaggccctggccgcggcctctaggccccgctcctcggctgctaatccttttggtgacgctttctctgggcctgagatgtgggcccgtctcacggcggaccccaccactagggcttaccttcaacagccagatttcgtgaagatgatgcaggatatccagagagatcctaacaacctcaacttgcacttgaaggaccagagaatcatgcaggccctaggggttttgctcaacgtcaagattcaaacacctcccacgggggctgacaccgatatgccggattctccgtcgccctct

SEQ ID NO: 97009 - DNA, 548 bp, Glycine max
  Clone ID: PAT_MRT3847_58610C.1
aatgggccactttagctcattcccccagaaaatttccttaagggaaacccccccaataacccaaaacaacaaacctttgaatcagcttagtggggccatcaagccacaccaacattggcaagagattcaattgaacaaaaaacaaaggccccggggctaaaaaaaagggaacactttccattttacacatgaaccatcaaagggggggggtgaaacagttcccgggggggcccccaaagagggaaggggggggaaaccccccccccgggggagatgaaccttgggagagggcccaccagggaaaaagttgccacagttttgcccatccgcgcgaggggaattggttttgaaacttccaagaattcccgggggaatttggttatcaacaggcgctggggccggggcaggggcaggggcttttgctgtacaagggacaagggctgtttcttctgctggggctggaatttggttttaacccgggggggaaggagccctttctttttgaggggcgaacacccatttgcacctgggtgggagggccccccccc

SEQ ID NO: 97010 - DNA, 391 bp, Glycine max
  Clone ID: PAT_MRT3847_58611C.1
aaaaaaaaaaaggggggaacttttgggtaatcccttaaaaaaatggccatgggtaaggggcccgtaaatttttttgttcataaccccccccccccttaaaaaaaaaactttgccttttagggcgctttttaaacaagtttttcccgcaaacctgcctgtcccaccttggtacttttaaacaaatttgggggccccttctttccccctttggttttgcggccctttaaggggacagcccttttaaaaacaagtttttttgatggggagtcccgggccaccacaaaaaagcctaatttttaaaatgggaaatgggccccaacttttgctttttgttgggaaaaccccccttttgcatggggaattatccctttggaattggggttaaaacccc

SEQ ID NO: 97011 - DNA, 2104 bp, Glycine max
  Clone ID: PAT_MRT3847_58612C.1
cacgcgtccggttggaggtgtttctctctgtctccagactccaattagaaggttttcatttaacatttatttcatacccatcgctttctccttcttcttcttcttcttcttcttcttcttttctccgtgtccaacaatgggcaccgtcacctacagctacaaaatgttcaagtacttcaatagaaaattcgccgtctccaagcgggcccctccgccggacgtcaaggaggccttctccgccttctccgacgccgctgccgcatccatgtccgccgaccagctcctccgcttcctgcacgatcaccagcgcgaaacggactgctccgctgaggattccaaccgcatcctcgacagcatcattcaatcgcgcaaacaaaacgacaccaatgccgaatgcgaccaccacaccgacaacaacaacaatggtctcagcctcgacgagttcttccgtttcttgttcctcgtcgatttcaacgatcggctcaaatcccaggtacatcatgatatgaatgctccgttgtcacattatttcatatatacagggcacaattcctacctgactgggaatcagctgagcagcgattgcagtgatgtgccaatcataaaggctttgcaacgaggtgtgcgagtaattgaactagatttatggccaaattcaactaaagatgatatcgacgtagttcatggaaggacacttactgctcctgtctcacttatccaatgtttaaagtccataaaagagtatgcttttgctaaatctgactacccagtcatcataactttagaggaccaccttacaccattccttcaagctaaagttgcagagatgatagctcaagtatttggagacatgctctattttcctcaggcagattctctgacagaattccccacaccagaatcattgaaaggtcgaattcttatatcaaccaaaccaccaaaagaatatcttgaatccaagcaattcaaggatagtgacagtgagagggaatcaactgaagaaggatcattatccccatgtgttatccctgaattggaggctgttgatgagaagttaaatggaagtgatcttgatgaggaaggcttgaatgctcgtgataaaaaatcagaccaacagagtgcacctgagtacaaacgtttgattacaatccatgctgggaagccaaagggtcatgtaaagcaccacttgaacaatgttgggggcgtgaagcgcttgagcttgagcgaacaggaacttgaaaaggcttctgctacttatggatcagatattgttagatttacacagaagaatattatcagggtgtatccaaagggaacacgtgttacctcctcgaattacaggccacatataggatggatgtatggagctcagatggtggcatttaacatgcaggggcatggaaaatcactctggtacatgcaaggcatgtttagagcaaatggcgggtgtggttatgtgaaaaagcctgcatttctaatagaaaaaggtccacataatgaggtttttgatcctaaaagagcattgccagtgaagaaaacattgaaggtgaaagtatatatgggaaatgggtggagctcagatttcagcaaaacacactttgattccttctctccaccggacttttacacaaaggtttgcattgttggagtaccagctgataaagccaataagaagaccaaggtaattcaagacaactggtttcccgtctgggacgaagagtttgaatttcccttgactgttccagaactagctttgctccgaatagaagttcgagaatatgataagcatgaaaaggatgactttggtgggcaaacatgtttgccaatctctgagttaagatctggtttccgtgcagtccctctatttgatcagaagggcgagcaattaaaatctgtaaagcttttaatgcggtttcagttcaaatgaactacaaagattagccattatttaggcatgtaacatgatataatattcctaggtggttttccttttgactagtgtgactaggggcatcaagaagattgttttaactatattatgggcttaagaggtttatttatctaacttaaaaaaaaaactcgagcaaaaaaaaaaaaaaaaaac

SEQ ID NO: 97012 - DNA, 265 bp, Glycine max
  Clone ID: PAT_MRT3847_58613C.1
cttattctttaaaaaatatttttttcatttatgtattgaattgtactcaattttcatgttacaaatttgtgctgtgggactttaagtttgactttgttggttttgctgtaactcattttcttgtaaaaagaaaagcagagaaacatgtgttaaaactttatgtttaaaaaagcatcattgggtgtgttctgatctggatcactgttattgtgggaattcaggaaagttagggatttatattgttgtttttcatatatttgttcaa

SEQ ID NO: 97013 - DNA, 287 bp, Glycine max
  unsure (1)..(287): unsure at all n locations
  Clone ID: PAT_MRT3847_58614C.1
tttttaacctagctgggccccctatatccnatcgacttaagattttcccaacttttccatctcctccccttcattctgactgtaagaccaattcataaattcttacttcaactcataaacacaatgcaatccctgatcaattgtaacatcatccaccttttaaaaatactgctacatatagctacattatcttttacctaattaatcaccatcaaaaaaaagctaagactcaaacttctttaaccaattcaataattatctcatcatcatctaacacacatattaaa

SEQ ID NO: 97014 - DNA, 472 bp, Glycine max
  unsure (1)..(472): unsure at all n locations
  Clone ID: PAT_MRT3847_58615C.1
tgtcgactctagaangtttctctcatatgtattcacatgcttcctccccacaactttggttgagcatgttctgtctgtactctttctacatgccatggtatgtgttgggttatttaactcttaaaaattggtgttgatcttattcaccaaacaccattctacaattgcctattttgcttatgcaaatgttactttcgttgagacaccccactttatattcctactactaacaatatatatgtgctcatgacctcacattccttcaatatgaatttcactcttgagttagaatttggattgataacattgtgtgtccatctaaccactacaagtgtccttgctgactcacccttctgctttagtgcatttaactactgtgaatcaattccattcctatatgtcattatctttgtttacagcatttcattcctattgcttctcctctttattttaatcttttatggacattttc

SEQ ID NO: 97015 - DNA, 889 bp, Glycine max
  Clone ID: PAT_MRT3847_58616C.1
attttggactagcagtatggggaccaacaacttcatcctttttgacccaagatgtagttggaacatttggttaccttgctcctgaatacttcatgtatggaaaggtcagtgacaagatagatgtctatgccttcggtgtagttttacttgaactaatatcaggaagggaacctatcaactcggcagcttgcaaaggacaggagagcttggtcgtgtgggcaaaaccaataatagagagtgggaatgttaagggcttattggacccaaatttagaagggaaatttgatgaggcccaattgcaaagaatggttttggcagcatctttatgcatcacacgggctgctagacttcgtcctaaactgagccagatactgaagatcctaaaaggagaagagaaagttgaatatttcttaaactctcaaggagataatgatcaggaggattcagaaaatcaagaaaacattgatgacgaagtgtatccaaattcaagtgcagagttacacctaagtcttgcattacttggtgttgacgatgacagtacatcacatagtagcacagaccacagctatagtgaagacttgaaagaacaatggagcaggtcatcaagttttaattagttttcttcaatttctaagttcctaacacctatttcgtcattagttttgtgcgtgtacagttacgttaaaaaaacaacaaacgcgaaaacaaaggagttgcgccccttgatgaggtggtttgtagatttagaatggcagttttcttttgaatttatcagggaacaatgtactaatttttggatttatgcacaaatcatataggcaatggttgaaatataatgcgacttttatttctcttaccaattcaaaaaaaaaaaaaaaaaaaaaaaaaa

SEQ ID NO: 97016 - DNA, 411 bp, Glycine max
  Clone ID: PAT_MRT3847_58617C.1
tcgtttttcatgcccctagatgaaaaaattctgccgagcgttgaacaggatatggaggaggaatgccaggattgtgttgataaggaggatctcttacaacaaggttctctaagggcagcactcaacggtgtccagggctcggactatatggaaagaattcctttcgccacatctgagggttttcctcatgagctttcacgcaaaactgttgaaaaacgcaaaaggagatttgtttctctgcatggtcaagagatgacatcaattcccggaaccactgttgaagaagcttacaacaagctaatagatgaacttgagaaaagtgatcctacattgatcgtcattgaatgacccaaggatgagaaactctctctttcacaatggtgacaaacactagacacgctggttcactat

SEQ ID NO: 97017 - DNA, 245 bp, Glycine max
  Clone ID: PAT_MRT3847_58618C.1
tatgaatccagcttggtaggggaaatccctgaagccattggacacatggtggcattggacgaattggatttgtcaaaaaatgatttaagtggacaaattcccaatgatttgttcatgctgaaaaatctgagcatactgtatctttaccggaacagcctttctggggagatacctggagtggttgacgcattccacttgacagagctttctctttcacagagtagacttagtgggccgataccaga

SEQ ID NO: 97018 - DNA, 710 bp, Glycine max
  unsure (1)..(710): unsure at all n locations
  Clone ID: PAT_MRT3847_58619C.1
cccacgcgtccggtcgtttaacattcttctctcccaagggtttgaacctcagttgtctgattttggactagcagtatggggaccaacaacttcatcctttttgacccaagatgtagttggaacatttggttaccttgctcctgaatacttcatgtatggaaaggtcagtgacaagatagatgtctatgccttcggtgtagttttacttgaactaatatcaggaagggaacctatcaactcggcagcttgcaaaggacaggagagcttggtcgtgtgggtaagacgaagccccatttacaagaatgaattttgacttctgttaatgatataaaaatataagaataatgttattcttgcaattcctgtcacaaatcacaataccagtaccatttataattaggagagagagggaagtatagaataagataaaagatgtgacatacagaaaaaatgaattattaaaaagtatatataaaacattgtgaaaataggaatactcaaaaagtataaattcttctaagaattataaacaatgatttcattttcaggcaaaaccaataatagagagtgggaatgttaagggcttattggacccaaatttagaagggaaatttgatgaggcccaattgcanagaatggttttggcagcatctttatgcatcacacgggctgctagacttcgtcctaaactgagccagatactgaagatc

SEQ ID NO: 97019 - DNA, 397 bp, Glycine max
  Clone ID: PAT_MRT3847_5861C.1
cactatcaagattggaagtttatgatcttgaactttccaaccacaatcacaatggcgcgtcgtagtagtatggttctccaaggcttgcatcaattggtatagaagccttccacatgtctctcaattgcaaacaagtgttgcagggggtgatgcttgggctacggatcatatgatggaacattatgatccaattgcaaggtatataggacttgagtcctgcatcaaaagtatgggatttgatgtgggatcattatatggccttgggatttcttcgcacaatggttagcttacctatatgtactagggtcataaatgcttttagatcgtcgaccgtcaggtaaagccgaatatatacataacattgatttaatctcttctagatataacagaacctttt

SEQ ID NO: 97020 - DNA, 465 bp, Glycine max
  Clone ID: PAT_MRT3847_58620C.1
gcaaccatcatgaaagcactccatgcattatgcttgtataatcttgtgctagtaacacccagactcttcttgcattatttttgtagccgtttgcaagataagactcggtggatatcactgatccgattgccgaaacatcttcttttttgccccttcacttcttacaagaattttcaaaactggttattacaaggtaacaataaggctagtcgttgggaagaattttttctacgacttggcagggaaccctctgtttcctttctattggaaacaatgccctcgatggtatgacaagtacccaaaagagcttttgagcaccgacaaacgccaagacctcgaaacactctcttggaaactacctgcttgacctttcttgtcacttcttcaatccctagatcctgttttggatcttgaggatcgctgctagtggaggtccttctccgaacccccctctcaactaaacat

SEQ ID NO: 97021 - DNA, 423 bp, Glycine max
  unsure (1)..(423): unsure at all n locations
  Clone ID: PAT_MRT3847_58621C.1
tacctaagctcggaattcggctcgagcataaacgcccanagcgcatggcgactttcgactcctaaaaccaacgtcgttttcatagacaccaacgtcaatacccgcttgggcctcgtcggttccgacctctacactgtctccaacctcaaaaagagtattctgtcggaacatcccttatgctttccgaaaattgggaaaattcagattcatgggataaaggttgagcgcaaggggtacttttaccaccttacagattccatgcctgtgagaagtgccttcagtggtgtcaacgagagctggtttctcactgttgatgtttctgtgttgagggagtgtgctcaaaatgaccaattattttctcttggcattgcaaataatgctttgactgttggttctccatccaagagggggtgcacctttgac

SEQ ID NO: 97022 - DNA, 341 bp, Glycine max
  unsure (1)..(341): unsure at all n locations
  Clone ID: PAT_MRT3847_58622C.1
gtttcancccacgcgtcagcgnccnnncagacanacgagnggngncncntncgnnnnganncgcngcccccagcnanngggnnctggntnctggagtgnngcnngtggtctgcngngncggagtgngctgantccggngcnntnngnnncngcngatnccantgcacncnngtngnnaggnatnngnnanatgcgcgncgcngnnctnggatnagcncccatcngnttgtnatcgncnnagngtganacnngtggcntntnnncctgcngaggnagnnannnccccctctcntggnaggctntnantgcntgtgtgttgnggngggcgngaggncaatgnn

SEQ ID NO: 97023 - DNA, 262 bp, Glycine max
  Clone ID: PAT_MRT3847_58623C.1
cgacacatttgtggtcgtggcaaaatcatggtcatggacctgttttaaaaccttgggaataagactgaagctgtcaatcccacacttgtgatgatgatttacatcatataaatgacaaaggattcacctctgtctctctgttttagcttgcagagtcacagatagatagtgctttttctcatgccaacatgttccgtgatgacctctattagagttatgggccctttatattttgtttgaattctagttagaggacctcagt

SEQ ID NO: 97024 - DNA, 181 bp, Glycine max
  unsure (1)..(181): unsure at all n locations
  Clone ID: PAT_MRT3847_58624C.1
gttganaatctgtctatggaatgtgagatttatncatgaatttagtgtntccttnncatatttggtnntggtgttcatatcattttggttgattgcactnacgagattnaaattactatgcaatnttatagtgcttgcgtcaagtttagccttaactgtttctctatcantctnantggaa

SEQ ID NO: 97025 - DNA, 416 bp, Glycine max
  Clone ID: PAT_MRT3847_58625C.1
aaaatggcaaaaggagattcgtttctggggatggtgaagagatgacattgattccgggatccagtgttgaagaggcttacaacaaggtaatcgttgaacttgagaaaagtgttcctacattggttggcattgaatgtgccatggatgagaaacttcctgggagaaaaatttttgacaaacctaatacgcgctgctacactattgtccctatggaggttaatattgaggtccagcagaagtttctaaataatgtgtggttcattatgaagaaaagggacaagcttaggtgccaagttggtattaacccatacttcatggaatggtctgttttgggcaatagattactgagtaagggcaacgatattctgtgttgcgattatgctagctctgatggtttgattaccaagcaagttatg

SEQ ID NO: 97026 - DNA, 762 bp, Glycine max
  Clone ID: PAT_MRT3847_58626C.1
tacgaattcgcgctctttacccggggatcctctagagtcgacctgcagaatttacatgtgcagttaaactgtcagaaatttctaagaaagcaacacttgaagaaatttcagaaagtgatgtagtcaatagaaactagagtacaggtgtagaggttgagtctgaaccagaaccatcaactcctccaagaaaatctagcagaatttcagtaccaccagataagtattctccttcattgcattatttgttgttaattgatgctggtgagccagaatgtttcagtgaggctacgcaagggaatgactctattgagtgggagctagcaatgaaagatgagatgacatcccttcagaagaataagacgtggtctttaaggaaagaaagcgttacaaaataagtgggtcgataggctaaaggaagaatttgacggtagaagaagatacaagacgagacttgtggtgaaagggtttcaacagaaacaaggaattgatttcacggagatcttctgtccagttgtaaagattactaccatcagagttattctgagtattgtagctgcagagaatcttcacttggagcaattagatgttaaaactacattcttgcatggggatttagaggaagacatttatatgacccaaccagaaggttttgaagtgccagacaaggaaaattttgtgtgcaagcttcataaaagtttatatggcttgaaacaaggaccgagacagtggtacaaggagtttaatgagtttatgagcaactcg

SEQ ID NO: 97027 - DNA, 407 bp, Glycine max
  Clone ID: PAT_MRT3847_58627C.1
ggttgccgttctttcaaaccggcaacaaaagcaatcgagactggattacaagaatgcgtaaaacaatacctacgttggtgggtgcgagtccataagggatagaaaagcactctatgtgctggccacaaacttagcgaatgattttgtcatcgatgctaagttgacatgctgaacacttttgtatgcgatatgggactacgcgtgagattcaaactctttctgtttgttcaccagtactcagtctaatttgaagctaaaggtggtgaaacaatggattacagctcggacactactatatggtataggacttcgggggaagactttgcaatttctctactgcctttcactctggtggaatcactgagcacaatagccgatcatggtggacggatatgcaaaacacttga

SEQ ID NO: 97028 - DNA, 214 bp, Glycine max
  Clone ID: PAT_MRT3847_58628C.1
cgaccaaaaaacacacacaccagtgcctccgggctccgcacccaacgttttcttatctaaacaggatggaaaattggtaccaggacctcttttgcaagataggcctaaaccgagggcgggtttccattaaccacagcaccggttcaataaggtcccttttgcagaggagaccttaaccctgctcttggccttactggaaaaggcagacgttttt

SEQ ID NO: 97029 - DNA, 407 bp, Glycine max
  Clone ID: PAT_MRT3847_58629C.1
gagaaaaacgccttttaggaaatcacaaaaaagggagttattttttctttaaattatatatattatatccatctttccctaaatttatcaaaactcctttaattatctcttaacctactatttatctggaaacttaacccttgaaactatatattcttttaaaacactcacgaccactaacaattaaaggaaactctataaacatataaaggaacactatattaaaattattactgttatgtcctaaaccaagcattgatccgatttatctctttatctttagaatcaatttttttttctttctaaaaccaaaactaacctcttctaccaaatacaaacttaacaacttgtttataatgcaaaatattgccaaaaccagaaccttcacaaatgtgggtacatttacc

SEQ ID NO: 97030 - DNA, 448 bp, Glycine max
  Clone ID: PAT_MRT3847_5862C.1
ctgcccactctctcactcctccactctctctccttcacatcctgaaggagctctctttgactatgtctcgctttgtctctctcactgtctctcacgctgtctctctcactctgtctctctctctcgctctcattctctctcgctcttccttaaacatgatcccagtcatttttaacatgcaaatattttgcatacacagtgtattaagatttgttgtgtcaatgtcatgcattgttatgagatatcaaagaaagattcaataagcccaatataactctctttggaaagtctatcctattcctatccttcagatttgagagctatatatccctgccaaagtaagattcaagagacttaaacttccctactaaccgtttttagactcctctaacattaaaatcagttcccttctagtggttggggaaggagataacttccattacttttg

SEQ ID NO: 97031 - DNA, 344 bp, Glycine max
  Clone ID: PAT_MRT3847_58630C.1
cattaaaaaagggggttttgggtctttacattttattaacccaccactaccattccccttcccgctcaataaggaaattaatattatcaaaatgacccaaaaaaacaaacaccggctaactagatacctttttatgaaggttataaacccccccctcccccaccaaaaaccccctcattaactttgtttaatgtctaaagacaaaacacccaacgctgcccatctccttataaaattattgtttttcaaccccccacaaaaaaatacaaaaaaaatgcaaccacccctcacctttccattggccctgcttttttttttaccaaacaaaatacaaaaatcttttg

SEQ ID NO: 97032 - DNA, 369 bp, Glycine max
  Clone ID: PAT_MRT3847_58631C.1
aggagagacaccaacaactgcatattctttcttttcccaaactattgctccctctatttgtgggtactctgatgatgatagactaagatatttctatcatctgttttactttcccaaacttttacttacaatttactccccaactatcatattatattaaatgccttactctattacatacttctaacacatttaattatcacatacaactattccatttcactctatacaaaaattgactacactccatattaggcatccaaacgactctttacctttctactcttatcaaaactaatttttttcataatcataaatcaactttccatattctgctatacctcagtaatatatattttacatattaac

SEQ ID NO: 97033 - DNA, 281 bp, Glycine max
  Clone ID: PAT_MRT3847_58632C.1
aatattttaaaagaaaaaaaaaaaaagaaagaaaaaaaaattgaataagggggtgcccgttttggaggagccactattgctgacgcgtacgtgcgagggcgacagttttatagtggtggagctaaatacaataagatgaccgcatttgacaacgtagttacgggaaaaaccggtgtaaccccaaatgagttggaatgattgagaaccgcgttttgccaggtggagtgaaagataacaggccaccagctgtcgtcattgcaacaaggtgcgaaacctgaatg

SEQ ID NO: 97034 - DNA, 432 bp, Glycine max
  Clone ID: PAT_MRT3847_58633C.1
gttattctgatgaactgagagcatggggtggcgcaccttatagccggggacatacgcattcggtacttgattccaagaatctctcaatttgttcctactttgttgggtacgatggcttaagggaaagaaaatcgactctatgtgctggccacagacttggagaatgattgtcttttccattcttagattatttgctgaacactctcctatttgatataggactgcgtggcagatttaaacttcttctggtactttttcagttgtctgattaatttcaggatcaagctggtgaaatcttggattagtgctcccactctcctatctggtgtaggacttgggggggagacttggctatacctctcgttcatttcactctcttgttctcactgagccgcattgacgttcaaagtggtgttatatgatatacacttg

SEQ ID NO: 97035 - DNA, 691 bp, Glycine max
  unsure (1)..(691): unsure at all n locations
  Clone ID: PAT_MRT3847_58634C.1
tggagatgaatctaatgccttcactctttcggccttttccgcgctcacatttttgtcaggatatgcctgccagggaaggttcgcttctcggtcttccaaagctttggcttaaaccaatagaaaaaccggcattctacattcaccagaggaacgctatacgcatatataaatgcctctttttttctacttgctaagtttttttttaatcagcaaattgaatactatctcctcctccgatcttatttataagaaataagttctaatctattttacggtataacttgtttcttatgtataggatcaaatgtgttataacttatatatatatatatatatataaaagaagaaagttagttagtatataataggaataggtacttatcatgaaaagtattacaatgaacactcccagaacaacctattaaggttatgacatttaaatgatgcaaccataaatattcacataaatatttggatacaagattaaaagtttttttttttacagttttttagaatttttctattgaaaaactatatattttcagtagaaaacctgtcaaaaacacatttttttttatccaaacgggccttaataaccctgttgctacttgctacgtaactcgtataatcactttatcaatgngtagntgtgttaaaatcctttggataagcatcacattttgtgcaactg

SEQ ID NO: 97036 - DNA, 834 bp, Glycine max
  Clone ID: PAT_MRT3847_58635C.1
tccgggaatgttatttaaggacattcattagttgaggaaggttgctgattgtgacaccagagaattcactgatcagaaaagagaggagatgttggtctcagattttgtagcacgttgccttctgtgtaatgatggagtaccctgaatatgtagcatacgtcactccaatgttctcttctgatgactggctcaaccctgtatcttgacaacttcagggattcttctgacgcacaccaaccaaatgaggaaatatgttgctctgactatcaatttgttttcatgggggtgaaaggtgtgattataggtttcataaattcttctagtagagcaatgcatatcagattattctgtacttccctttacagagagatgaaaaacccaccagtaacgtctttctttcaattattctggcaggatcttggactcctcttcatgttgatgtttttaggtcctatagctagtaagcaaatgtctgtggaaagaattgatggctttttctagatccttcccagtgtcatcttgtatttgacaggcatgaatgcattaccaaatagaaataaatggcatcttttctaaataagaatttgggcacggataaaaaaatctatttggatccatcaatacttagtctttttccaaattacctatcagctatgatttactatttaccccccatctttgccaaacttcttattcttagaagatgacattcccttattcctctcacattctttctttgtttgggttcgctctgcataaaaggaatcattgttgcttcttttttttgttggtttttcttggaaggtgggtttggattgctttgatgtgttgtct

SEQ ID NO: 97037 - DNA, 448 bp, Glycine max
  Clone ID: PAT_MRT3847_58636C.1
gccacaccaccaaatggggtggctgcaatccctcctctctccactcaagaagctttggttccagatgcattccactcacaagaagagaagagggatatacattctatatgaagatgtcaaatcttgcccctatgaagacgtgcacgtcctctggtcagtactagtggaatcacattcttcttcttagccattgaaaaaatgagggctaagcacataacagaatcgatacgagctagtaaagttcatacataaactatttatgatgtccaaacactgtttttctctttttccttttatttgtttttaacatttgtagcatcaacacataggatgattctcttcgattttttgttttatttttttgtcgtatgaagcatccattaagagcttatttaaacatccatatttcattttcctccttgaatacttcaatacctgcttgcaaaac

SEQ ID NO: 97038 - DNA, 172 bp, Glycine max
  Clone ID: PAT_MRT3847_58637C.1
cactcaccacttccttgcattccactcccaatcattatcaacagcttattttccgaaattcaaaacacacacactttcttttattgcgttttcagaaaagggatggggctagggcttggctcactcatggctaaatgttcctcccatccggtatagtcctcggagacgtaaa

SEQ ID NO: 97039 - DNA, 1228 bp, Glycine max
  Clone ID: PAT_MRT3847_58638C.1
cttacgcgtccgcccacgcgtccgctcaatcgttttctacataatacaaacctctctaatttttgaagcttattatacccaatctcgatatgcagatcttcgtgaaaaccctaactggcaagacgatcaccttggaggtggagtcctctgacaccatcgacaacgtgaaggccaaaatccaagacaaggagggcattcctccggatcaacagcgtttaatcttcgccggaaaacagctcgaagacggcagaaccctcgccgactacaacatccaaaaggagtccacgctccacctcgtcctccgcctccgcggcggcatgcaaatcttcgtcaaaacccttactggcaaaacaatcacgctagaggtggagtcctccgacacaatcgataacgtgaaagccaagattcaagataaggaagggattcctccggatcaacaacgtttgatcttcgccggaaaacaactcgaagacggcagaaccctcgccgattacaatatccagaaagaatcgactctgcatttggtgcttcgtctccgcggagggatgcagatcttcgtgaaaaccctaaccggcaaaacgattacgctagaggtagagtcctctgacacaatcgataacgtgaaagcgaagatccaggataaggaaggtattccaccggatcagcaacgtcttatcttcgccggaaagcagttggaagacggcagaaccctcgccgattacaatattcaaaaggaatcgacgcttcatctggtgcttcgtctccgcggagggatgcagatcttcgtgaagacgctcaccggaaaaacgattactctggaggtggagagttctgatacgatcgataacgtgaaggcaaagattcaggataaggaggggattccaccggatcagcagcgtcttatcttcgcagggaagcagcttgaggatggacgcacgcttgcagattataatattcagaaggagtccacgcttcaccttgtcctcaggctccgtggtggtgatttctagttcagttgaatcttgctaatgagatgtttcagttctaataataatttctctttcctttttccaatttctctgtcgtccttaggctccgtggtgtccctgtctagtttcggtactgtggaatcttgttaatgatgtgtacttcaattttattaatataatttcttcgttatgtaatagcaaattgttatttgtgtctgatagtattttttgctggtgat

SEQ ID NO: 97040 - DNA, 300 bp, Glycine max
  unsure (1)..(300): unsure at all n locations
  Clone ID: PAT_MRT3847_58639C.1
atcatccgtgtccttttccttgaagaanaaaataaccggccggggggaggtttgagactttcttccccgggtttaccaaaaagggtctcctatttccaaggggaaaaacaaaccatatgactgtttcggccccattgctacccaaaaaaggggatttttctccatacctacatgtccctggcttacttttttccttaccaacaaaaaaaaggggcccccgtttgacattaaaattttcaaacttttttttaaaaacacaccttgtggaaatgaaccagcttgttcccaacccgttcaaag

SEQ ID NO: 97041 - DNA, 690 bp, Glycine max
  unsure (1)..(690): unsure at all n locations
  Clone ID: PAT_MRT3847_5863C.1
caaaagggattggtcctgttatattattatcctgcagaagcacagtctggaggtttgttaagtttcctatgcttggtgagagagtgccagatatactttggcttggaatcccaagggcaatcacaaaatgatcagaagagcaagtgaccatggcccagttgcaaggatccacagcatcagtatcccagttatttaagacagaatgaggatccaccagagagttcttaatgctcataagagcttgaacttcatagttgacacctttaggagaaagcaaagcagccactgaagtccacaagaagaacaaagctaaacaaaagagagccacatccccacttctctccattgggttttgaaggatcaccagaaacttattacttattcctacaacaaaagtgaatcaagttgtatctttaagaggaggcaagtaaggagcaggttttgaatgattcagctagcaccaccaaatccaacttggtttgtttttgttacactgcatgtcatgttttacatcaaaagaggaacctcatcaaccaagtccaagaacagtaccatttcccacctgctttgaacccagaaattgcactcactcccacccttgtgtcagacttgttgagtcagagccaatggtaaaaaaaaagacttgaaagaaaacccgcacgcgtgggtcgacnccgggaattccggacc

SEQ ID NO: 97042 - DNA, 130 bp, Glycine max
  Clone ID: PAT_MRT3847_58640C.1
tcgcagtccgggactcacctgctgttggctcgccgttcaagaatggcaacccgttagaaagatgtccgcagagtctcatcctacttcccaaatgccaacgttcacccatccacccccatttctataccct

SEQ ID NO: 97043 - DNA, 1417 bp, Glycine max
  Clone ID: PAT_MRT3847_58641C.1
ccggattcccgggtccacgcgtccgtctaatcactggtccccaacacatcaccatgagtccttgtatcaagaagaacactagaagtactgaaattgaattcgttgatcagttagaagctggtggagaagaattagcacatgcagatctagtttctcccatggacaacacaacattgcagctgcatgcagatcaaaagggtagcagtagcactaacaagaggtacattaacatcaacatcaatatgccccttttggtgattaactatgcatgtctctttgtgggttcactttcttctagtttgctatctaagtactatttcacccacaagggttcaagtagatgggtttcaacttgggttcaaaccgcaggatttcctcttttgttaatcccaatttgtgttccttatctctttaaattcaccaagagggtaccctttaatgatttcacaccaagaatgttgattatctcaatttcaatcggagttatgttaggattcaacaaccttttcttctcatggggaaactcctaccttcccgtttcaacctcagcacttttgctatcttcccaactactcttcaaccttctcttctctgtcatcatagtgaagcaaaaaataaccttttcaaacgtgaactgcgtgatccttctcaccctaagctccatccttatagccttggactctagccacgagagaccaaaagggctaactcaaaagaactacttcattggattcttttgcaccataggggcaggtttgatgtttgccttgtacttgccactaatggagaagatttacaagaaggtgaattgctaccaaatggtgatggaaatgcagtgataatggagggtgcagcaacagcattggccatagttggcatgacatgggatggtggattttctgagatgaaggtagaaagccaaatggtctttgacaaaggaagcagagtttattgggtgacagtgatgggaaatgtggtgacttggcagctatgtttcatgggaactgcaggaatggtattcctgacatcttcattgactggggggatttgcatgacatttttgttgtccatgaatgtgttaggaggtgtcgtgttcttcagagatgcatttggtggtgtcaaagctgtgtccacttttctctgcattttggggttctgttcttatgtttatggcatctacaaggataaccaaatgggggaacacaaattagcttcaaccaggaacaagactattagtagtaatgcttcatccactgagatgatccacattgtgaattattgaactatatatgtgatatagttcacaatgtcatccgagtgtaattagctagattgacaagattgccaatcgttaattgtagatgtcaaaatgtcaatattctcctagttacatctatgtggatatcatgtacagtcg

SEQ ID NO: 97044 - DNA, 1004 bp, Glycine max
  Clone ID: PAT_MRT3847_58642C.1
ttagtataatttgtagcttaatagaataacagtgattttatttacaaaattaaaaaaaagatatgatataatacaataatttatacaagattatattatattttgtatgtatctctcacttcaatcttatcatttaaattaaaattggttatcctttgatctcttttggtttatatatacaagttgaaaaaatgatatctggaacactcagaaatgatttggcgggattaaaagagattagtgatcattgggcccttgatcggaagaggtggatgaatgaagggaagcaaagtctcgcaagatttggaggcgaggcaatacgagtgtggcaaggtctgggcggtcctttcgcctgagctgtgcacattggagagccaagtttgcaaggcagagggcttgttccagaggccagtccgggacagaggggtccagcatttcaccaaacctgtccttcttgatcgactcctcaacctggtgtgccagtcccatggcaggccttcccgtcaacaactgtagtagaattatccccagagagtatacgtctgacttcacccctagcattcccgtctgctgatactccggatctatatagcagaatgttcccgctgctgctgtcatgcagcattgcgtcccgttccccgccgttgctgccggtactagtttcgccaatccaacgtcacttatcttgctcacgtaattctggtccagcaatatgttccccggtttcagatccctgtgcaccaatggttctggcttcgtctgatgtaggaacagcaaccccgttgctatctccgctgctattccaaaccttaccttccaactcctcatctttccctccttctccttcttctttccaaacatacagtcttccaagcttcctttcgccatatattcatataccagtattccgtgctctgcacatgctcctattagcagcaccatgtttggatgtcttatgcaccccagtatgttcacctcttgctgaaactgtgcctccccttgag

SEQ ID NO: 97045 - DNA, 496 bp, Glycine max
  Clone ID: PAT_MRT3847_58643C.1
ggagcgaagtgaatagaagggaatgatagttatctatccgttatcgaccatggaaggattggcgctaccagttgcgcaatcgcaatcacaacagttgccgtttccaaggccaaagctgtccgccattcccgcaggcacagtttatggatttgtctctctcaaacgacaccgtggaagcgggtttcgttttctcacttgcttatgttcgcaggctcatgcccgtgcacatgcacaggcacaaggtttacctcttctcgagtaagtcacaatgacagaccctgacaactatgtgagtggggattccatacggcagagatttctgaattactatgctttccgtggtcacaaggttctgtccatggcttctcttgtcccatatgatccttctgttctacttaccatcgcagggatgctttaattcaatctctatcttctaggccagattatcagacaagtaccttgtgctggtactgctcagaggtgcattcgtactaat

SEQ ID NO: 97046 - DNA, 782 bp, Glycine max
  unsure (1)..(782): unsure at all n locations
  Clone ID: PAT_MRT3847_58644C.1
aataataataaagaaggttgataaaaacattacatggcagcaaccagcagaaaagcaagttgactataataatgaataatccaagcacatacggggggaaaatgttgcttcaattcaatctcaatttggctcctaaccatcagtacaacatatctttgttttttgtacactgaggcttttggcgccaccactattttcagctagaatgatcaaataacatagtgaccggaccaagtttaatgtacatttcccaaaaatgccaaaataaaaaatgtttttaataagactgaggctaaagttgcatatccccaagggcatccactctaaaattgaggatttggcaccatctttgtggacccaaggaatatataggctatgcaatccaaaattagtttgtaacttccaagtcattcaaagagtacacatataactacactccatgagctatcagcattgaagcactggggttaagctctaggaatgaaattttcttacatgatcgtttaacagctgttgcgatacacgatccgctaaatatgacttcccatcataaaaatctcttgggagtccctggccaaccctcctattatggtttccannnnnatcattattggacgaaactatatcngggcaagcannnntgcttttcnnnatcccccaaagtgggtcatgcattggctcctgataactttgaggcctttgtattacactgatacctncatgtgnnnacattggctgctttgtttgatgaaannggactgnnncaatgccaccnntgagcg

SEQ ID NO: 97047 - DNA, 1846 bp, Glycine max
  Clone ID: PAT_MRT3847_58645C.1
ctaattaccacattaaataaaaagttatttgtgtcccaattcccaaatcacccaatattcagagtggaagaaagaagagttcttcttcttcctttgtcttcaccgttaccgaacacagattcgtttttctccgaggtagtgggggcaccgaaaccacctgggtcgggtgatcgaacggggagagagccaaatcgaaccgaaaagtttcgaaattacatacataaagagggagagagaggggatgcaaattccatgagagcagaagaggtgcctcttactccgttacgagttcgacccctcctcttgctcttccttctcttctcttctcttctcttctcatatcaaagcaataatcctattagaatatggaagagagcttcgttttccagtggagcgttatcagatctctcttgtccatccttcagtggtgggccttcaatgtcactgtcatcatcgtcaacaagtggatctttcagaaattggatttcaagtttcccttatcagtttcctgtgtccactttatctgttcatccattggagcatatgtggtaattaagttgctgaagcttaaaccactgataactgttgaccctgaagatcgctggagaagaatctttccaatgtcatttgtgttctgtattaacattgttctggggaatgtgagcctacgatacattccagtttcttttatgcagacaataaagtcattcacacctgccaccacagttgttttgcaatggctagtgtggaggaagtattttgactggcgtatttgggcttctcttatacccattgttggagggattcttctcacatctgtaacagagcttagttttaatatgtttggattctgtgctgccttatttggctgtttggctacatctacaaagactattcttgcagaatctcttctgcatggatacaaatttgacagcataaacacagtttattacatggcaccttttgcaaccatgatcttggcgcttcctgccatgttacttgaaggcaatggaatccttgaatggctaaatactcatccatatccttggtcggctctcatcattatttttagctccggggtgttggctttctgtcttaacttctcaattttttatgtgattcactccaccactgctgtaacatttaatgttgccggaaatcttaaggttgcagttgccgtccttgtttcttggctgatatttaggaacccaatttcgtatttaaattctgttggatgtaccgtgactcttgtgggatgtacattctatggttatgtgaggcacaagctctcccaacagccacaagtcccaggaactcctcggacacccaggactcccaggacccctcgtagtaagatggagttgcttcctcttgtaaatgataaattagaagataaggtctagttcatttagctacatatgatgaggtttcagcctttttgaaggcagtaatagcaataggtacaaatacattaaaataacttcggttattatttgttagattacctccgaaatctttaatacaaggttctttttttccccccttcaacttttttagtgtctgtaatcgttataggttcaaatttattaaaataacttcggttatttattgttagtttttccccgcaatctttaatacaagtttttttttttgattgtatgcactgtaaacaccgacgaattattgttaatttattgttatttttgaaagtgcaaaaaaattccacgaaaaattgaaaaaactgtaaacacggacgataattgttaattaatggttatttttgaaagtgcaaaacgaattcctataccaataatttttctcgaaaaaatataaattaataaaaagg

SEQ ID NO: 97048 - DNA, 323 bp, Glycine max
  Clone ID: PAT_MRT3847_58646C.1
gggggaaaggaacctggccccttgggaattttaatttttacaaggccccttgacttcgggaacagttctttgaaattaaaatcccccgcccccctttttcaaagaaagttttttttcgggggtgggaaaccggggaatatttttttttatggggattggaaaaaactgtttttccaaacaaaaaaaaacatatttttttccgggattttctttcctaacgcaaacaaattcatggggttttggggggaacactttactttggggccctctttttttgtgaaatttttcccccggtttttttttaaaaaaaaaaaccccaaaaa

SEQ ID NO: 97049 - DNA, 456 bp, Glycine max
  unsure (1)..(456): unsure at all n locations
  Clone ID: PAT_MRT3847_58647C.1
aaaagtnttntgcagngagtgcggtgaacgntgagaggctgcgtgtaaatgtccgagccntngnaggttaananggatgntatnttggttgaggcngtggggtnanagntatnaagtgtncngtgggagaggtncntgntcgcgttgtgtgtntgtnggttgtgtgntttgctgtgtgcgttanttncgctctnntttgngngnngtgtnttgtnangtgancangacttgttggtgtgnngtgnggtggtatgtgtgtggtgtgtgtagtgtgtgttgtgnagtggtgggtgngtgtgtnggtggntgtgtggtgtgttgngtggtggnngtgtgtggntngtgtgtngagtgtgggtttnanaattttggtttgtgtgtgtgtggtgtgggtgtgtttttggttgtgttgtgtgtgtggtgnggtggtgtangntnggtgtttggtgtgttgtt

SEQ ID NO: 97050 - DNA, 654 bp, Glycine max
  Clone ID: PAT_MRT3847_58648C.1
ctcgagccgtcaagaactatgaccctcagcgtgacaagcgtttctcgggcaccgtcaagcttccccgtgtcccgcgtcccaacatgagcatctgcattcttggtgaccagcacgatatcgaccgtgccaagcacggtggtgttgacgccatgagcgccgatgatctgaagaagctgaacaagaacaagaagctgatcaagaagctcgctcgcaagtacgatgctttcatcgcttccgacaccttgatcaagcagattccccgtctcctgggtcctggtctttccaaggccggcaagttccctacccccgtctctcacgctgagaacctgtcggacaagatcacggaggtcaagtccaccatcaagttccagctgaagaaggttctctgcatgggtgtcgccgtcggcaacgtcgagatgactgaggacgagctgattggcaacatcatgcttgccatcaactacctcgtctccctgcttaagaagggctggcagaacgttggtagccttaccatcaaggctaccatgtcgccccccaagcgcctctactagaatggtgcatggctggggagtgcagtcctttgggctttgcgtagcgcaggcatgagaatggctgcgtagtaacaaaatcaaaatggatatgcattcaacgaag

SEQ ID NO: 97051 - DNA, 783 bp, Glycine max
  unsure (1)..(783): unsure at all n locations
  Clone ID: PAT_MRT3847_58649C.1
gcggcacaacaagtacggcgctttgccttcggcagctgagacttacaactatcgcacaaaaaaaaccctttgctgccaaaccacgctcactttcaccaattcattattcccattttctccagaaccacaagaagaagaagtttgtaacaataatgggaatgaagggtgctcccgccactctctccgacgacgacgtcgttctcaagtccccaaacgaccgtcgtttgtaccgcctcatccacctccccaacggccttcgcgccctgctcgttcacgatcccgagatttaccctgaggggcctccgaagcatgtttcaaacgaggacgaagttgaagaagaagatgatgatgatgaagaagaagacgaggatgaagaagaagaagaagaagatgaggatgatgatgatgatgatgaggaagaagaagaaggaaatgaaatggatggggtgaagggtggtgctgctgctgctcagagcaaaaaggctgcagcagctatgtgtgtaggaatgggcagcttctctgacccgtatgaagcgcagggactagcgcattttttagaacacatgctcttcatggggagtgatgaatttccagatgaaaatgagtatgatagctattttgtcaagcatgtaggctcatcaaatgcctacacagaaactgaatatacctgctaccattntgaagtgaagcgagaggttctgaaagggtgccttgaaaagattttctcagttctttatttcacctcttgtaaagatggaggcaatggagcgagaagacttgcag

SEQ ID NO: 97052 - DNA, 314 bp, Glycine max
  unsure (1)..(314): unsure at all n locations
  Clone ID: PAT_MRT3847_5864C.1
cccacaccttcntctgctgctataaactacataaggggcagttcaattccaatacagcccgcnttttctttttatttccctacctttctcttcaagattcanatcttcttcaagaccctcacccgcatgaccatcacccttgatgtgcaaagctttaacaccatctacatccttatatccaacatccattacttttaatgattttcccctgaccatcttccttttatttttttccttattagcaatttttatggacctctcctaattcttttctttatctacattcatttcatttatttatattttactttttt

SEQ ID NO: 97053 - DNA, 114 bp, Glycine max
  Clone ID: PAT_MRT3847_58650C.1
gggaaccgtgttctctaatgttggaattttctgtggcgcttcgtggttcattcttgtcgtaagttctctctttctatgtagggctatttgtaggattcatgttgtgtgctttgc

SEQ ID NO: 97054 - DNA, 313 bp, Glycine max
  Clone ID: PAT_MRT3847_58651C.1
cgacccagcgttcgcgaaccttctccctcttcatgacatttttaacgcccatattaagcccacttacagcattatctcttccaacaccagcttaaccttcttcgagaatcatctcttacctcttgtcaaatcctaccttccttacgtctttaacttaacccctgacagcgacatttaaaccctccgacatcacgacttttacgtaaaactcacgttcaacatgacttctcaccctaaaataaaccctaacacatcttattgcttcccacttctttactgtcccgttctaccgttcctaatctactttcgtttt

SEQ ID NO: 97055 - DNA, 289 bp, Glycine max
  Clone ID: PAT_MRT3847_58652C.1
acaaccactaaaaagggttggaatcgcgtggaacgatttatgatcaatccatatagatatgccttcaaaatgacgaatttatgattcgaccttacttataccatatcatgcctgcagggtattccaacctcgggaacagtgcaacacaacttctgcagctcaactgaacaatatcaagacccagatcgccagctattgaagttgtagcagcctgctctactggagatgccagcataaaagaaggagttccatacttgcaatctacgcttggagccttctatagccatca

SEQ ID NO: 97056 - DNA, 376 bp, Glycine max
  Clone ID: PAT_MRT3847_58653C.1
ggctcgagcgaagatggtgcccttgcaacttcccaagctccttgcctatagctatctaaaatgcggcatgggccaggctttgcttgacaccaaatgaagtcaactaaatctccatggccaattctcgtcaaaacctaacgaagatactcctggctgggtctattatcacgaagccgactaagattcactgtagctcccatgctcttggacttaaggacggccagagaatggggcgtcactttagttatggtaagcgctaagtgccaatggaggcaaggctccccaccaaaatccttgatatgaggaagatgcacgagctcatgcgcttgctttgcatgatcaaggaatcaaagatgatcggccaagacatgttcca

SEQ ID NO: 97057 - DNA, 1291 bp, Glycine max
  Clone ID: PAT_MRT3847_58654C.1
tacagttaaaaaataataatgaacattgacaaatgacagcaatggacagatgaacgtaattaataacagaacaacaattttgccattctgagttaccaattcactcagaatgagagaaccttttttttctcaaagctcttctttttcactcatcctagttgtcactgtttcgcgcacccaacacaacataacacatcaacacaagaggtaaacacacacgttatccccttccaacaccaacaacaacaacgacgacttcgttccggtatcgcatcattcattcccgtcgctgaatcatcttcaaaattcaaaagcaagatccacacacagtttcttcctctgttaatgttgttgtctctctcacgcactcaaaaagaatgaagtctctaacgacgctatggcctatggatattctgaaaacctcttcttttgttagaatcaccgccctgtcactcttctccctcaccctcttcctctttctcttcacgcgcttctctcccacctcttattcttccctcaccttcttctcctccacgccggagccaccctcccgggaacaagcaccaccaccacaaccaaattctcctcctcctcctccgccgccgcctccaccgtctcctccgccgccgggagtgaaaatattccgcgtgccgccgttaccgccggtggagaggatgggggtgttggacggtaacggcgtgatgacggaggatttcaaggtgggggaattagatcccggtttcgaggaagattctctaaacgacaccttttcgagcgtttcgagtggtgggggtgtgagggagaaggttgagaagtataaaacgtgtagccgaaaagggtcgagttatgtgccgtgtttggataacgtgaaaacgatgaagaaatacatggagagtttgagaggggagaagtacgagcggcattgcaaagggatgggcctcagtgtctgtgcggtaccggaggcccatcagcagagacggttcgtaatgtaccccatacactagtcgaggataaaggcgaaattggatatcaataaagaaggataaatttgtttcctgaactctttataggtgcagataaatacctggatttaagtgcatacttgtataatgtgatgcgcctgaaccttatgtaatctgccttgataacatgaccagtgaactttaatcaaagttttccaatgttattgtggttgataccgctagcaacctggtttgaggatcacacaaagagctgtcttccaattgctctttggggtccctacgattattagactgctcaccatctattt

SEQ ID NO: 97058 - DNA, 781 bp, Glycine max
  Clone ID: PAT_MRT3847_58655C.1
aaaaaaacatgactagagtcaaatttacctataaccgacaacaacaacaatacactatggccaaaggcctattcaaacgtacatttattagataacatatgtagtctatagtaaccatgatcagactcgtagagatagtttgcagctgaaatcatcacatcacaaacaaggattacaaaacacgacaaaacttacatacagttcttatagtgtttttggtgtcatttttctatcaaaatcagagttttacctcgataatctgggtgccaccaaggtaaaactccaattttgattagaaagcaacaccaacatctaagaaactgcatctaaattttgttgtacaagaaaagaactagaagagagtacggtacacataaaaggggtgttgccattctgagaggtccctcaagagcccaaatcacagtgtgtgaagtgaggtggaggagttgaaaaatgccaaaggattgaagttgccctttccaagagaaaccgccctcaagaaggagcgttttagcatagccttgaaagaaaaggagcatggaaagataaggaggataccattatagccacaccaaaacacaccatccacaacatgtccaccacccccacatgccaaattggttaaggaagtttggtggcatggggcaaggggggggtggctaatgagaaagctttcaaaaggggtgttacatatttgggatgatggggtggtgcagttaagagagggtttggagttgtagctaggattgggtgttataggattttgctccttctttggtcc

SEQ ID NO: 97059 - DNA, 253 bp, Glycine max
  Clone ID: PAT_MRT3847_58656C.1
atcagaactacgacaaattaagacagttcctaagagttagtgttgtactataggttacagagtgttagctagatggcatctcattgagttcgaatggtgcttctcattgcttgcattcttccagctttggttgcatgcatagtgaggcactatgatttcatgtggtgtctaaataaaccaatatattgtgtacaatcacatctattgtgaccattaatgggaagttgccaggtctcacactttacgctcaggg

SEQ ID NO: 97060 - DNA, 846 bp, Glycine max
  Clone ID: PAT_MRT3847_58657C.1
gtgagaaatcagggggaataacgtgtccaggaggagcattttcaaaccaacttgcaatgttaacagcaagaaattacatgtttccagagattaaaactaaaggatattgtaattttggcaagaagcttatagtatttacgtctagtggtggacattattctattgagaaaactggtatggcattaggattaggaattgataatatagttaaagttccttgtgatgatcaaggacgaatgcgcacagatgaattagagcgattgattatacagtcattagagagaaaagaagctccattttttattaatgctaccgctgggacgactgttttgggggcatttgatccattaaaggaaattgggaaaatcgctaaacaatacaagttatggtttcacgtcgatggatcatggggcggaagtctcctattttccgatgaacacaggcacctgattgaaggttcatctttggctgatacatttgtactgaatccacataaattacttggaacaccattacaatgttcattcttattagcatcagatcgacaaatatttagacaatcaaattcgctaggagcacaatatttatttcatgatgattctaaatatgatttaggagatggtacacttggatgtggtagaaggcctgacgcagtaaaattatttataggatggaaaatatacggaataataggatataaacaaaggatagaacatgcatttaaaatggctaaatatttgactaatttagtaaaaaaaaatagtagatttaggatggtattagaaagcccaccaaatttacaaatctgtttttggtatgtaccaaaaaggatgataattttagatc

SEQ ID NO: 97061 - DNA, 213 bp, Glycine max
  unsure (1)..(213): unsure at all n locations
  Clone ID: PAT_MRT3847_58658C.1
gcccttanaaaccgaggaaggaggaactcttaactctcaactctcaactctcatcggaccaaatcaggaatgcctaagtaacatcaaatttaataccaaacataccggcctaaggttttaatttggatgtaaatagtgtgttcttaggagtatattctattggttttctgtaatttcttggtataatgtataaatatcttgatatctgtgtgt

SEQ ID NO: 97062 - DNA, 320 bp, Glycine max
  unsure (1)..(320): unsure at all n locations
  Clone ID: PAT_MRT3847_58659C.1
ctcactttttcgcccacgcgnccgcccacgcgggcgcggacgcgtggggaaagagancangcccncccacccgnnggagcanaccnngcannngacaaggangaaggaagnncnnnggcnccccncnccncnnnaaaccaacgcggannncacgacangnggaaggangnaaaggangcaanngnggacccnaacaacaanaaccannnngaaaangngcanggaanaccaccanangannananggagaaaaangcngagcngaangacannnnnnacaaagcagaaanncacgccgccccacnagaaangaaaagggc

SEQ ID NO: 97063 - DNA, 1414 bp, Glycine max
  Clone ID: PAT_MRT3847_5865C.1
cccacgcgtccgcccacgcgtccgacggctgcgagaagacgacagaagggggtgtccactagggtctttaagggggtacaggaagtaaaagcctacatgtagactagaaaattaaaaaaaaaaatattaaggaaaataataataaaccgtagagaaaagggacacgtcctcgaaaaccacgtcacctggtagaatctgaaagtgtgaagagtgaagatggccgaagaaaaagaatcaacgtcaattcctcttagtcaaggggaaaatgcatctcgcgacgatcccgaagacccagccaagtctccaccaagctcgcccaactcctccactcgcaaggcttgctgctttgttctccagagttgggtctctaagaaatttatgactggatgcgtagttctttttccagttgctgttaccttcttcattacatggtggtttattcagtttgttgatggtttctttagtccaatatactccaggctcgggatagatgtatttggacttggttttattacatcattagcttttgtatttcttattggtgtttttgtttcgtcgtggatgggagccactgttttctggattggagaatggttcataaagcgaatgccccttgttaggcatatatactctgcatccaagcagatcagtgctgcaatatctccagatcaaaataccactgcctttaaagaggtagcaattatccgtcacccgcgtgttggtgaatatgcatttggctttattacatcaactgttattctacagaaagataatgaagatgaagagctttgtagtgtttttgtccctacgaatcatctatatattggtgatatatttttggttaattccaaagatattataagaccaaatctttccattcgagaaggcattgaaatcattgtttccggaggaatgactatgccacagttgatatctccagtggaaagggacactcgaccgaatgaaagagtctctttgaacagaattggataagggattattcctgcggatcatgcgggtgttggaaaatattacagtctaaacctccttgtaatggaatatgtatttttatacagaaatttgttgttcaatattaagttctttacagtgttcgatgttcaaatgagagagtaatataccttgtaacgctgtagttgtaaacttgtaacccagtatacccttggttttgttctacatgtcctttccactcaagtcccaacctctggctgacagaagaaatatcaagtaccaatataatgcatatatgttcaaattggctgggatgttattattaacatgaaaaaaaaaaaaaaaaaaaaaaaaaaaaaaaaaaaaaaaaaaaaaaaaaaaaaaaaaaaaaaaaaaaaaaaaaaaaaaaaaaaaaaaaaaaaaaaaaaaaaaaaaaaaaaaaaaa

SEQ ID NO: 97064 - DNA, 382 bp, Glycine max
  Clone ID: PAT_MRT3847_58660C.1
gggagggcttacctctttattaaaaaaccttcgggggaaaagccccacccttaattattttattttatttttttcaccaggagttcccacttttggattttacaaaaaacccttggccccaacacccaaaggattttttttatgctggggaaccccgggcaacccttcaaaaaaaagggctccctttttcattccttggggcaattccccgccaaaggaataaaaaaaatttcccggtttaaaaccccatgccgcaaatgccctttttttcccagggcccaatttaccacccccccccaagggaaaaaacccaaaatcttggccaaaaaaaactatggcccaatttaaaaaccccccagggataaacccttttggatctttc

SEQ ID NO: 97065 - DNA, 368 bp, Glycine max
  Clone ID: PAT_MRT3847_58661C.1
tacataaacgaacattaaaaaatggcctgcttaaattaaaatactggctcgcatacttcataataaaaactataaacctaaattacttccctacacaaaattacttttaatatcacaaacactattcaaaaataaaattctctaataaaaaaacaacaaacattttataagatcccactttacatactcattcatacaacttattatctcttttattaacacacctaatttcaaaatactttccctcattttacaaccatattactattaaaaccctatcacttcccaacttaatcacctttcaacacattcccctttttccaactctcctaatacccaaaaaacccataccaatctccctttccaac

SEQ ID NO: 97066 - DNA, 180 bp, Glycine max
  unsure (1)..(180): unsure at all n locations
  Clone ID: PAT_MRT3847_58662C.1
actcataccntantagtancattctagngntgataataagctgntgattgaaacaaatggtgaaagtgcagttgttgaatcatcttncnccagacaccgagtcattcgaccaaaacataagcatgtccgnntctgacatngcangnagggagcaantcacgggtnggatgcacaancccc

SEQ ID NO: 97067 - DNA, 379 bp, Glycine max
  Clone ID: PAT_MRT3847_58663C.1
aatttctcttcttatcttatcaataacgacaatactctttcgttttttcttctccgtgccctactgttaccactcaagtttctgctttatgatttttcttcttctttaacgatagcgctgttgcgttgtgaatttgtcatatcctgattccatcttaggccactaaactatccaataattttgttgctcctttcactttagtttggtttcttaaccaagttattgattaaggactcgactataatgcagaccctcgtgcgtaattggccggtggatattaataatatcatgttgttgttgcgataaaagatattcctcactctcagcgaaacccttgaagcgtgttgcaaatatttcaattaaattatcttctcaaaga

SEQ ID NO: 97068 - DNA, 204 bp, Glycine max
  Clone ID: PAT_MRT3847_58664C.1
tatgggggaaccttagcattctattcattcagggttcagggagtactttgggtaagcagataccaatatacttcgacatggcccgtgcaaagcaaactgctcgtcagtcaactgcaggaaaatctgccaacccgcagcttgcaaccaaagctgcacgtaagtctacaccaacaactgataaagtgaagaagcctcatctctatc

SEQ ID NO: 97069 - DNA, 777 bp, Glycine max
  Clone ID: PAT_MRT3847_58665C.1
atgattcaaagggtcctccttctgtatcttgcaaatgacattctgcagaactgtaagcgtaaagggaatgaatttgtgacagagttttggaaggttcttcctgcagcacttaaagatgttatcaagaaaggtgatgatcatggaaagcgtgtggctaggaaccttaaagatttgatgcttggagaagatgcacctccaccattggaatttggcaaaaagcgatcacgttctgtaagaattgcgaaaagggattctcactccatcaaatcggtttgctatggttctttcatatctcacttccttgatattgtcttgatgccagaaactgtccataggagtgagcaatccgctgaagatgcagagatgagtaagtgcaaatcttctgttcagcgtgtgaggaagttggaaaaagatgttgataccgcgtgctctgttgagaaatactttagcaaaggaactagaggaggaggaaaatgttttgaaacaatgcatagaaaacttaaattagttgaagcaagcagagtagcccttgtatctcagttaaaagaagctttgcatgagcaggaatctgaactagagaatgttcgtacacagatgcaggttgcacaggcacaagtagaagaggcttgcaacatgcggaagatacttgacaatgaagattcctctcagaaaacatccactggaaagtccgctgcagtaattgctgccgaggttgcagataagcttgcatgttcctgcgcaaaaagattggtgatcgtaaaaaccattcaaaattaa

SEQ ID NO: 97070 - DNA, 454 bp, Glycine max
  Clone ID: PAT_MRT3847_58666C.1
gggcgaaatgatgaaaaatctcagtgtaaggtatgactggtaacctgccaagggtttgctgaatctgtattcgctcaagtaaagaggcaacaggtgacttcaattcatcttagatgacagaaacaatggcaatgcaaggttgttattgtcacgtctatacgaagttggcaactcaaagaagaacactggacaatcttagtttttcaggctcaatttcggttaaaaaattgtcaaagaatgaaaggaccacagggaacaatcaatttcataggttactcgtgaaaatgcgacagacagaaatgcctgccgcctcagagtatggaacaaatgagttagtgaaaagaaagacaatgttagagaagacagtgaataatggttcagcaacttcaaaggtagtgagaaaaaatggtatcccagccttgagcaagacaatgaaatctagaagctcattgga

SEQ ID NO: 97071 - DNA, 927 bp, Glycine max
  Clone ID: PAT_MRT3847_58667C.1
atggcttctttaaattttggcagcatattagttcttcgggtcaatggaagacccattacacccttcaacagaaaattgacacaccgagatggtggaacagcaactttatcacattggtgtatatttcaccggagcaaagaagaactggttgttgccacttggaaaaaacaatttgacaaatcagagatgattcaaagggtcctccttctgtatcttgcaaatgacattctgcagaactgtaagcgtaaagggaatgaatttgtgacagagttttggaaggttcttcctgcagcacttaaagatgttatcaagaaaggtgatgatcatggaaagcgtgtggtatctacattgattgaaatatgggagcaaaggagagtgtttggatcccaggctaggaaccttaaagatttgatgcttggagaagatgcacctccaccattggaatttggcaaaaagcgatcacgttctgtaagaattgcgaaaagggattctcactccatcaaatcgaaactgtccataggaggtacagcagaaaaaatagtgtctgcatttcatttggtgctcagtgagcaatccgctgaagatgcagagatgagtaagtgcaaatcttctgttcagcgtgtgaggaagttggaaaaagatgttgataccgcgtgctctgttgcaagcagagtagcccttgtatctcagttaaaagaagctttgcatgagcaggaatctgaactagagaatgttcgtacacagatgcaggttgcacaggcacaagtagaagaggcttgcaacatgcggaagatacttgacaatgaagattcctctcagaaaacatccactggaaagtccgctgcagtaattgctgccgaggttgcagataagcttgcatgttcctgcgcaaaaagattggtgatcgtaaaaaccattcaaaattaa

SEQ ID NO: 97072 - DNA, 293 bp, Glycine max
  Clone ID: PAT_MRT3847_58668C.1
caacgcatggaggatatggtgcagttaccaccatggattcccagccgagcttgaatggaggctcagcattatttatgtgtccatgtggaacagccaccactgttgacccaccagagaagcacaaagtagactgcccagctcgtatgctcaccctcatacgccagaataaggaactggagttgtgtgtccgtgatgagggcaatacacaagttcctggacccattccaacttactatgcattggagactcaagcaaatgcgcctgctcagagtagggttggtggagttgcccct

SEQ ID NO: 97073 - DNA, 504 bp, Glycine max
  unsure (1)..(504): unsure at all n locations
  Clone ID: PAT_MRT3847_58669C.1
aatctctttttttttttttttttttttttttttttttttttttatttttttttttttttttttttttttggcccaacaaagccgggggcatatttaggctattaaaaaacgctttaatttaggctaatcttgaaaacaggcccccactacactgattggggggggggaaatccctcgctcgtttcattnctaaaaaaaatttaaaaaaaaacaaaaggggggggaggggtaaacccccccttaataaaaagcagggggcggggggaacttcatgaaactaaaaacccctcaaaattttggtctcattattaggggggggccaaattttcctttgccgggggagaaattttttctccatcacttccagggtcactggcaggaactcccaggcttaaaagaacttcctcccactttttaggaggccccttccaggaaaaatcttgagccatgcagttttttattatttttggaaaagcgggagttccataaacggcaagggccctt

SEQ ID NO: 97074 - DNA, 1276 bp, Glycine max
  Clone ID: PAT_MRT3847_5866C.1
ggctcgagcagtcatggtaggtaatgagatttatcatttatccagtgaaggaaaggaagagagagcaagtgagtgttgcttagtatccaagacaagacagtgataatattggaatttttggaagccaaattaggcttccattctgattctactattttatctgcctagttttagggtactgtttatcatcgttagaatctgaaggtgtgaagagtgaagatggcagaagaaaaagaatcaacgtcaattcctcttagtcaaggggacaatgcatctcgcgacgatcccgaagacccagccaagtctccactaagctcgcccaactcttccactcgcagggcttgctgctttgttctccagagttgggtctctaagaaatttatgactggatgcgtagttctttttccagttgctgttaccttcttcattacatggtggtttattcagtttgttgatggtttctttagtccaatatactccaggctcggcatagatgtgtttggacttggttttgtgacatcgttagcttttgtatttcttattggtgtttttgtttcgtcatggatgggagccactgttttctggattggagagtggttcataaagcgaatgccccttgttaggcatatatactctgcatccaagcagattagtgctgcaatatctccagatcaaaataccactgcctttaaagaggtagcaattatccgtcacccgcgtgttggtgaatatgcgtttggatttattacatcaactgttactctacagaaagataatgaagatgaagagctttgtagtgtttttgtacctacgaaccatctatatattggtgatatatttttggttaattccaaagatattataagaccaaatctttccattcgagaaggcattgaaatcattgtttccggggggatgactatgccacagttgatatctccggtggaaagggctactcgaccgaatgaaagaatttctttgaacagaattggataaaggatttgacctgcggatcatgtgggtgttggaaattattatagtctgaacctccttgtaatggaatatgtatttggatacataaaagtgttgtttaatatttagttctttaatgagagtaatgtaccctgtaacgctgtagttgtaaacttgtaacccagtatacccttgtttttgttctacatgtcctttccacccagcctcagtctgacagagatgaactactatgtaccattagtccaatataatgaatatatgttcaaattggctgcatgttatt

SEQ ID NO: 97075 - DNA, 509 bp, Glycine max
  Clone ID: PAT_MRT3847_58670C.1
aaaagaatattatactattcacactaattattttattaaaatattcttttttaaaaaaataattagtgtgaatagtataatattggaagagagaataaatgagaaactttattcaaatattgaggttaaaaatggaaaaataataataaattataagatcatatcctactttaaatacaagtagtactatttaaaaaaaaaactataaattcataagacaaatttgtttattaaattgtcagtcattttaatcaaataaacttataaattatttgaataaattataaactagttaaaatgattagctaactagctagctaaataaattatacattacatgcaacgttcagtcattaatatatcacattgttttttattatagcgtatatgtgtctctgggcaaagaatatttaacaatgatttattttttattgttaaacattaaggagaaagcatacagaataatagacgtgaaatatattgtagatacttaacgtacaggttgtgga

SEQ ID NO: 97076 - DNA, 546 bp, Glycine max
  unsure (1)..(546): unsure at all n locations
  Clone ID: PAT_MRT3847_58671C.1
aaaaaaaataaaaaaaaaaaaaaaaaaggggggagaggaaaaaaaaaaaaaaaaaaaaacaaaataaagaaaaaaaaaatggcgagacggttttatgggttctagggtttccttcctttgacttcgcggtggcttaggttttttttttgggggttctggagttaaatttatttgggcggagttttaccatcttttggggggggggaacccttggacttccctccttttacccgctttgggggggattgccttttttccccccttgggcgtgtttcgccaaaggtgcgcgaagcggtcggcctttcctgccattgccccagctgcgcggcctttggggccacccctttgggggttcttttagggcggttggcgcggggggtttgttgttttggccgtttattttgtatgttgttagggtggttttttggggtttttngtttttttgngggnnggttggggggttttccggttggtttttatttgggggtttcgttttggtgtttggggggggggttttgggggtgttggccccgggagctggtttgg

SEQ ID NO: 97077 - DNA, 1176 bp, Glycine max
  Clone ID: PAT_MRT3847_58672C.1
aaaagaagaagagagaaacaaaaccacaaaaagtataaaagctaaacgggaagttaaacctcatggataccaaaaatacaaaagactatgcagtactgttcccactcgctttgcgcgttctcgaggcacagatgcctctggagtctggaccgcggaccgatggtgagttatgtccgcattccattatgctccggcgaccattttattcggcacatccgtcctgcgggtttccccggggccgtcgtgtctgttcctttctctgcacatgccgtctctccacccagactcgttcctttcccatgccgcttggcctcgggcggcccctctgcccgctcccttggcctcttcccccagccgggcctccgttgctcctcccgcttccggctccggcacctcggctttgccgttcttcacctcaacttgggccaccccgcttccggtggctgttgctagttaaagtgacaatcctcagcccaagttttgtttgtttcttaaagcaagcatgaacacacatgcatcagagagacttgaaccataccaaccatacaaaaagctttttgatccatttgatgagcatagcatagtcatttagacacaggattacataatttttccctaaagaatttcaaaagcttctatatattacttttcctactttcatagggaatagctatacacatatgcaaaattagattaaattgcagagaaatagaaagaaaagtacaaattacaaaatactaaggcaagaaagatatttagcataacaatattgcaattttcatctgaaccgttttaacagttattatctcatcacatgttgtctgtccacttagacttgttgctttcccaataggaaaaggcttttgtactcagaggttcccactgaacgcttccagtgactcttaccaaagggggaccactgttgtaatggcgctttctttgcttatgtttctggccaaaaaacaaaatcaaccactccgttttcccaaatcataactgggagttgaaatgtaatttgggtccacgaccgtgtctccctccagtattcgcagaacctgtgacatgcgtggtctagaataaggatctcgtcttatgcataatgaggcagcatgcagcatgcaatagacctcatgctcggaatagtgacttcccaaccttggatcaatcctcgtgccg

SEQ ID NO: 97078 - DNA, 375 bp, Glycine max
  Clone ID: PAT_MRT3847_58673C.1
ccggccggcttttatttggctttttttccaaaggaggcagcacaggtggccgattttaagtccaacaaaacctcctgttttcacattaggccaggcccaccatttgtttttcgggggaggcgcgtgccttttaccaggaggattatacactgttgttagagtagtgaaaatagttggagttccatacccagcgtaggcacaaatggcaagatggggagaccttgaatatgtggggtcaccaatatacatgtggctggaaattgaactgtcacatttcatggatgggcaagtagaccaattagttggtctaagcttggatggctcacatgtaaatttccaattttgggtagcatcacagtagcatttcacacagcc

SEQ ID NO: 97079 - DNA, 321 bp, Glycine max
  Clone ID: PAT_MRT3847_58674C.1
ctgaaggaatgtaaaagcattgataaaacattagaaaatttagttttcctaaaacaacgggccaaatcggttataaacaactcggtatatgaatccacaggtaaatggaatttatctactgttgctgaattttgaggaaatgtaatggaaatgacagccaactttcaagtggggagaattgccatgttattgtgacccgtgcactgaattttctccataaaatgggggaacattgtgaaacaatttatagaaacaatcagttgcctctaaaagcaagtccagccataatccaatttatggcctttgtaacaaccaaatttt

SEQ ID NO: 97080 - DNA, 749 bp, Glycine max
  Clone ID: PAT_MRT3847_58675C.1
agggacgtggaaaatcatagttaataaaaatttctagattcagcagtgagcatgggtagctaaacccacaaacacaaaaaatgtgcaaaataatgggcactatatcctcattacctcgttatatatacactcgagaatgaacaagtccactccgctcctatactaagtgggatttgcagtttgcagtcaaattgaaacaagcataaatggctatcgtctcaacagttaccttggtgctatataaagttatctacttcacctggaagtggaacttcaccgaaacaaagcacccccaaaccattcattggacgcatgagcaatcgccaaagattgggccctgcaggccttgctttgcattatgcaaatatagtgcttcaaattgatactcttgtggctagatcctctatacctgcaaatacaaaggatgcattatatcaaagcttgcctcctaatataaaattagctctgcattccaaattaccatcccttcgtgttgtagaagagctaactatagcagatatcacagatgagatggagaaaacattacattggttgtcccccatggccactaacacatccaaagcacatcatggctttgggtggggagggggagtgggcaaacacaggctctgaggtaaggaagaccggtgtaatgcggattgagacattccatcatgcagacaaagaccaagtggaatattatattcttgaacttctgttatggcttcatcgcttggccatcagaagta

SEQ ID NO: 97081 - DNA, 248 bp, Glycine max
  unsure (1)..(248): unsure at all n locations
  Clone ID: PAT_MRT3847_58676C.1
ggagttttcaccgataaggacaaggctgccggcacattttgaagggtggtgccaagaaaggttattatttctggccccccagtaaggatgnccccatgtttngtnggttggtgttaatgaagcacgagncaagccagagcttgatattatttccaacggtagntgaaaaaccaaactgccttggtccantnncnaagggtattcatganagntttggccntttttagggtttaagacantnttcattc

SEQ ID NO: 97082 - DNA, 129 bp, Glycine max
  Clone ID: PAT_MRT3847_58677C.1
gctgcagaaaaagccggaggggatatgagaaaaaccgggacggttatatctctttgggtatgatcgcctctctctgagcgctgcatctcatgttcatcgatgatccttgcactttccttgagggaaatg

SEQ ID NO: 97083 - DNA, 151 bp, Glycine max
  unsure (1)..(151): unsure at all n locations
  Clone ID: PAT_MRT3847_58678C.1
gctaaaaaagaactcagtccgtgtcattctcttgcatctatcactccccagttcatgatcacccacgctggccgggtggcccatccnangccgcccacacattcctccctctaaccgggcttgcccgcttcagcggcacatggcctcgcac

SEQ ID NO: 97084 - DNA, 208 bp, Glycine max
  Clone ID: PAT_MRT3847_58679C.1
caaaggattctacccgccgctcgatgggaattgcgcttcaaggcgtctcgtagggctaatccgcctcacgagggtcaccaacggcacgtgcctttgcggggagccgagagccccctaacctgctcggtacgagcataatcggtacggtcggtgacgctacgacgtacgacttactagcccggattctgacttagaggcgttcagtcat

SEQ ID NO: 97085 - DNA, 201 bp, Glycine max
  Clone ID: PAT_MRT3847_5867C.1
ttcactcgtccagacactcttacggcttaccatctacacacatctaactcagcataggggtatagtgcaatatccgtagaagctcgatctccattgcatgtccgaatgttcaacgatgtcttgaatatactataacataatcagcaacttcggcagactatcatgatgatgcacgaactcctaattgagacgattatagca

SEQ ID NO: 97086 - DNA, 353 bp, Glycine max
  Clone ID: PAT_MRT3847_58680C.1
tttttttttttttttatatttttttgtttttttggtttttttttttttttttttatttttttttttttagggggggggcggaagtattttttatttttacaaggtttcccaacataacttttgttgtaaccacattacctaatcccgttccaccccaaaaggaaaaaaaaaaaaatccacccttttaaacgggggactttttattgttttaaaaacaatttcccactaatgattgtgtcccaatgtctattacttttttaggacccaactctagtataaccctttgaaaaaaaattgttttaagaaaagggtttccaaccaatatccccacgtataaaacctccacaaccaat

SEQ ID NO: 97087 - DNA, 206 bp, Glycine max
  Clone ID: PAT_MRT3847_58681C.1
ttagcgttttggttctttttaatttttttggcaataatcatatctttttatctcaaaacagaacatcacaatggacaatagttaaattcgattacgacattatcagatcccataaatctttgtcttatttgggtctcctctccttactccaacatttttacaaggggggtcctctaccctaccagcacctacttccaataaatcca

SEQ ID NO: 97088 - DNA, 438 bp, Glycine max
  Clone ID: PAT_MRT3847_58682C.1
ctcgtactgtgtgtatggaacagctggcagcggaggaaggattgtgcgagttggcgaggaaggcgtttggggcctgggacatctgtaggagatcttaggtgaactctaacagcttttacgacacgttaccacatgtcaagggtgaatctgatctggcgactacaactctccaaatggaccacctggacttagacagtctagatagcggtgtatattacttgtgttgacttgtgacgacaactggaaagtataccagttcatggacgttgaggcctgcctagccttcacctactaagaaggatggaagagattctatctggggcatgttatctggaagatcttgcccaacatgatgttatcgtacatgaaatttggtaagattttcctgaagatgtattggaggctgtaaattgacgtcttcccatttccacatttttc

SEQ ID NO: 97089 - DNA, 431 bp, Glycine max
  Clone ID: PAT_MRT3847_58683C.1
acttgacaagcttctagacagtgcgcgtaccttgcgtcgaggtgatctggattacatcgacaagaacttgcctctggtgggtggcatcgtgcacagagtgagagccggtgagtagctggcacaaactctgcagcgttacttgcaccacctagaatgacatatatgacattctcgagctctagacagccgattactttgtctgcctctgtggactcttcacactcaagctactacaattcgtacgctaacctcgccatcttcgaccgttcttccgtatcgagaagtggttcgtgcactcgctggcgatgcatctgacagtctgatgcactatgtcatgataattaccatgcatgctgtcatccacaacgatctgatcttccactactctgatgaggagctggcccatcaccttgcttagatcgagatatctc

SEQ ID NO: 97090 - DNA, 1920 bp, Glycine max
  Clone ID: PAT_MRT3847_58684C.1
ccacgcgtccgcgaaaattatttaattcttaaatagaggtacccagcaatgtgatacccgcgtagtgtgtttttccatttaaaagacgagcatttttcaattaattactcacgcgaggatccaaatccaaaaaaatcatggagcagttgtactacctcacccttgtgctactgtttgtgtccttcgtctctgtctcttttttcatcattttctacaggcatcgttctccgttcagcgtccccaacttgccgccggggaaggcggggtttccggtgatcggcgagagcctggagtttctgtcggcgggacggaaggggcttccggagaagttcttctccgatcgcatgacagagtactcttccaaagtgttcaagacctccatcttaggggagcctacagtgattttctgtggagccgcatgtaacaagttcttgttttctaacgagaacaaacacgtcatttcgtggtggcctgaaaatgtcaagaagttgttcccaacgaatattcaaacaaactctaaggaagaagccaagaagttgagaaacattctccctcagttcctcagcgccaaagccatccaacgttacgttggtattatggacactgttgcccaaagacactttgctctggagtgggagaacaacacccaagtcaccgtattgcccttggccaagaggtatacctttggggtggctagccgtgtgttcatgagcattgatgatttgaatcaagtggcgaaattggcagaacctttaaatcaggtgaatgcaggaattatatcaatgcccattaacttccccggaactgtgttcaaccgaggaatcaaggcctccaagttcattatgagggagctgttgaggattgtcagggggaagaaggtggaactagctaatggaatgtccacaccaacacaagacattttgtctcacatgctaatatattgtgatgagaatggacaatatttggctgaacatgatattgtcaacaagatccttggcttgctgataggtagccatgaaaccacaagtactgtttgcactttcgttgtcaaataccttgccgagctccctcaaaatatttatgaaaatgtctatcaagaacaaatggcgattgcaaaatccaaagctccaggagagttgttgaattgggatgacatccagaagatgaaatattcatggaatgtagcttgtgaagtaataaggcttaaccctccagcccaaggagcttttagggaagccatcaatgactttatcttcgatggattctcaattccaaaaggctggaagttgtattggagtgcaaattcaactcacaaaaatccagagtacttccctgagccagagaaatttgatccaagcagatttgaaggaactggaccagctccttatacttatgtgccatttggtggagggccaagtatgtgccctggaaaagagtatgcgcgaatggaactattggtgttcatgcacaacttagtgaagaggttcaagtgtgaaactctttttcctaatggaaatgttacttataaccctacgcctattcctgccaagggccttcctgttcgtcttattcctcaccgatcatgaaggaattaattatatttggatgggtgaacctatgtcaactcttatgcagaaacggtatggcataaagcctgcccaatgtcagcaattgcattttagtttgttattttttattaattgtttgatcaagtttttaggattagttgttttattttctgttacttaatagttgttatgttaatggttagttattgttatgttagtagtttgttattgttatgttattgtttggttattatttagcacatcagtaattattacttctttttgttccaataaattgtatttaaacagatgatcatttaatagaaaagtgtgtacttatctcctttatttt

SEQ ID NO: 97091 - DNA, 447 bp, Glycine max
  Clone ID: PAT_MRT3847_58685C.1
gcttcatacgggaagacacacaccgtggtttcactttctatctctacaaagctcttaatgaccggggaatctacactttcttttatgatcaggagcttcccagagaaaccgaagtaacacctggactttacaaggcaattctagcttccagggtagctattattgtgctttctgaaaactatgctttttcctcattttgtttagatgaacttgtaaccatcctacactgcgagagggaagttataccagtctttcacaacgtagatccttctgatgtcagacaccagaaaggtagttatggagaagcaatggctaagcatcagaagaggttcaaagctaagaagctgcagaaatggaggatggctttgaaacaagtagctaaactgtgtggctatcatttcaaagatgggtctctaggatgtttggtcttgcttctttacacgttgg

SEQ ID NO: 97092 - DNA, 883 bp, Glycine max
  Clone ID: PAT_MRT3847_58686C.1
ggggaagatgaggatttgagttgggatgttgaagacgatgagaatgacgatggtgggattagatgtgatgccaaacctgtgattatgaataaagaggttggtggtgaaaatgtggataatacccacttacatgttgatggcaatgaagagggaacaaagagattggatgtggaagaggagtctaaggaacaaaagaaagacaatttattggaaagtgaggaagttggcaacaaggtggataagtctgttgaagaatcacaagttgagaaatctgaatctgttggtgacaggggtggtgttgatgaggcatcgaagtcaaaagcggatgatggtgtgagcaagaatgattcgacaagtgaatccgatgagaaggtggtaaaggatagggaggttggtgatgagaaaacttctggtaaaggtaatgagtctttcacggttgaaattcagcaatcggcaaataaggaggaggaggaccttgggtgggatgacattgaggatcttagcagtattgatgaaaagaaaacaatgcagagtggtggcacaagcaaagttgatttgcggaagcggcttagtgctgcagaagaagacgaagacttgagttgggacattgaagatgatgatgatgagcctgctaaggcttcaagtgtttaatgcattctattatgatttctcaatggaagtatatggtgtaagtgtcattttcacgtaaagaaatttgtcggtgtttttatactttcagaaactgggatagaagtagtattgttatctgttctatccctaaaatgcatgaaaagtaactgtttctatgttattgtttcatattctgttctttattttggttattcatcaatatatggtgaccattatcagacagacatttcct

SEQ ID NO: 97093 - DNA, 328 bp, Glycine max
  Clone ID: PAT_MRT3847_58687C.1
gggggaaaaacaacggaaactttccttttttggaggtttacctaaaaaggatcccaccaaatggaccctttgaagggggaccctgcgtactggaaccctttttgggagctaacattttaaggggggaaaattcctttttttttcccccaaaaaaataccttattccaatttgggaacccattggaatttggggcaacggcaaaaggatcatggggaatcttgaaaggatttaagaacccttttaacatgccttggaactttttatgccgtaacccagaagggccggggaacccaccctataattgggaatactagggcgttctccaag

SEQ ID NO: 97094 - DNA, 573 bp, Glycine max
  Clone ID: PAT_MRT3847_58688C.1
gaagctcgtataaaatgccaaaagtttctttattgaaaacaaaaataaatacttatagtgtatctgaacaaaaagataaaaatagacatgggccttctaaacagtttgggccaaaattacaataaaaataaattataactaaaaacttatttaagttgggtcttcaagttagtttgggccttcagcaacaattagtagtcttggtagtgcctctgcctctgtgccttcatctttctccacttgggccttcaatcatcatcaatggcagctatacaaatgaccagccttgtctctatgatgtgttgggcttgtttaagtttgcctctggtcatgggcccttcaagtgcttcatggtccttgcccttggttatgtcctcatcaaaaggcacgtggggtaccattgttgaccccttataaacattctcaagggcaaccaagcatggaggattgtcaacaacatacaacccacacctatttgatgcattagtgtatggatcctacccgataggatcaacacagtttccctttgtgctaacacaagcaccagcccttctgtcgtcttctcgcagccgt

SEQ ID NO: 97095 - DNA, 511 bp, Glycine max
  Clone ID: PAT_MRT3847_58689C.1
taaaaataaattataactaaaaacttatttaacttgggccttcaagttagtttgggccttcaacaacaattagtagtcttggtagtgcctctgcctctgggccttcaatcatcatcaatggcagctatacaaatgaccagccttgtctctatgacgtgttgggcttgtttaagtctgcctctggtcatgggaccttcaagtgcttcatggtccttgcccttggttatgtcctcatcagatatcgagacgctcgtaattgaaaacgaaatctctgagaaaaatcaaataaaaataatttttaactcggatgtccgattgagtcccgtaatatatcgagacgctcgtaattgaaaatagaagctctgagtaaattcaaacgacaataataattaactcggatgtccgattgagtcccgtaggatatcgagacgctcgaaattgaaaacggaagctcaaagaaaagccaaacgacaatcctctgtcgtttctcgcagccgtacggacgctgggc

SEQ ID NO: 97096 - DNA, 998 bp, Glycine max
  Clone ID: PAT_MRT3847_5868C.1
ttttctctctctctctacaatgctaaatattattattattcctctaatctctctctcttatacttttctcgttctctaaaatcttcacttcccagctttttcaatctgctttctttgactggacaacaagaggggttttcttcgacgaatcaaaaccacaaaaagtttcaatttttacccattttgctgcccctggatcgctttacttcgagttgcatgagctcccatttctcgcaaagacataaagagttctctacaacaaccaagttctgtacaaaggaaggatggggtgcttcactgtattgaagagcaaaaagaaaaggtctgatccaattacatatgtaaaacgtgtaagccataatgagaacgtacctacagtactgcctgaacctcaaactcatactcgctcactccagtctgctcctcctagttttaggaccagagtgaaacccattcaacccattaataaagtcagtaacaatagagcgcgaacattatctgctccatcaactcttgatgcagcagaacaagatgctttggcttcaattgagtatgaggaacaagaagagtcaagacaccgagctggatcaatgaaggagcatcgttcatctagtccacaacctttaccacttccatcccctcagggaggttgtgcattgaaggctattggcagctttaagtctgtgacatcaggtggctcctcttactatgcttctggacctttgccactcccacctactgggtcacttcggaattttctgtacgaggaaattgctgctgcttgccaccatttctcttctgatagatgcatgtcagaatgtctttcatccaccatatataaggcttccttcggtgacgatgtttcaagttcgaagaagtttgaagctactgtcacacggcttcacccatcttctcagggcttgaggaattcataaatgaagttaatactcttgcatctttgcaacatccaaacctttgtaaattgctaggaattcatg

SEQ ID NO: 97097 - DNA, 283 bp, Glycine max
  Clone ID: PAT_MRT3847_58690C.1
gctctaggtcagccactcaaggctcatgatgatgttgctggcacatctctaaacagtgcgcagaggtgatctatcaaagatccagggcacagagaaagtatttgcgcgctatcgctgagttgaccattacattaattttgcatggaagcttgtgaatggacgacacatatacgttgctaatgttgaggcgagagaacacttcttgacgatgaccgatagggagatcaacaaagttcgcttgatgacactgagttccgcggttagttctcgacatagactcgct

SEQ ID NO: 97098 - DNA, 455 bp, Glycine max
  Clone ID: PAT_MRT3847_58691C.1
ggcgtccggactgttcaatcggtctcagcttcccacaagcacaccagatgttcgagttcagctcggcgaagagcgtccacatgacatctacctgaacaggactcatccaactgctcaacacgcttacaagaatggtgacaccacgcactcaaagactcacgtgcacagtgcctcgctgttcgacgagggcattttgagggataccctggcgccctcactaactctccactcgggtcttgcagtcattgcatatggcatagcacgatacacgaaccgcgttgaggtcaaagattggctctggccgagtggccaggtcgtcaatgcctggtggtctgccggtggtcgccgtcttgcagcatgtctaacgctcacacaagctttccaccgtctgtcctggcatgaacgtgtactgctgacgggagtcacactatggtgtggccgactcttctaccgta

SEQ ID NO: 97099 - DNA, 167 bp, Glycine max
  Clone ID: PAT_MRT3847_58692C.1
gatagctgtccatttatgaaacccaggtttccgtgcaggataagttaatatggaacaccagcgtgttcgcgatctctctactgtgtgcgctcaggggatagggtgagtctgtttctgtctaaatgtgggctacgttttatgggtatttccgtcgtgcacggtgtcac

SEQ ID NO: 97100 - DNA, 320 bp, Glycine max
  Clone ID: PAT_MRT3847_58693C.1
gctacaagcctgtgccctatttttaagaaacattttactacaacaatcaagcttatactacaacacacgtgcatgaggactgctaactcccatcccatggcataatggaggctatacgcacagtcagacagaggcgaaaaataccaaatctccaggaaccaacaggaagcatccttggcttcaaatcctttgcctctagagccccgaggatccaaagattgcctggagggagcattcaccttttccttgcctactgggattcgtaatcacaatatacatattcatccgacaccatgtggagcaagccttctacagaccag

SEQ ID NO: 97101 - DNA, 404 bp, Glycine max
  unsure (1)..(404): unsure at all n locations
  Clone ID: PAT_MRT3847_58694C.1
caagaacattatcttcgatgtacatggcgttacatcgctcgacggtgctggagctcaagtcctggctgagattgtcgagtcatacagaagcaggnaagtcagagtcttcttctgtagagttccaaaagagtctagtccagtctatcagctgttcgataagagcggtattgttgagatgtgcggcggtccaagacactttgtacagagcgttgaggaggcacttcgcatgacggaactagagcgattgacagaggaatttgccagctccgcagaagggtcgagagctgcatccagccgagcttaagtcttccgatgcatttatcctttatcctatgagcgatgggaatgagcgtgttagcactgcatctgatggtatgggcatattgcattagcgatttgctacg

SEQ ID NO: 97102 - DNA, 384 bp, Glycine max
  unsure (1)..(384): unsure at all n locations
  Clone ID: PAT_MRT3847_58695C.1
ctcgagcggctcgagacggctgcgagaagacgacagaaggggatgagaggtcttgggaaaacctcanagataacagggagtttggtaatagacagcaggatgctagtcagggaggacctactcctacgctggtcaaggccgaggttccgtggtctgctagaaggggaagtctatctgaaaaggatcgcgtcataaaaactgtgaaaggaatactgaataagttgactcctgaaaaatttgatatcctgaagggtcagttaatcgattctggcattacatcagctgacatcttaaaagatgtcatttcacttatttttgataaagctgttctaaaaccaacattttgccccatgtatgctcaactctgttctgatctaaatgaaa

SEQ ID NO: 97103 - DNA, 3093 bp, Glycine max
  Clone ID: PAT_MRT3847_58696C.1
cgcagcgtctctctttctcattctcttctctttggcgctgcgcagaagagagagaacgaacgaacgaacgagcataacaccctttaataatctgtggcagtgagtagtgatatgcagcaaggtgatccaacggtcctaagcttgaggcctggtggtggtcgtggcggcggaagcaggcttttcggtcactcctcctcctctctctccgccgatctccctctctgccgccctcatgcctatttctctctcaagaccagagattcacggtttgagggtcatgagcgtgtgcgatatagcagagatcagcttttacagcttcaagaggctgttgaggtccctgatgatatactaaagattaaacaagatatagaagctgaaatttttggtgaaaatccaagttggggccgtgctgaaagcaatcttcctcatcaattacaaaatcggtattctgagccagataaccgtgattggcgtggtcattctggacaacttcctgctaattcagatgagaggtcttgggaaaacctcagagataacagggagttttggtaatagacagcaggatgcttagtcaggttaaatcgtcatgaccaacttaattcccagtttgctagaacacaaatctcttctatgcaagggggaggacctactcctacgctggtcaaggccgaggttccgtggtctgctagaaggggaagtctatctgaaaaggatcgcgtcataaaaactgtgaaaggaatactgaataagttgactcctgaaaaatttgatatcctgaagggtcagttaatcgattctggcattacatcagctgacatcttaaaggatgtcatttcacttatttttgataaggctgttctagaaccaacattttgccccatgtatgctcagctctgttctgatctaaatgaaaagttgcctccattcccatctgaagaccctggtgggaaagaaatcacctttaagagagtgctcttgaataattgccaggaggcatttgaaggtgctgaaaatctgagggaggaactaaaaaggatgactgcccctgagcaggagatggagcgtatggacaaggaaaggctgctcaagcttcgtacccttggaaatatccgtttaattggtgagctattgaagcagaagatggttcctgaaaagattgtccatcacattgttcaggagcttttaggatccccagacagcatgttttgtccagttgaggaaaatgttgaagccatatgtcagtttttcaatactattggcaagcagcttgatgaaagtcttaaatcgcggcgtataaatgacgtttactttagccgattgaaagaattaagctcaaacctacaacttgtaccccgacttaggttcatgattcgggatgttatagagttgcgtgctagtaactgggttcctagacgcgaagaggtcaaagccaaaaccattactgaaattcattcagaggcagaaaaaaatcttggattgcggccaggtgcaactgcaagtatgagaaatccccgtggtggtgttcaaggaaatgccagctctgggggttttcctattgcccgacctggtgcagggggtttgatgcctggaatgccagggaccaggaagatgcctgggatgcctggatttgataatggcaactgggagatgcctaagactagatctatgccaagaggagatttgccaggtgttcaagctgctggacagagcaactctgctttactttccaagtccacgaccctcaattcaaaactgctacctcaaggtagtggtggtattataagtggaagaaatagtgccctagtacatggaggtggtacaaactttggtttaggacctgaggcagcacctcaactctcttcacctgctaaaacagccactcctgttcctgtatcctctgagaagccacaacatccagctgcaagattgaatactgataatcttcgctgcagaactgtctctcttctagaagaatatttcagtgttcagcttttggaagaggcattacagtgtgtggaggaattaaaatctccttcttaccaccctgaggttgttaaggaagccatttcccttgcacttgataaaagtccaccatgtgttgaacctgttgccaatctcattgagtatctgtatattaagaagattcttacccctatagacatagggactggctgtttgttatttggttctctactggatgatattggtatagatttacctaaagcaccaagtaattttggtgagataattggaaaactaattttggctgggggattggattgtaagctggtgagagagattctcaagaaggtggatgatggcatgttccagagagcaatatttgacagtgtggtgggggccattagatctgcatctgggcaagccgtgttggatgctcaaacatctgatattgaggcctgccagagtatgctcaagtgaatcaaaatttctgtaactggacgaacctgtcttcctttgctaccttaaatttccataccttcatcctcactttttgagtaaaagcattttgtattgatgttataaagtggagattctagtttcagctatttttctaaagctgtaaaattttatttttgattttttgagatcttagagatgttttttgagggaaaagtcaaaccataaagctatggattttattttcttgttagctaatcaggtgccatgtttctccgaaggtgtcccattaggggtccaatgtttttgtatttcattagtctcaatttacttatttttgttgacatagtaattgtttaacttgtcagttcataaataacattatcgttatatgctcatgctcttgttcccgtttgaagatttattttgccagattgttcagcttgatcttgcacttttcctcgtactcatgcgcatgcttttatctgtattgttatgaatggcctgccaaaaatggaactaaaatcgtcagttagtggttttttattcataaaggccttcgacaaaattattactgtactcattgtgcgtgttacgcaaaattacctcgatatttacttataatttttagtcccctggaattgtgttagggtgactttaatcaatgtttagttg

SEQ ID NO: 97104 - DNA, 2879 bp, Glycine max
  Clone ID: PAT_MRT3847_58697C.1
ccacgcgtccgctttggcgctgcgcagaagagagagaacgaacgaacgaaccataccacccttcaataatcttgtggcagtgagtagtgatatgcagcaaggtgatccaacggtcctaagcttgaggcctggtggtggtcgtggcggtggaagcaggcttttcgctcactcgtcctcctcttcctctctctccgccgatctccctctctcgcgccctcatgcctctttctctctcaagactggagattcacggtttgagggtcatgagcgtgtgcgatataccagagatcagcttttacagcttaaagaggctgttgaggtccctgatgatattcttaagattaaacaagatatagaagctgaactttttggtgaagatccaagttggggccgtgctgaaagcaatcttcctcatcaattacaaaatcggtattctgagccagataaccgtgattggcgtggtcgttctggacaacctcctgctagtacagatgagagatcttgggaaaacctcagagataaccgagagtttggtaatagacagcaggatgctagtcaggttaatcgccatgaccaacttaattcccagtttgcaagaacacaaatctcttctatgcaagggggaggacctactcctacgctagtcaaggctgaggttccgtggtcagccagaaggggaagtctatctgaaaaggatcgtgtattgaagactgtgaaaggaatactcaataagttgactcctgagaaatttgatgtcctgaagggtcagttaatcgattctggcattacatcagctgacatcttaaaggatgtcatttcacttatttttgataaggctgttctagaaccaacattttgccccatgtatgctcatctgtgttctgatctaaatgaaaagctgcctccattcccatctgaagaacctggtgggaaagaaatcacctttaagagagtgctcttgaataattgccaggaggcttttgaaggtgctgaaaatctgagggaggaactaaaaaggatgactgtccctgagcgggagatggagcgtacggacaagggaaggctgctcaagctacgtacccttggaaatatccgtttaattggtgagctattgaagcagaagatggttcctgaaaagattgtccatcacattgttcaggagcttttaggatccccagacagcaaatcttgcccagttgaggaaaatgttgaagccatatgtcagtttttcaatactattggcaagcagcttgatgaaagtcctaaatcacggcgtataaatgatatttactttagccgattgaaagaattaagctcaaacctacaacttgtaccccggcttaggttcatgattcgggatgttatagagttgcgtgctagtaactgggttcctagacgggaagaggtcaaagccaaaaccattactgaaattcattcagaggcagaaaaaaatcttggtttgcggccaggagcaactgcaagtatgagaaattcccgtggcggtgttcaaggaaatgccagctctgggggctttcatattgctcgacctggggctgggggtttgatgcctggaatgccagggaccaggaagaggcctggatttgataatgacaactgggagatgcctaagactagatctatgccaagaggagattcttcaggagttcaagctgctggatgcagcaactctgctttactttccaagtccacaaccctcaattcaaaactgctacctcaaggtagtggtggtattataagtggaagaaatagtgccctagtacatggaggtggtacattttctacttcctcaacaaacttttgtttaggtcctgaggcagcgcctcaactctcttcacctgctcctgttcctgtatcctctgagaagccacaacctccagctgcaagattgaatactgatgatctttgccgcagaactgtctctcttctagaagaatatttcagtgttcggcttttggaagaggcattacagtgtgtggaggaattaaaatctccttcttaccaccctgaggttgttaaggaagccatataccttgcacttgataaaagtccaccatgtgttgaaactgttgccaatctcattgagtatctgtatattaagaagattcttacccctttagacatagggactggctgtttgttatttggttctctgctggatgatattggcatagatttacctaaagcaccaagtaattttggtgagataattgggaaactaattttggctgggggattggattttaaggtggtgggagagattctcaagaaggtggatgatgacatgttccggagagcaatatttgacagtgtggtgggggccattagatctgcatccgagcaagccattttggatgcacaaacttctgatattgaggtctgccagagtcagctcaagtgaatcaaaatttctgtaactggacgaacctgtcttcctttgctgctttaaatttccatatcttcatcatcacttttagagtaaaagcattttgtattgaagtatgttataaagtgaagattccagtttcaggtatttttctcaagctgtaaaattttatttttgattttttgagattgtttgagggaaaagtcaaaccataaagctacggattttattttccggtaagctaggtgccaagtttctccgaaggtgtcccaataggggtccaatgtttttgtattacattagtttcaatttacttatgtttcttgacatggtagttgtttaactggtcagctcataaatatcattatcgttatatgctcaaaaaaaaaaaaaaaaaaaaaaaaaaaaaaaaaggggggcccccctattagggacctctccccccgggaattttttccgggcggggaccttgggg

SEQ ID NO: 97105 - DNA, 652 bp, Glycine max
  unsure (1)..(652): unsure at all n locations
  Clone ID: PAT_MRT3847_58698C.1
ccctataccatggnagctatgacgtacgcactgcaccgccgtacccgtaagccttggggatccttctagnagcggggcccgcccttnnntttttttcttttnnntttttttattattatttatttattttatttttattttatttttttatttttnttttttttttaaaaggagaagttctagcgggggacccgcttttttaaaatggtttttcattattaaaaaaggggaccaaaaataaaacccgagcttgtttaaaagcaatgggtataaaccggtgttgtttaaagggcaatctattaacccggggggaaaaaattttcccttggccactaaaaaaccgcctaataaaccccaggtttttaaaaacaattcggccccccgatgggatcgggggcaaccccccacaaaaagaccgctgggatttcaaaaaaaggcgctaaaattttcccaggggtaatttatcgctttcccaaaaacccccttttttccaaaaaatcctataagggattgggttttttattcggactttttaaaaaaaggggggaattttttaaaaaaaggggggtataaccggaaattgggatatatccaccgggaaaggatagaaccccgatgggcctttctttttagataagaaaaatagaccttt

SEQ ID NO: 97106 - DNA, 694 bp, Glycine max
  Clone ID: PAT_MRT3847_58699C.1
atccgaaacaatgtacctcgcacgtttaaatacatattacttcattaaatacatttcaaaattctgaagtttatgagaactggaaccaagataattttttacagaatttttttacagattaaaatcaaattttatcataattacatgagttaaaatattattttatcctacaaaaattcattcccaatctatcatataattacatttctctacatccacctgagatgagttcctcaataaggttgtccatgcttcaagcttctcctttaagttacataggttatcctttacaaaagaacttgtatcctcaaattctgcagcaacagcagcaatactggtgaattgattgcataacagttcaagcctctgcacatgaggttcaaaatgctgaacaccatagctagttttgatataagcatacttcctccgaatatttttcctccacctatccaaaatatatttacaggggacctccttcactctctcttgtgacagtactgcaagcgagtgcctacaaagtataccctctgaactcaaacaagcgacaactacattttacatcacaatctaccctgttattattacttcaaccacggattccttaggtttatcctctattatcacatcctcaatgacattatagcaacaaacagaaccatcatcagaggcaacagaaacattacaatctgccttt

SEQ ID NO: 97107 - DNA, 459 bp, Glycine max
  Clone ID: PAT_MRT3847_5869C.1
gtgtttttttttttttttttttttttttttcccgtcgttcagattttttctaatttttgggggcagacacccagaaaatcattagttgtaaaggagaaattaccaaacatggggtattataggttaagaaaaaaacaggggcagggggccgaattggattgtacacccctaattggctggattggttaataaaagggggcgaaaaaccctttgggttcaaggagggttaaatgtggaggccaaaactagctttggaggtacccggggggggtttactgagaaaaaaacctcaaacgacttttccggttttttttccagattaaaataaacaaaatctctggggaatagaactcctagaacctggtgaaaaaaagggcccccttgtaaagggaattaaacttgggaatcctctttatctcggcccaaaaaaccattttaatggggaaaccttgacctggg

SEQ ID NO: 97108 - DNA, 658 bp, Glycine max
  Clone ID: PAT_MRT3847_586C.1
gataatccaatatatcaaagcaagaaaaaatggggtccgcaaaatttgctttgatattaacaattgttattatctcaatgtgtagcatttccttggcacaaaattcgcccaaagatttccttgacgcgcacaatgcagctcgtgcagaggttggtgttgagccactcgcatgggacgacaccgtcgcagcctacgctcagcaatatgcggactcgaggatcaaagagtgccaagtagtgcactctcaggggccttatggggagaacctggtggccagtcccggcgatgttagcggcacggacgcagtgaaaatgtgggtggcggagaaggcaaactatgaccacaaggccaacaagtgtgtgaataatcaagagtgcatgcattatgctcagctggtttggagcaacacgtttcttgttgggtgtgctaggtcaaagtgtgacaatggctggacgtttgtcatctgcagctatgacccacctggcaattttcaaggtgaacaaccttactagttttaatgtcgtgttgaggagcacccaggttgtgtgccagagtaattaatctcctctcaattgggtgctatttgtttggagatttagaatattatattatgaggtgtaacattttcaagaatgttattcttgtgtgaatctaatta

SEQ ID NO: 97109 - DNA, 181 bp, Glycine max
  Clone ID: PAT_MRT3847_58700C.1
gggtttctttggatccttactagggctgctacatggaccccttatactcatgcgacaaggactaggtacttactactgaccaattgataagcccccagagtgcaagactccagtgtacaacccaccagtggacagaccaccggtctataagccataaccaccgggttacaggaccaaacca

SEQ ID NO: 97110 - DNA, 919 bp, Glycine max
  Clone ID: PAT_MRT3847_58701C.1
ttttttttttttttttttttttttttttttttttttttttttttaagggaaaaggggatagaagtaaaatacaagctattatatgatggggtatctatctgagcatgttcagtacaaacaaggtggaaatgggggtaaggggcgatggtgcattcctgtgataattaaaaaactatccatcacattacatataaatgaaaactttacctgtgccaaaatgtaatgtcaccctgccttcatatgtaaagatatcatactgtcacagaatacagttgcagctttgcgacatagtttaccctaattaacaacctgattcagagatcatcatgatcatcatgatcctttttctcgattcctagaagtttatgcaggtgcccgctctcgtaagcttcaacagtatcatctgagcctccaaggtgttttccattgatgaaaacttgtggcacagtacgcctcccaacaatattaaccatgatatcctgaatctttgaaccatcctctctctcgtcgagctcaacaacatgtggaacttggttcaactctttgaaaacagcttttgctcttctacagtacgggcaataggtcttggaaaaaatgacgatcttgtgggaagtgatggtttcgtcgacgaatttacccactgatgaagctgaagctgaagattggagagaaattgttgccaaagctatcagcaccagcgctgttaccgttttttttttttaataagggtctgaaggtaacaatgtaaataaatgtaatgtgtacccaaaacagggtcaaaagaaaaagaaacaaaaaaggaaaataaatgatacaatacaagaatatatacagcaacaaagcctgtctagaagaccaaaacaagggtagcccaacccaaacctaagcctcctagaaccttcttcaagcacatgatggt

SEQ ID NO: 97111 - DNA, 301 bp, Glycine max
  Clone ID: PAT_MRT3847_58702C.1
attggggggcggccctccctttttttttttttttgcagagataatgtcaatgcggaggcacatattatactctgaagcatagagcgagggctggatttgacaccaggacaagcagagagcggagacaggccatactatgatgggataatgcttgtaccatttcctatggcagatgcagatgaggacatcacaggcctaataatagagccgtcctagttgcatggagtaggatatataattcttaccgaaaagatggaagatctcagtttatccgtagagggcaagcccagcagggccttga

SEQ ID NO: 97112 - DNA, 807 bp, Glycine max
  Clone ID: PAT_MRT3847_58703C.1
cataaaatgaataaccactccattccaaacaatgtaaaatgggatagaagtaaaatacaagctattatatgatggggtatctatctgagcatgttcagtacaaacaaggtggaaatgggggggcgatggtgcattcctgtgataattaaaaaactatccatcacattacatataaatgaaaactttaccagtgccaaaatgtaatgtcaccctgccttcatatgtaaagatatcatactgtcacagaatacagttgcagctttgcgacatagtttaccctaattaacaacctgattcagagatcatcatgatcctttttctcgattcctagaagtttatgcaggtgtccgctctcgtaagcttcaacagtatcatctgagcctccaaggtgttttccattgatgaaaacttgtggcacagtacgcctcccaacaatattaaccatgatatcctgaatctttgaaccatcctctctctcatcgagctcaacaacatgtggaacttggttcaactctttgaaaacagcttttgctcttctacagtacgggcaataggtcttggaaaaaatgacgatcttgtgggaagtgatggtttcgtcgacgaatttacccactgatgaagctgaagctgaagattggagagaaattgttgccaaagctatcagcaccagcgctgttaccgcgagtctcgcaaccatggttgaattggagttggagcaagtgcttgagaaggacaagactttggagttttcaatattgttttttgttctccccttctgtcgtcttcgcagccgtacggacgcgtggg

SEQ ID NO: 97113 - DNA, 781 bp, Glycine max
  Clone ID: PAT_MRT3847_58704C.1
aggctattttaccccaaaaacaaacattgaaaagtccaaagtcttgtcttctctagctccaattcaaccatggcttcgagactcacggtaacagccttggtgctgatagctttggcaacagtttctctccaaacctcagcttcatcagtgggtaaattcatcgacgaaaccatcacttcccacaagatcgtcattttttccaagacctattgcccgtactgtagaagggcaaaagctgttttcaaagagttgaaccaagttccacatgttgttgagctcgacgagagagaggatggttcaaagattcaggatatcatgattaatattgttgggaggcgtactgtgccacaagttttcattaatggaaaacaccttggaggctcagatgacaccgttgaagcttatgagagtggacatctgcataaacttctaggaattgagacaaaggatcatgatgatcacgatgatctctgaatcaggttgttaattaaggggaaactatgtcgcaaagctgcaacggtattctgtgacagtatgaaatctttacatatcaagacacggtgacattacattttggcgcagctaaagttttcatttacatgtaatgcgatggatagtttttcaattatcacaggaatgcaccccttaccccatttccaccttgttttgtactgaacatgctcagataggtaccccatcacatcaattagcttgtattttaattctatccctattttacattgtttggaatggagtggttattcattctattaaaaaaaaa

SEQ ID NO: 97114 - DNA, 547 bp, Glycine max
  unsure (1)..(547): unsure at all n locations
  Clone ID: PAT_MRT3847_58705C.1
ctgtctctgaagtgagtgaagtaaagtaatagcccccactactctcattgcctaaagcctcaagttggagctttccccggtaacaagagtagaaagtggttcttacctcccccgatgatctagcttgtcggtctgtgtcctttggccccctatctctaatctaaaggggcgtaagcactagctgccctaagaagcaggtcccactccgtccaaagcttgcagctagctctttttcactttagaataatacctttggataaatccaattcttgcttgctggactattgtggtctcactaaataccatactcttttcttttaaaatcttcgtaggcagggactctcgccgcgacccggataatgcttcctttttgacgatgccggatcgatgccaatgcccacctctttggggagccaacgagtccacccaaattctgtactgattcgctcgctttgtccaccttcgcctcttcaagttggctccttctcgaaatgactaaagtctgaccaagactggtccttcgtagntctttcgccttatcaggctc

SEQ ID NO: 97115 - DNA, 466 bp, Glycine max
  Clone ID: PAT_MRT3847_58706C.1
atcggaaaaaagatcagatatcttgagatcttattgatgagatgcatgataaaggtgaacctatcaatataatcaagtcacctatagttccttaattaatagacttgagaatgcacaacaggttttgatcatctattttcttatatacctattttctttcaattttagtggtggagtaaggagtaacctgtcatgtacggttttcatataacttgtcctaaagttttacagaaattaattaaattgctaaactttgttggtgccatgtcgcagcgcgcaatcaccttaccttttaaattgattagctaaaatttaatgcacaatgccactagattgaatttgcatgactggtctactatgatttatttctttttttcctttgtttcttgtttttttatacagtgaggaataatttcaaaactacactcatattttattgtcatcacagagtttcctcacgttatat

SEQ ID NO: 97116 - DNA, 399 bp, Glycine max
  Clone ID: PAT_MRT3847_58707C.1
aaaccataatataatataataattttaataataattaaataataaatttaaaactagggactaatcctaagttttaataaagtacctacaccaatactaaatctacaattaaaacaaataagctaaagtgattatcatcacgaccataccacacctaattaaaggcaggggccgtgggaaagcgaaatgattatcatcacaaccataccacacctagttaaaggcaggggttgtggaatttacttaaaactatgtcataatcgtgaataccaaacacacctaattaaaggcatgtatactgtgtagcaagtttgcaaatgatttcgggttaaaaattccaatggttccctattcagtttgctaacttgagggcgggcgatgctgctccagcctcgagcc

SEQ ID NO: 97117 - DNA, 244 bp, Glycine max
  Clone ID: PAT_MRT3847_58708C.1
actcgagccgaatcggctcgagctatgcaggccagcttttctttgactggcttggtgataaactgggaaggaaacgtgtctacggaatgacccttatgctctggtgatatgctcaattgcttctggtctttctattggcaaagaccctaaagctgttatggccaccctttgcttcttccgtttctggcttggatttggcattggtggtgactaccctctttcggccactatcatgtctgagtat

SEQ ID NO: 97118 - DNA, 593 bp, Glycine max
  Clone ID: PAT_MRT3847_58709C.1
ctccctttttgttccttcaatttcgtgctcccccctctctctttctctccctctttcttttcctccattgaagcatcctctccaagcttcttatccaaggctcatcttggtggtgaagctccttcttccatggcttattccctagtggatgacacctcctctcacctcttctcctttgtcttccgctgcatctccatggtggaaaatcaccattaaaggacctcattgaagctcaaaggttcagtctccatagaagctccacaagcaagcttccatcacatagtgcatcatgttttgaaccgtctcagctaacaaggatcatcccgatgttggatcaatttgcgccattcattcaaggtttcattcgtgacgttgtggatgtcaaagcggacgataactgtggatatcggtccattgccgctttattaggtatgggggaagattcgtggccgttagtgcgtaatgaattgattaaagaacttggcaggtggtcgcatgagtacatgaacctcttcggtggcacagagagatttgaacaattaaagttgtccctacttgttgataggtttttgaaggtatgtttttaggttttt

SEQ ID NO: 97119 - DNA, 859 bp, Glycine max
  Clone ID: PAT_MRT3847_58710C.1
aagaaggcgacgggctcgaagaacccgctggcgctgcagctcatggcgcagggcctgtacaaccacaccaccgtccccatcgacgaggaagaggaggaggcgcagaacgccatgatcctggcggcccagcagcggcaacagcagcagcagcaggccatgtagtgcgtcgaggaggataaggacgatctgtgagctcgcctgaaaagtgacctcccacatgagtgtgacgcctggtgccacaagaggttcgactggccaagcaacctcttctttgtttttgttgttgctatgaggttgtgaggatatatttgccgccattcgtgggaccttgtcatcaaccagttgcatgctcatgtatagaaacaaggctgatctttttctttctaatttaagtgtccattgcggttaattatagaatgtgttgtagtttgttaaattttaatggtatgaagtacttttgtgtagcgtctgtgtgatcaatgagcgtacgcgctgtgttttctatgcaacaggatggagtgttggagtagtgtcctgtgttttaccaaagataaatgttatttagtatttatatgaaaattatctgacacgttgtggctttaatactgtaagatcgtttattgacgtgccaaacttaatttattactgactgctgagcgtacatttcgtaattgtgtgatatctttgattctacataaatataaatatatataaatattactgaggaaggaaatataattaactttattcgagttatctgtgtatacataagaatagatgaactgcgtatctattaggagaaaaccttgtaaaatgctacaatatttagaaaagcaaaaccaaatgtacagtgtaccag

SEQ ID NO: 97120 - DNA, 579 bp, Glycine max
  Clone ID: PAT_MRT3847_58711C.1
tcacttcattcaaccgtggagattgtgtttcagaatacagcgattgtcggtgtgcagaaccatccaattcacattcatggttttagtttccatgttttggctcaagggtttggaaatttcaactccaccgtagattcaaccaagtttaatttggtgaatcctcagctacgcaacacaattgctgttcctgttggaggatgggctgtcattagattccaagcaaacaatccaggggtatggtttgtgcattgccatgtggaagatcatgtgccatggggactagacatggcttttgaggttgagaatggaccaacttcttcaacttcactccctccaccacctgttgatctgcctaaatgttacgaaggagattcgagagtgcaacaccaccaattccgatttttcttctagttgttttatcaatatatctagtacttaaatttcatgttttgtagaaagccaaagtggttatctacgctacgtcggataaaataaattatcatatacaactatttaggaaagacaaagtgagataatgtaactgataatacaaatcaatgaaataaataagagttgtct

SEQ ID NO: 97121 - DNA, 487 bp, Glycine max
  Clone ID: PAT_MRT3847_58712C.1
aaaaaaattatttttatataattaaattaaaaatagagagaaaaaaaatataaaagaaagcaagctaacttgggcgtgcatgcaaaagtatcaagttttttataaagaagcggggggggccgttttaaaggatcaaggtttacaaccgcgtgattgggaagaaatatgttttttatgggggcacttaaataaaatcacttggccccctttttacaccgtcgtgattggaaaaaccttggcgtcccccaccttattcgccttggggccatccccatttcccatgttggcttaatagcaaaaaggccggaaccgatcgcctttcctaaaatttgcccaccctgattggtaaaggggacgcccccttaccggcgctttaccctggcgggggtgggggttccgcccagtgggactgtttacttgccaggcccttaggccccgtttttttccatttttacctttattttttggccaggttttcgggttttcc

SEQ ID NO: 97122 - DNA, 921 bp, Glycine max
  unsure (1)..(921): unsure at all n locations
  Clone ID: PAT_MRT3847_58713C.1
ccagccagcagtccccattgctgtgccagagaagcattcattcattcatcttctaaaactttgatcatttcgaggatcttctgattcgcagttcgcactcggaactggtgagaatagaaagaaaaagaaactttccgattccatcctcgccgccattattcggtggccgctgcatgcacctttcccttttctcatccaacaccttctcagatctactccttttcctcttcccaaaatcattctccgattgcgcctagggttcacacttcgaatcgccgttttctgtcatgaattgggctccgttagcacacctcgcctactctcgctgacggaggagattcgaaattcggccgccaaatggtttcaatcttgttgtacatcgtcgctttcatttgcacgtgcggagccattgcgttgtccttgcttcacatttataagcaccttctcaattacaccgagcctacttatcagcgcttcatcgttcggatcgtttttatggtcccggtttatgcgttgatgtcattcttgtcactttttctaccacagggttcaatctattttaattcaatccgggaaatctatgaagcttgggttatttataatttcctatcgctatgtcttgaatgggttggtggtcctggatcagtagtcctaagtttaactggacgggttctcaagccatcatggtttttgatgacctgttgcttacctcctctggcgcttgatgggcgttttatacgtaaatgcaagcaagggtgcttgcagtttgtgattntgaagcccattttagttgttggtacacttatactttatgcanagggaaaatatanggatggaaatttcagtccaaagcaatcatacttgtatcttacaatcatctatacattctcatacacaatggctctctatgctcttgctttg

SEQ ID NO: 97123 - DNA, 584 bp, Glycine max
  Clone ID: PAT_MRT3847_58714C.1
cgtccatctcactaggatgcggcccgtgttctgttgtttatcttctttttgggtgaacgggaaagaaatgcattgatgatgactaggacagtggtgaggaagaaaaggattgtagttgttgctgagagaatgagaccgagtgatactcggcgttggggaaggacttgctatcagtggatgtgatacatacgcacgccgtctcatcttaaccagtccagaaggcggtggttcaccctatcgtgcttctcatcatcgacgacaactacagcggagtcgcccaaaacactctcaagcgcgtcgactgtgtattgctcggcttctccttcccaggcaaccgttaacctcaccaacatggtacgctcgtgccctttgaagaagatgacgccgatcctagcatctggttactcgaccacaagtaccatgaatctatgtttgccatgtctcttagaataaatgcaaaggagcatgttgccgggtggtttacctctggtccaaagctgcgcgcctatgatcttgacgttcactgcttatttaatgactgtgttcccactcccggcttggggatcatggatgctggacctaag

SEQ ID NO: 97124 - DNA, 512 bp, Glycine max
  Clone ID: PAT_MRT3847_58715C.1
acagagtcaaaatgactgtattcaatattcatatactcactaggttacgtgagataagaaaatatatttgagtggaaaatgtaacccgtaacgtcatattacaggaagagagggaaaaaaaaagtagaaagtattacataactataggaatgttgttgaaaaagtctatctattactattactgttagctagaaatccgtttagctctgcaataactgtccttctttctgatggaggttcctcgtggcaccacgaaccttcatgcttataagcaatagcatggccatcacgaaaacacagatgctagagcctataactgcacaaaatcgtcaagaaaattgtaaagccaacccccacaatctaaatatttacgaaaaagaactactaatgtatctaaagaaacagtaatgtcaaaactatccaaagggtccaatccaaatttccaagaaggggaaaagggagaacaaagaaattaagtttaatttacctatattacgcgatttgtaggaacc

SEQ ID NO: 97125 - DNA, 220 bp, Glycine max
  Clone ID: PAT_MRT3847_58716C.1
cccacaccttctactcaagatatatatatttatatcaacacacacacatactatatcctgggtatatttcaaactttctcatctcataactaacccacttctttccacatcctctaatacatttaaatcttatgaatctgcaaacatatctactaacgctcctattcttctctcatcaaaaccacctgtacctactacatcttctactactatatcaaat

SEQ ID NO: 97126 - DNA, 1335 bp, Glycine max
  Clone ID: PAT_MRT3847_58717C.1
cggcttgagcgaacaacaaaacctcggtcaagcgttgaccaacatcaacctcgtacaaccacaaccacaactacaaccacaaccaccggtacaacaacaagtgacaccacctaatatagtaccagctcctatgcaacaaccactgcctgtgattgttacacagcctgtggtgttgccagtggtatcacaagtgaccaatatggagataatgaaagccgataataataacaacaataacaataataacaactgcgaaaatttcttgccaccgagttcttctcggtggccgaaagtggaggttcaggcattgataaagcttcgaacgagcatggatgagaagtatcaagagaatggaccaaagggtcccctctgggaggagatctcagcctcaatgaagaagctggggtacaaccgaaacgcgaaaaggtgcaaggagaaatgggagaacatcaacaagtacttcaagaaagtgaaggaaagcaacatgcggagaccggaagattccatgacgtgcccttatttccaccagctggacgcgctgtacaggcagaagcacaaagccgaagagagcaccgaggcggagaaggccgagagcggggggggaccaatgatggtgctagccggagcagcaatggccacctcagcagcaggatgatagggacatcacaatggaagacatggagaacgaatatgatgaatatgaggaagagagggaaggagaggaagaagaagaagaggatgaacaggaggaagaaggtggtggtgggaactatgagatagtggcaaacaaaacaagtggcggtggtggtgctgctgcttcagtgggggcttcaacggagtagtgtggggtgggtcaaaaaaagtgcaggggttgtcggaggtggccattgtggtggagaaatttaagaaactgaatattcaagtagggtgaagttacacatggcaatggcatgggtaatggtggtatcgacctgtggtggaaagatgaggtttgctttggttggttggtactttgttgtagcatatagtcagtaagattatatgtttcttttttctgttttataaaaaaagttgtttattttttgggagaataaataaaagtccgatcagagagggaatttaagatagagcccaataaagaagaagaggggccttaattaaggttgtattttttttttttttatcttcatcttgttttttatgttcgttcctggtgctgtaaatgggaggagattaattcgggttttgtccttttcttatctctcagttttgacatcttcttacccttccaatgactgtcattgacttctttttcaattcccacatttttttttt

SEQ ID NO: 97127 - DNA, 517 bp, Glycine max
  unsure (1)..(517): unsure at all n locations
  Clone ID: PAT_MRT3847_58718C.1
ttgngngagaagagtaaaagcgngggcagccnnncangggttgctnatnctgtataaagacctcaggcgagtatcaatatgccatcacacagaaacagcaagaggtttggagggtgaaaccactctgaattggaagccatggccgcgagcttttgagctctcctcctgaggagggttaggncacccacnaaaaaaaaannacaagaaaaaacacccaaaagagagggggaggagcgacaaacctttttgtattacagggagcaaatagagaaaaggaaacccggctggaacatagagcttcaccctgagaccccggaatcctcagatgaatggcgtaaataccttactactcaggcggggcatatacaggtgtgtaacacaagaacaacaacagagaaccccagaataagctgcgaagaaccaacttcgtctcatcacatgagtttaaacctagagctaaacatgatgtgggaatcaccgatgaaaaaagaagaaagatatgggtatgaactgaatg

SEQ ID NO: 97128 - DNA, 755 bp, Glycine max
  unsure (1)..(755): unsure at all n locations
  Clone ID: PAT_MRT3847_58719C.1
atcaacattagtcggtgggcaagtgtttatatatatatataacaacaacaaccacgccttatcccactaggtgggtcgactacatggatcaacttccgccataatgttctatcaagtgttgaaattgataatctccccatgcaaattgatgatacgcagtacccaaaaaccttcttctatgaacaagaccttcatcctggcaaaacaatgaatgtacaattcagcaaaagtccctttacacaaccttttacaatattgacatggttaaagggcttgaaaattaaagacattgataaagaaggatatacttttgatgagctatgcatcaagacaaaacctaatggagcagagcacaagttttgtgcaaaatccttggaaacattaatcggttttgcaatttcaaagctgggaaagaacattcaagtactttcaagttcctttgtgaataagcaagagctatacaaagtggaaggagtgcaaaatcttggagacaaagcagtgatgtgtcataggctcaatttcagaacggtggcattttattgccatgaagttcgtggaacaacagctttcatggttccattggttgctggcgatggaaccaaaactcangcacttgctgtttgtcactcagatacttctggcatgaatcgtcacattcttcatcaaactatgggagttgatcctggaactaacactgtttgtcatttccttggaagcaagccattttatgggtaccaaatttactatggacactg

SEQ ID NO: 97129 - DNA, 186 bp, Glycine max
  unsure (1)..(186): unsure at all n locations
  Clone ID: PAT_MRT3847_5871C.1
cnagaacaagggcaaatnctgctattcaccaatattcctaatnttgtacaaaactcttgttgtaagtctatganatnaaaatnntngggaacngnattttttatttatgaaaaaattncaccngttacggcggttcttcnnnttccaaaaccanacnaaagggggggccgccngntnngngaaccc

SEQ ID NO: 97130 - DNA, 503 bp, Glycine max
  Clone ID: PAT_MRT3847_58720C.1
tactgctgatgtgaaggcaaattttagaatagtagcagcaaatcaccccattgtccctgatgcgaatgggatcttgtctaagaaaggagtcattatattacctgatatttatgccaatgctggcggagtgactgtgagctactttgaatgggttcagaatattcaaggtttcatgtgggatgaagagaaagtgaaccgtgagctgaagaagtacatgaccaaagctttccaggatatcaaggcaatgtgtaaaattcacaactgtgacctgcgaatgggggcattcactctaggagtgaaccgtgttgcccgtgctacccttttgaggggttgggaagcataggtttactacatgagaagtaggattttacaaggttgtgtttttctttctttattgtcttagtgttagtcaaacaataacaatattagtcatgtgagacttgccaataaaacattattcttgccattgggtcctgcgaatggaagttactaccatatttgtt

SEQ ID NO: 97131 - DNA, 1213 bp, Glycine max
  Clone ID: PAT_MRT3847_58721C.1
ctcgagccgattcggctcgaggctatccctcattgattgcaagaatggaactccgttgcttactgttctccatttctgttcttttcgctgtgtaataatcaacattagtcggtgggcaagtgtttatatatatatataacaacaacaaccacgccttatcccactaggtgggtcgactacatggatcaacttccgccataatgttctatcaacttggtcttgcaagagaaagccatgcccaatcatcaataccagacgaagatttttggcatgctgtttggccaaacacttccattcccagtgcattgcgagagcttctaaagcatggccgtgaaggtgttgaaattgataatctccccatgcaaattgatgatacgcagtacccaaaaaccttcttctatgaacaagaccttcatcctggcaaaacaatgaatgtacaattcagcaaaagtccctttacacaaccttttacaatattgacatggttaaagggcttgaaaattaaagacattgataaagaaggatatacttttgatgagctatgcatcaagacaaaacctaatggagcagagcacaagttttgtgcaaaatccttggaaacattaatcggttttgcaatttcaaagctgggaaagaacattcaagtactttcaagttcctttgtgaataagcaagagctatacaaagtggaaggagtgcaaaatcttggagacaaagcagtgatgtgtcataggctcaatttcagaacggtggcattttattgccatgaagttcgtggaacaacagctttcatggttccattggttgctggcgatggaaccaaaactcaggcacttgctgtttgtcactcagatacttctggcatgaatcgtcacattcttcatcaaactatgggagttgatcctggaactaacactgtttgtcatttccttggaagcaaggccattttatgggtaccaaatttagctatggacactgcctatcagactaacattgttgtttagtcaattcatcttgagaatgagattgtgtacgcagtaaaaaataaattattatgtgctgtgtgttctgcaagtacctagctatgtgcactcttaagatttgtttccctatagaagcatcatcctgtgatcagtgtgctttgatgatgctaatttgatgcaataaatatgcagtgtgtttgttggtattctaatattttcttttttcttct

SEQ ID NO: 97132 - DNA, 365 bp, Glycine max
  Clone ID: PAT_MRT3847_58722C.1
aggtttcgttaattaattaattccaatcttgttattatgttgttataactaaaaaaaaaaaaaaaaaaaaaaaaaaaaaaaaaaaaaaaaaaaaaaaaaaaaaagaacaagaaaaaaacaagaaaacaaacaaaacaaatcttgcttaagagaaacaaaaataacaatatatgggcaccaaaaattataaaaaattgaacacagatggacccccccctttacaaaacaaaaatatatctttggaccaaactagaatttaattacaacttgtaatagatatgaaaaaggttcagaacaatatgtcaagtatcaaaaaattaataacttgaaaaacaaatgggaagcccaatttaaaaatgtataaa

SEQ ID NO: 97133 - DNA, 214 bp, Glycine max
  Clone ID: PAT_MRT3847_58723C.1
aattcttacatttagcaatgtgtttttagtcctttattggagactaaaagcacataattttaaaccaattgaggtcagatttggtggaaggggctagtcatccacaaagtagcaaatctagtaattattatcagtgtctttgatggccagacatgtctgtaattgttgcatggcacttccttgggccactggctatgccagagctcccacacaa

SEQ ID NO: 97134 - DNA, 267 bp, Glycine max
  Clone ID: PAT_MRT3847_58724C.1
atgattttttgaaaaagaacacacacttcacacatgattaccccagtgcaaagaggtgtggaaattttcaacttggcagagcttactcaacaagagggtcatgcctaatttcctttattgaattaaaccaacgatctagctaaagaaaacacaaattccatatcatcgcgaggatgccgcattttctaaagatctggcaggtacctgtggaacagaaaaagccggcctaagagtattaccaactatttctaaaacgcgtcacaaccc

SEQ ID NO: 97135 - DNA, 308 bp, Glycine max
  Clone ID: PAT_MRT3847_58725C.1
ctcgagccgaatcggctcgagctcgagcggctctagcggctcgagctcgagccaaatcggatgcagagctattgatgcttaaggaattcccaacacttatcagtcaagcaacacatttgctggctactacctagccaacatgctacaagctggaaacacaaatgcccccagaaacaaagataatattctaggagattgtacaaccaaatctgtttataacacaggaaacgatatctgaacttattcaattaaatctgcggatgatacaagaaccttgaacgaaattgtttacatttgaccaccaaata

SEQ ID NO: 97136 - DNA, 441 bp, Glycine max
  Clone ID: PAT_MRT3847_58726C.1
aaaaaaatacatcattatatatatctggacttcgttcatgcagggattcatctatgcaaagtttcaacctgaaatgtccactaggctaaggaccatgctagagatacctgcatttggacaaagtgaggagtcccaatttaaagattttaatttaaagaatgaaaaaaaaaatgggagggggggacgtatacaatggcccattggttagagcgtttggaccttaaagggataagaaaaattttgcttaatgcatcagccggggcaatatttttctctttttattggtgaggggaacggggctatattgggggaagtactccgactgtgcatgagtattggtgctcactagaccctgggtgagttccaacaagggtttttagcagttttgaggagaatgtgtctgggcctgtgttgtgaaaggccctggttttctgatagggg

SEQ ID NO: 97137 - DNA, 460 bp, Glycine max
  Clone ID: PAT_MRT3847_58727C.1
tttaattttgtgaaaccgtgatcacaggtcgccgcaccttactaccggaaacaaaagcgatcgttacttgatttcaggaatctgccaatttcttgctacttcttggaggacgatttcttaagggaaagaaaatcactctctgcgctggccacagacttcgggagtcattttcttttccactcttagatcattcgctgaacactctactatttgatataggacttcgcgtcagatttaaactttatctgtttctttctcagttatctgcttaatgtcaagttcaagctggtgaaatcttggattagtgctcccactctactatctggtgtaggactccgcgggtagacttttctattactgtccttctttgactctctggttcatactgaaccaaattgacgtcaaagtggtctttatagaaaaacacttgggacgttggtgcaaatgtttgcttacgtta

SEQ ID NO: 97138 - DNA, 415 bp, Glycine max
  Clone ID: PAT_MRT3847_58728C.1
gtattgggaggttatttccgtattcgcgcagatattatatgtgatgttcaaaaggttctgtaatttacacaggtgatcaatggagggggacaacagcccgaatggaaaaagagaggggcccccaaaaaaaaaaaaaaaaaaaaaaaaaaaaaagtgccagcgaaaaccacagacaaggggaaaggaatggcccccccccaaaaaaaaaaatcaaaaaaaaaaaaaacccactgggaaaattgatgccggggccaaaaaaagttgggtgccaaaccccccaggggaattttcacacacggaaacaccagggaacccaaatttacccgagggggcgacaaaatatggttttaaaaaaggggggggccaacaaataggggaaaaaaaacccagcggtggaaaaaaaaaacgcccccac

SEQ ID NO: 97139 - DNA, 336 bp, Glycine max
  unsure (1)..(336): unsure at all n locations
  Clone ID: PAT_MRT3847_58729C.1
agtcgcacgcacgcgtacgtnagctcggaattcgngctcgagctgaagcgtttgccctctgcattaattttgatcggcagtctgcaacaaccttgttcttcagtncttcannccantcaggtnncgcttttcaanntccctcgcctccaaagctatanttgcgagtngcagnactcannagatngganntagggtcggtnggaaccaggtatttatgccnnccanngacattanntnncggtggtggaggcccgggcttngatgcttaagggtgtttaatagctcgccgntgcngtcaaattanccatgggccctaaggggcgtaatgtggtattn

SEQ ID NO: 97140 - DNA, 435 bp, Glycine max
  Clone ID: PAT_MRT3847_5872C.1
atgatgttggctaaggctttgtcggggaattcgggtccacttttgcttagtagttctgttttggagaggggtagtattgaggaaattcggccttcaagtagttacgagaccccgggttttgccaggtctatttatcctttgcttgaggatttgtatagcatatttggtgatcttccgtcactcgggaaggcactggcacatgtgcagaagatgttgttggatgtgaatagaggggaggttcttgataaaagtaccgtttctgaggtctatactttccggattgctgttgaggggcttagaattgctctgaataataaggggttgaggcctgttaacgggaaaggtgctgcgaagtcggataagattgagttctcggatcttcccatggatgacaagtcacacgcgctcttcgcacaggctatccgtagccaggct

SEQ ID NO: 97141 - DNA, 2497 bp, Glycine max
  Clone ID: PAT_MRT3847_58730C.1
cggaattaccgggtcgacccacgcgtccgccctcccctagctttgtttctgctctgccccttccccttcttcacttctcctctgaatgctaatttgaaccaaagcttgcaactaggtaaagacacatacttgaaaatgaggggtcctttgggtgcagtaataggaagatacccatcaagtgatggagttacccaaatgggtggaattataaggcacaacaggaaatgcagggacatcactgttctagtgatcttcatagctttttggatagcaatgattgtcaactccggttttgctttcaaccaaggaaacccactgaggcttacttatggacttgactacaaagggaatgtgtgtggggacaagcatgcacaccctggccttagtgaattagagctcagatattggcaaaatcctaatcaggtttatcagagtggattgaaggatagccaattcaaactggctgatgcccgcagtatatgcttgtcggagtgccctatcttcagataagattcccttaattgggtgtgtgattatcctgaaggagatattcgtctttcgatgaaagattggattaataggaactatgattattttgagttccttacaccagaaatgagaaactcgtctcttcaactacagggtccttgttatcctgtcatatttcccactgtaaatgtttactggagttgccaatttattgctcgggcgtcaaatacatctttgaagcattggcagcagatgggtggagttaacatcaacgaagacattgttattgacaagtcaattcacaagtctattaattctcggtcagctgtcttagagagatacatggcagacataggaaaggcatggcctgtgctgattgtctgcggagggattttgcctctttttctgtctgtgatttggctgatgatgattcgacattttgttgctgctatgccttggataacagttgttctctttaatgttctaataatatctgtcacaatgttctactacctaaaagctggatggattggaaatgatgcgatttctcccatcattggtgagcatgacccatacattagtgtatatgggagggagctgactcatatacgagttgtcactatacttatgacctttatcatggttgttgccattcttacatcaattgccattgttcgccgcatccttatggcaacatctgtcctgaaagttgctgcaaaagtgataggagaagttcaagccctcattattttccctctcataccatatactgtccttgcagtcttttacatgttctggatttcagctgctctccatttgttcagctctggccaggttgttcagaataattgcaactctaactgctgcacatatgatcttattgcaaaacgggtaaactgtgatcgttgttgtggttatagcattcattacacaccacatattggagttgccatccttttccacctatttgggtgttattgggctacacaatttttcatagcttgctcctcaacagtgattgctgggtctgtcgcctcatattactgggcacgcggtgaaacatctccagaaattccttttctttctgtcttttcctccatgaagaggcttatgcgttacagtcttgggtctgtggctcttggctctctgattgtatcattcgtagaatcaatccgctttctgcttgaagctattcgtcgtaaactgaaagtctcaagtcatgggcatgacagctgcttaggcaaggctgcataccaattttctcaatgttttctcaggtgtattgaatggaccatcaagtcagtaaaccgaaatggttacatcatgattgctataactggcaaaagtttctttagcgcttcttttattgcaacagaactgatcatgaataacattctaaagattggccggcttaacgtgataggagatgtcattttgttccttggaaaactgtgtgtcagcctctcatgtgctttgtttgcgttcctcatgttggacacacacaagtacaactctgctcataacaagacctcattctcccctcttacctgttgtggtttgctgggctcttggatacattgtttcaacccttttctttgcagttgtggagatgtcaattgataccatagttctctcattctgccaggattttgaagagcaccaagggacagcacagtatgctccaccccttctcgttgagaccctcagtgaccaaaatgagatgcagagactcacacaaggaccctaaggaaacttgtccttgtgtaattttcgctaaatattacaacatttatatatttttattaaggtgcatatttttgccaccgtagttctgttcttacatcacttgtatatatattgtctttagtgaaaagatacttgaggtttagaaaaaaaaaaatcgttactaaggtgggataggcgagttcacctttagacaaatgggttatcattagcacaaacaaaacacattcactatcctttccccatatgattataatattttctc

SEQ ID NO: 97142 - DNA, 566 bp, Glycine max
  Clone ID: PAT_MRT3847_58731C.1
aacagttgctccatctaccactattcaattctctatatttaacctctttccctcattctcttctttcactttcacttcctcatggcatcaacaaagagcatgttcatgtccttcgccatcctcctcctcctcgctctcttctccgccaccgtgtccgctcagggctctccaacaccggctccggatgccggagcagctggatcagtctcgagctctgcctccgtcatcggtgctgcggttgtgttgtccatgcttgccatcttcaagcactgagtgatccattcatacgtgttattgtggttttgtttacaaaactggtccgtttctatatacagctttaccgagtgatgtttatcgtgagttttgtgtttgtatatagtgtatactggtgacagaatgagagaatttttaaggtatttatattttacttgtgttatttattgtaggtcatagggggaaataagaaggatcttatatatcctttcctacgtttattatttttctaggctttgttgtatattatattggaacattgttatttgttaaaatgtcccttcttatttccc

SEQ ID NO: 97143 - DNA, 394 bp, Glycine max
  Clone ID: PAT_MRT3847_58732C.1
aaaaaacttgtgcctgcgacgaccaggggtttctgacagtgtggcaacccttgtaaagatggagaactaggcttgtgcttacatggcagattgggacacatcgcagatattttacagctcatgatgatgatatccctagtgcacattttgaaaatatggatgattgacaatgagtactttggttcatttttttcacattaggagtttggggttattacatggatagatgaatgtctgcagtgccattttatatgacgattaaatacaggatagatatttatatttaaaagtgacacccatgatagtttgttacttgcgtatgtattaatttctactcttgctagagatattcgatgactatgattgtcggtttgagcacaaatactcattctga

SEQ ID NO: 97144 - DNA, 549 bp, Glycine max
  unsure (1)..(549): unsure at all n locations
  Clone ID: PAT_MRT3847_58733C.1
atacaggccacgagcccacactcgcttccctgcattgctttgctcaactcgttagagctcaaagacaccatcgtttcaaactccatcatcttccctcttagtgatatctcgaattgctccacatacattctcccataatgcactccatctccatcgctttcaccgcccttgttggcgccgccgcagccagcgtcaacggtccttggcaaagccacagctcatggggtacggccgtttccagcacgccgagcgcctctaagaccatcatctcggacccgacaatcaagccgagcggcactggtgtcaccatttctgatcccacgatcaagccaaccgccactgggggccacaacaccactgagacggagactttgacgaccttcaccactgtcaccacttgccccgtcactcagacgacctcgggccatggctctacctacatcaccacagctntgactacatccactgtcgttgtcacctcttgcaagggaggttgccatggctggcagccacaccccactggtgcccccaattcgacttacgtgccca

SEQ ID NO: 97145 - DNA, 269 bp, Glycine max
  Clone ID: PAT_MRT3847_58734C.1
ctttcattcatgcccaattccatggcacctttactcattaatcaactctctgtagcccttgggggtcttcgagccataaacacactttccaccactgtgtccatcactgaaacttccaatgccagccaaacactgagctgtgtcatgcgacatctaaacgaacaaggacaatcaaatgtcgactgtaccagcttcgctcaggctcaggctataacacttgacgtcagtcccagtgttgctgactctcagattgtgggcggcaagtcgtg

SEQ ID NO: 97146 - DNA, 526 bp, Glycine max
  Clone ID: PAT_MRT3847_58735C.1
aagaacggctgcaagaaattgttgacatagtcattgctgccaatcccaatgaaatacgtggcttcattgcaatgcttgttggcagctgcctctcctatgtttgccgaaattacttctttggttttcttgaaattgtttatttgatcgtcaaaagataatctctcaataaagtaaagtccagtatcattgagaattcctgccccaccagatgcatagtttacacctttgagtaaggtatcaacgttctgagtcgctgacagataagctggtggtgatgtgattccaagctttgcagatatgaaatcaccaatagtccttccattggtgaatcttccagtagcctggccaccactgtagtcaatcccataccagggatagttagatttggctaaagaatattgtagaaaattattgtttccaacatctgtcaaggagtcaccaaagatatatgtcacaggcagagctgccaaagcaattgatgcaagtgagaagatacatgcagcaaaaactagccttggcatctttg

SEQ ID NO: 97147 - DNA, 469 bp, Glycine max
  Clone ID: PAT_MRT3847_58736C.1
gtgagtggaatgagaagtgaatggaaaattgaatttccatgatcagtggggtggttagaacttagaagagaagagaactagagaagtgattttttgcaaagacaaagcgagggtttctattgttttgttgagaattcaattcaaagcttttgatttgatgatcataacataacacaatgagagatatttgtaggaacttccagcgaggcagctgtcaatatggagaaaggtgtagatatttacatgttcagcaacagcgaaaacctaatgttaatgggtttggaggtcagagcagttcttatcaacagcaaaatacaaatccctttggatttggctctggctcacaacaacagcagcagcagaagggtaatccttttggttttggcaagcagaacagctcccagttaaatggtgggcctcattctgagcataaacccaaccaatacaagccttttgaaaacaaatggaa

SEQ ID NO: 97148 - DNA, 465 bp, Glycine max
  Clone ID: PAT_MRT3847_58737C.1
cttactcctgggcggacgcgtgggtgcaaatgtttgcggcatttatcttctctggagacaacaggttcactgatacaacaatttttaattgccgagatttggccatcctggttgattattatacaatggcaactcaatttacaaaattcctaccacattacattaggtggggtttgtataccttgctgatctacattctcccatcctttataactgctgaaaggaaatatatgcggactcagataattattcacactctcggcttattatacgacggtttatacaaattctggacgtaaacacgagaaaaatcttgctttgacataataggagaagatggaagtgattaaaaatagaggcatgcctgctgatgctctagcaaagcgagctgatggatgtgaaaaacatgctgctcatgacagcctcaaggatcaaattcctgctgtagcaagatgcattttacta

SEQ ID NO: 97149 - DNA, 446 bp, Glycine max
  unsure (1)..(446): unsure at all n locations
  Clone ID: PAT_MRT3847_58738C.1
tgaccctcctcccgcccctttgttcgcccccaggagcctcccccgtggtccctctatagagcccctctcgctgagttcatagcaacccttctcttcctttatgtccctgggcccccccaaatggaaaaaaaaaaaaaaaaaaacaaaccgtgggtggccccccccctgtggggttggcattttgggcctcgcttgggcccttaggggcctgtcctctccctgtttccgcccccccgtatttcgggggcccctaaccccgcggtgccttcgggttgttcccaggccccaggtgtcgttgataagggcgttgttgtcctgggggcccccggtgccccgtgctntctgtggtcccggnttggcccaggggttaccaaagactaccaccaccggtntggnggtggtgcccacctctgttgctgatggcctccaccnatggtccgctttgg

SEQ ID NO: 97150 - DNA, 383 bp, Glycine max
  unsure (1)..(383): unsure at all n locations
  Clone ID: PAT_MRT3847_58739C.1
gggtggtgttggccnnnttaattttttttttttttttttttggcaagaaaatttaaatggatatcggggcccagtaaaaaatttaggatccacatacatatcagccattatccataaaatggaatcttgcttctgactataaagaacaaagttatcttaaggggggggccaattaattaattctcttcaaaaattaaaacctcatantataattaaccttcttattaccaaggaaagggactaaagtggggagacatccgcaggttccaacactttttcccctcaccacatcttacttcaaggacttgttaaatttccatcaccaatgggcactggccgccccaaggactttaatgagagttaagggtaaggcaggccccccc

SEQ ID NO: 97151 - DNA, 400 bp, Glycine max
  Clone ID: PAT_MRT3847_5873C.1
tctttctggaaacctagaaagccatttcactcaaaccctggtggggccgtccattaacgtgtttaccacgacaatacccccaagtagagaaaaacttgacccctccgaagtttgcaatccccaaggaaccaaaagctgccgctataatatggaccagtgtgccggttgatgagggtatgaagatggcccccggaattaccagatccaccaattccttcaatcaatttccctttgagggcttttcttggttaatgaagccttccttttacacgaagcatttcagaaggtgttatagttacctaacttcaaatacctaaccttgtacctggaatcaaacattattttcttttcaaagtggggcttttttttttaaaaccttggcccttcctttgggtggtgg

SEQ ID NO: 97152 - DNA, 433 bp, Glycine max
  Clone ID: PAT_MRT3847_58740C.1
atccgaaacatctttccctccccttctgcttcaaaaagcttcgcttcgcggacttcttccttctccgctgctcatgcactcttcggatagaccgttccgctactggagcgaccgcgggtagtccacctcatctgctcactatcagatcctagagtacagtggtcgctggtgtcatcgaagggcttgatgggaagatcgctatcatggacaatgaaaatcgttacactggaaacttgacaagtcatctaaagcctggtggcggcgattttggaaacttctacaggcttccttctgtcaatgatttgagaattgacatgttaccatgatccatcagaattctccttgaatctgctattcgtacttgtgacaattttcatgtcaaatgcagaagattttgataagatactcgattgtgaaaataattctacgaagc

SEQ ID NO: 97153 - DNA, 572 bp, Glycine max
  unsure (1)..(572): unsure at all n locations
  Clone ID: PAT_MRT3847_58741C.1
ctttgaagcagttgaagcatcatnttggaaagagcacagagtctcatggtgaaacatgcaaacaatcacaggcgccctcatgatatcaacgttggagattgggtttatctaaaaatcagaccacatcgccaaggatcaatgcctccgcgattgcatcccaaattaacagctaggttttacggtccgtatttggtaatgagacaggttggggcagtagcttttcaattacaacttccttcggaggcacgaatacacccagtgttccatgtttcacaattgaaaagagccctcggaaatcatcaagcacaagaagaattaccccctgacttggaacatcaggctgaactatactttccagttcaaattttgaagattagagaagttcaaaaacagcatgaagtcgaacgtcaagttttgattcgttggcatggcaaatctgaggaagaggcaacttgggagaatgtggatgtgattcagactctatttcctgaatttaaccttgaggacaaggttcattctttggaggggagtattgttagatctcaagatagaccagttatctggagggtcta

SEQ ID NO: 97154 - DNA, 262 bp, Glycine max
  Clone ID: PAT_MRT3847_58742C.1
ttattttttttttttcagggagaaatggatataattattgaggcgtacaagcatgctttttcagaatcgcgcaaggtcttgcctaggtaaatattaaaaacataagtgtatacaggggggcccctagtccgcaactgaagtttaatcacaataacttggtagtctacatcccaaggccgttaaatacgattaatttgaacgtactactatcagctatagcttgcaattggcatcaaactgctttttatggacaccactaatt

SEQ ID NO: 97155 - DNA, 251 bp, Glycine max
  unsure (1)..(251): unsure at all n locations
  Clone ID: PAT_MRT3847_58743C.1
cggattcggctcgagattccttctgttgcttagactttcccatgaactccttttcattcacttttctagctttctcttccttagttttctcatatctttctcacaccttgatttttcttgtataaaactcagatccaagctatctttcttacaatttaccctagcttcactgcaaattttctcgctcttgccctnctctaaaactcatgcctctgatattgccacaaagtagtctgaggttatggttctca

SEQ ID NO: 97156 - DNA, 194 bp, Glycine max
  unsure (1)..(194): unsure at all n locations
  Clone ID: PAT_MRT3847_58744C.1
tgctactcccncctaggattccgaccaccnccnacgttncccgctgctctgctttgccttctctccctcctcgcgtctccnncnccaanaccnctttgttctcnccttccctcnncnncttttcagtgtcccgaanntcttctctgcttcagaccagagcttcttcagaggantcntcctcagtagatgccnat

SEQ ID NO: 97157 - DNA, 479 bp, Glycine max
  unsure (1)..(479): unsure at all n locations
  Clone ID: PAT_MRT3847_58745C.1
ttccatcgcgtccggcgccgcctcatctcttctgctctctcattacgctctttcctccgatctcaggtttgattttttcttcatctctcttcatcttattattcatctcgatctttttgcttcttcgtatcttgtttttgtttcatcatcttaataataattttagtgattcacattgttgtgctcttttgtttgatgcttttctcatcaaactttgcatcacgcgtattgatctaagttttgggggggttttgaatgcaaaccaccatacacgttatggctattccttgtccgatgctattgttaaggactctaggctgctcgacatgtgttttctaggttttctattactattctgttatgttttttgtgctattacgataacgcccctgctntatttaatttgtgatgcgttatggcttgtgtcctgatttagcatangatacccacccatagactgatatatgaaatcttgggga

SEQ ID NO: 97158 - DNA, 377 bp, Glycine max
  Clone ID: PAT_MRT3847_58746C.1
tgatacacaacggaacagggaaggtttttgtcaccgccatcgtggcttctggcgttgagtcatacttccgtgagtagccctatgagcagcgcattgtgcagcagaaggcgtgcctgcagctgacgaccatgaccaccaccaccatcggatgggtcccgcaaagcgcgacggtgcgcgcgatgcgtgccaaattcaaagcgcacacaatggctgacgcggattattgcgcatttatcaacgcggagacggagctgcgcattcacatgcaggaggacattggtttgcatgtgcttgtccaccgcgaatacgagcgcaatgacatggtcgaatatttcgatgaacatttgcacggtttctgcgtcacttccaacggatgg

SEQ ID NO: 97159 - DNA, 197 bp, Glycine max
  Clone ID: PAT_MRT3847_58747C.1
gcgccagggcctccttcaacgctggcgcaggctacaccgccaaagtcggacctgacggagcgggtggacattgcacaccacacgagaacggcaaccagagagccccagccgccatagagcacagcagccagagctccatacgcctacacgtcaacacattgaacctatacgaggcgcaaaccttaaacgccatcacg

SEQ ID NO: 97160 - DNA, 677 bp, Glycine max
  Clone ID: PAT_MRT3847_58748C.1
gtcagatagctcagcagcttatggagatggattcagagaggggtaaccaggctgtgggttaaggtaggaccttagaaaggacccttggaccatatccgattgactggaaagttttccatattgaaaaaaatgatatttgacccttatagagtgagtaattcactttatagagcaaagtaagggacctcaactgttgatgagaaaattaaggagttgttaaactttaacaaatccatgatttattatgcacgagtgataccaactgttcatttttcatcaatggttgagacttacttttctctgtaaagtaaagattcactttagagaaaccaaatccagaaatatgatacaattttctttcctctacatcaaccaatatatcagctttgtcagttaaattatataggatccaaaggctccaaaattatataattttccactactctggactaaatagggaattaaaaatgctcctgttagtctgcagtggtcaaaatctttcttttcttttcttttttcttctagggggtgcgagtggggaggggatgaaatgaaatgtgcagttgttgcaatttcgagataaatgtaggcacctcatattctacatgtattacaaaataccttgcagcagttggaaatgataaaacagttgaagtaattatagtaaaagtttgtat

SEQ ID NO: 97161 - DNA, 1265 bp, Glycine max
  Clone ID: PAT_MRT3847_58749C.1
atgaattccaccgtccagctcttgtccgcggctgcgcggctttctttgttgaagcattcaagaatgcgaggtgcgtattgacgaggggatttgctcaaatggcaatgatacaattactcttttaggaggcattgttgttcgtaacactcttgtaatgtgtgatcgtgagcattcaaaaattggtttctggaaaacaaattgttctgagttatcggaaagactacatgtttcaaatgccccaccaacctagatgcctccaaaatctgagggaacaaattttaccaaagcatttaagccttctgttgctccatctccatcacagtataatctacaaccaattgaactctacattactaaactattagtggaaatttagcttaacatcaaataattggatataaattttcatcattcattaaattgtaatacctcacaggttcacaatcagaattttacgtctactggaaataattcgcgaagtaaatgggtcattaccacaaaaccatattcttataacatttctaacactactgcaatgattataattgcccggcttgctgaacatcgcattcaacttcctggcacctttggaaattataagttgattgattggagtgtcgagcctccatcaaagaattggtggcagcaacacttcttggtcgtgagtttagctattttgatcacattgcttctaggattgtcgatattaggaacgttcttaatttggaaaaaaagacagcaaagctcgcattcatacaagccagtggatgtggttgttccagagcaagaacttcagccattatgagctaaggtcatgctactgcttctttaatatcttacttgatagtgtcagtagcatattcaactattatcaagagagcaatttatgcaaaccatagtcactcaactgatcaagttttttgtttcaaagaaatcaggctgtcacgatatccagtgatcattgaaccctgatagaggtacataaagatttctctagatatgttatctatcatctgtaagcgcaattttgtttgtgaaatgtgaatattgtaatatacaggtgaatcaaagggtggcagcattagattgaaatacaatttcatatattgtaatttttacatttcatttctataggggcttgtttccgcgttttgttcgttttcgctttccacgtcgcttttcttctgggttttctgttcacgttttttctaacttgagagtgttattattgtatgtcgttcaatgcaagtgagccttactcttga

SEQ ID NO: 97162 - DNA, 545 bp, Glycine max
  unsure (1)..(545): unsure at all n locations
  Clone ID: PAT_MRT3847_5874C.1
gcaacctccctcttcacactttccccccgccgtcttcttcctctgcacgcattttccgctgccgcaacttccaaagccgccagctcagcatcctcgaaatcagtctgctgctgcaggtggttgcaatctggcatggatttcctctggagcgagaatgcggcgacgccgcgcgcctcgcatttctccgtcgcgatctgcttcgccttcgccagtttcgcggccaggttcttcctntgcacagattcgtnctttcgcaggttggccattaggatgttgccgagggctagcgctcctgtacatattactaaggaaatgcaagtaaagattggaaaatgctcagaatcaatgtggaagctaacatattatgctacagttgaagcattcattcttaaaattacctaccaagaaccctggttcagtaacacgaaattatacttcaatgactggccaaatcatgagttgaagagtcccctagtgttgtactacatgtgccagtgtgggttctacatatatagcaatgctgctattcttacatgggagactcg

SEQ ID NO: 97163 - DNA, 319 bp, Glycine max
  Clone ID: PAT_MRT3847_58750C.1
tggagaaaagtttactttattggatctacacagcatagtcccaaatgctttacaatcctctgttggaccaaggttttaggtggtcaacaaaaaaattgggtgatggtaaaggaagaatagcatttgttagtcatgatgaattctggcatgtgcaactcaaaagaaaacctaatcttctaccctggctggctctcattttccatcaagtaggtgggaagaacctgttgagattgaaaggcaaagtatagaattcttcatttctgttatctcctctaaatgttctaaacttaacccaccacggcatccctcgatctttttt

SEQ ID NO: 97164 - DNA, 370 bp, Glycine max
  Clone ID: PAT_MRT3847_58751C.1
ggcgtctcatgatagcatctaaaatatgctttcacagcagaattaccggaatatacggcacaccgatctcttgagatccattcaggccgatacacctaattgatgcctcgcgttgtggtgtgcgccatgtgtgtcttaccttctgagcaatagagccctttatgatgatatgtctaaatacacatgcagtgctgactacatgcattgcagtgggatgtgtggagaaagtaaatgtccagaatatctcctgtgtactgaggttttgatgtgctttggaaatgctaatccactaacccgattgctattgctagatgaatatagcatactaaccacgcaatgtgataattgcattattggactcgtatcttgc

SEQ ID NO: 97165 - DNA, 233 bp, Glycine max
  Clone ID: PAT_MRT3847_58752C.1
tacagctcgaggtcaaatgctctgacggagccacacattagggttttccatttcgggtcagacatactcagacacgggaggtggcaatgcgcactcgtcgaagatggatcgcgatcagaggctcgcaagtcgttagtgtgcgctcggggctgccagttgagtccagactggagggggatgtgtattccgagcttgatgtgcctgcgggcacctttgtgccccagtccaggggt

SEQ ID NO: 97166 - DNA, 937 bp, Glycine max
  Clone ID: PAT_MRT3847_58753C.1
cttatctcagcagaagccgattaggttcccatctcattgaagataaagaagatgacaggggagaggttgacaatggagtagaatgtgaggaggaatctgctgaaagtgatctgcattctatagagttaaatatggacaacaacaacaagagttataagtggacctaccctcctgaaagcagatttgatacaagaagatatccaattgaggaagaagtgaaaggtagtaggaggtctacctctgggaaagcttcaaggaaaagcacatcactgcaaaggagtatatcagatggaatggaatggggagtccaagctgataagcttcaaaattcaggagatgggatagattgggaaagcttttatgaactggaaaagcaagctcaaggaaaaggttatggggatgaaatgcaaggctataaatcagtgaaaggtctaagggatcagatactggctggttctaggcttgcatcttatagaggttatgccagtccaactagacaattttcccagccttggtcatcacgagatcttgcaaataacttccaggaaagacctgctacagcacagggcaatggtctaaaatcaaggttaggggaagccaggggtgagggccagaatgtaaggaagtcaaaaaggtgagttaaagctcataacttttgcgacaatgctttggttgtgaaggccatacccgtttgcttctgctaccatgatggctggtaaaaatgcaggacagagattctcatagatccgcttaccattaggtgaaagctgaaggaagctttcctcctttcaagtttttatctttttgatagcccatggctgctgaagttgcagcaatcgctgcttaaattgtcgtttgactttatgtgtaggtatgatcgtgtttgtagagttcagaacatgttatataagtatagcgagtttttgttttctcctct

SEQ ID NO: 97167 - DNA, 1333 bp, Glycine max
  Clone ID: PAT_MRT3847_58754C.1
gacgcccatgcacgcgtcctcacctcgtaatctcggtattgcgtgttcaacacgttccgcgcgttggagggttcttatttggatcacattaaagaagagttgggtcataagagtgtgttttcggtcgggccgttgggattgggtcgggctgagtccgacccaaatagaggatccgaggttttgcgttggcttgacgaggtggaggaagaagcgtcggtgttgtacgtttgctttgggagtcagaagttgatgagaaaggaacaaatggaagcattggcggtgggattagaaaaatccgaaacgagattcgtgtgggtggtgaagacggcttccacgaaggaagaaatggatgaagggttcgggttggtaccggaggggtttgcggatcgggtttcgggtcggggcttggttgtaaccgggtgggccccacaagtggcgatactgagtcaccgagctgtgggggggtttgtgagtcactgcggatggaactcggtgttggaggcgatgacgagtggggttgtgattgtggggtggcccatggaggcggatcagtttgtgaatgctaagatgttggtggaagatagagggctaggggtgcgggtttgtgaagggtcggattttgtgcccgacccggatgagtggggtcaggtcgtgaaagcggttatggttagagacagtgctgagaagagaagagcgaagttgatgagagaggaagctattggggctgtgagggaaggtggcgagtcttccatggatgtagagaagctcgtgaaatcgttgttggagcttggtgttaaacaaggataagtgagtgttcttccttaatctatttgttgtgttcttttatctaagtctaacctagagtttactagacatagtctaaaagcattcaactgcgactgaaagcattcgaatatcaatttgaaacatgcatacaagataaatgataggtcggttggtatacaaccatgaaggaccttgggatcatcctttgttagcatacaacaagtaaggatacaacaaatacataagtgtcaagcctctggtgctcaagcacaaaaaggtctgaatatattatcggaatccgtgtggtcaaaccttcctaatctgaagctgcacgatggctgcccactgattggaaagaacacataatcttctagccttggtggatgagcatgaagagagtctaagtcctaagtgagaatacaaattttatttgggaagaaacttcaaatgtgacttgtattttcaaagcaattaatgattatgaaattaaaagtgtaatttttttttttgataaaatcttattaatatacgctcatcattagttttc

SEQ ID NO: 97168 - DNA, 581 bp, Glycine max
  Clone ID: PAT_MRT3847_58756C.1
ggctcgaggatgaagcatctactgatgtttaagattttgattctgatgaagaagcatcagacagtttccaagatcctgatgatcttagtgaacctgagatggaaatgaataataagcatgttgaacttaaaattccccttttagaaaagtttgcaactgtgtccaagcctcctgcattctgtgagtcccaggcaaatgttgaaactagaccgagactggttgttaagttttcacttcgtgattctaagaagaatgtgcccacagaggacacaagactagcttgtgagactcaggataatatggtatgccagtcttttagacctcaacctgaagaaagtgatcaaaaaacttttccagacacaaaatcgttggaccctgcattatcttctatggctgcacctaatgctaaacttccccaaagcctcgacagaaatgaaaatgatgataaagaacaaactgaaaatattacaaataatctggatgcatccagatatgttgaggcaaacacagatcagtgcagaaaaatgaagacacatacacacgaactttcaagatcaggggatgctttgctgactgatgct

SEQ ID NO: 97169 - DNA, 362 bp, Glycine max
  Clone ID: PAT_MRT3847_58758C.1
attttttttttttttttatttttttttttttttttttttattggtttttttttggggatgagggaaaaaaaaacattttgtgtttttggcgaacacaaacccaaaaatggaaaaacgtacaacaaaaaaaacacaggtgggggtgcacccaggccgaacaatttttttttttgggggaaaggggaaggggaaaaaagggggagggggggaaaaaaaaataaacagagtcttggaatggcttgggcccaaattcgagctatctgtcccctggaaacaaggtcatagcaatttcatactgggcccaaaaaaaaaaccacggggcgccctatttatacccgggtgaaagggaaaaaaccgcggat

SEQ ID NO: 97170 - DNA, 643 bp, Glycine max
  unsure (1)..(643): unsure at all n locations
  Clone ID: PAT_MRT3847_58759C.1
gcacgagaaaaagcccaacctcccctgtctcttctgttaaaaagaagacaacgacaacaacaacaacaacatcaaagcagtccaagaagaggaaggctaaggatctaagctctgaggatgatgatgatgatgacacagactctgatggtgaatttgtattatcatcagtagcaaagaggagaaaaatggcttaactatgcccttctgtgacactcgtatttatttttcgcattttttctttaccatttattgctggtgacacaacttgtatggcatgatgttatataacttttaagatgttgcccgtggtttacagagcagctagttttaatcttggcccaactctcacaactcaaatttttctctaagaatttgggttcagacttaatctcaatagttagtttaaaaaaaaaaaaaaaaaaaaaaaaactcgagggggggcccggtacccaattcgccctatagtgagtcgtattacgcgcgctcactggccgtcgttttacaacgtcgtgactgggaaaaccctggcgttacccaacttaatcgccttgcagcacatccccctttcgccagctggcgtaatagcgaagaggcccgcaccgatcgcccttncccacagttgcgcagcctgaatggcgaatgg

SEQ ID NO: 97171 - DNA, 319 bp, Glycine max
  Clone ID: PAT_MRT3847_5875C.1
gtgtgtaccacttttgagtgccacagagttctgagtttcacacgagtaaaattgtgacaggataacataccccaaccgtcgagtcagtatcaggagcacctccaactgctgctgctgatcttcgatttgttcctgccgctgctgttgcatctcatgctcccgaggctcaacaggctgtgactgccgagctgcctgctcacccagcccctcatgctgatggcccgccaatctaaatccaagtcctagctctgtgagtcatgtttccttatgatcgacaaggactgcctcctcgaacatgtacgccaggattctagaatgc

SEQ ID NO: 97172 - DNA, 193 bp, Glycine max
  Clone ID: PAT_MRT3847_58760C.1
aagaagatgaagagctacgacagatgcggtatgaagttggtcactggaaggagaaggagattaatgggactgagaggagattgactggaggttgtccattaactcctagggaaacttccctattgcttagagcactaggttttccatcacaaaccaggatttatctggtagctggagatccatatggtagagg

SEQ ID NO: 97173 - DNA, 564 bp, Glycine max
  Clone ID: PAT_MRT3847_58761C.1
gtatgagattcatgtctgagaaagggtctgttgagtatgcagctttgtctatcaaccctgagacggagtccttgaagactattactgccatgatggagaccctgattgaccttacaatgatataaatcgttggctgggcacacatctgatgagttctaccttggggagagagatggaggtgactatagcacttctgatgctggtccactataagccttcagatgttagtgatgatgctgcactagattgaacaaaagctgatacacattaacaaggacaacacgttgagaaaccgaatgggcgcggctaacttgcctaacgctttgctctatccttctagggaggagggattgactgtcaaaggagtcaccaacagtctctccatatatgggctctatgcctgctgtcatgctctacatggccttgaatagcggtgagtccaatgcttctgagctcttgctctacctatgaatggggaagcaatgcatgaggagggaccgaacgagccatcggagctggctatccgtgaaaacgcatatggtttgtctatatacgctgacatat

SEQ ID NO: 97174 - DNA, 288 bp, Glycine max
  unsure (1)..(288): unsure at all n locations
  Clone ID: PAT_MRT3847_58762C.1
ctcctcggctccatcgtcgcctccctcctcctggccttcgtcaccgcctccactgttccagcattcggactctccgctggagttggagtntggcannnacgccttgggtggttggagatcgtgatgaccttcnggtctgggtgtacacgggtctacggcaactggccatttgaaccccaagaaagggtaaattttggggaatttattggcttcccattcccccaattggggttttcatttggtccgggcgcctaaaccatttttttgtttggggggtgggggggccct

SEQ ID NO: 97175 - DNA, 603 bp, Glycine max
  unsure (1)..(603): unsure at all n locations
  Clone ID: PAT_MRT3847_58763C.1
ggctcgagcagaatcatcctatgcagaaaagctatttttccttagtttcctttacctgattatgagttggatttttattaaaaaaaatggaagataattgaattaagatgtttatagacttgttatgtaatttggcatcacagcaacgatattcatttgtttcagatatactgtgctgatttacctcaaagaggagaatataattttgtggttttttctaatagacttggtgaaattacaactaaaatctcagattttgaaaaaaaaaaatggctattgttaaagcattggtgttttacattagaatcaacattatctcagtcatcaatcttagaagtatgttgattaaaaaatgtgtaaatatttcttttatttactataatgaaaaatagaaatcagttgaagcactggtgctaatgtcggcatcacaattgctttgttagtaaaattttttagtagtttcttttttcttttcaatttagtatgcaagcaataaatagtttttgttgatgatatgattcatcctttctcttgtgatacatcacatcagacaagattttgtttatacagtntgtatatgtgtgaacacttgacatctcaaat

SEQ ID NO: 97176 - DNA, 405 bp, Glycine max
  unsure (1)..(405): unsure at all n locations
  Clone ID: PAT_MRT3847_58764C.1
ggacagcggccgcccacaaaaaagagctttgaaacttcggagnnccggaccgaccaaaaacacaggaacggggggaggtacacaacacaaacgccccctcgcccaatcgatagaggaaacatagcggcagatagatttcaacggggaaaagaaaaaagagatgcaaccccatgcaagttacccagacaacgagaaaaccaaaatacatgattcacaacgcccccgcccaagaaacatccaaattgccggcccgctgacactggcccgaaccaggacaggtggcccgctcaaaacaaaccagccagaccaaaccttgcgcgcccctcatcaaagcagactgtcaaatcagaaccccggacaacgaccccagcactgggggaattcacagacaagaatcttccaacc

SEQ ID NO: 97177 - DNA, 200 bp, Glycine max
  Clone ID: PAT_MRT3847_58765C.1
cccacgcgtgcggtttcttgtgagctataagctagtttatcgcgaggagaatatgacgtgctttgctgtctttgttgctagctgcaatctcgcttgctcggtcatactcagataccaagctacctactgttccctcttcgaatgaaaactgactatggtgagcgttcttcgcatgtaaaatgcgcaagttctacgcttgc

SEQ ID NO: 97178 - DNA, 117 bp, Glycine max
  Clone ID: PAT_MRT3847_58766C.1
gacacaaggcaggggaggataactaaaaacacaggtaccaacatagttgtatactacaattaataaaggaacactcacctctataaaccgccctcgatcaatcatgacgcttttggt

SEQ ID NO: 97179 - DNA, 533 bp, Glycine max
  Clone ID: PAT_MRT3847_58767C.1
ggcacgtgtacctgcccttggtgttaccccttccttcattacagatttggcagatccagtaatagaagctctcccgtcagcaacagcaatgtatgcaccaaccagcatctctgaagatgttgatcatgacccagttagttattttatcagatattctgtggttcaatcttggcattcatcttgttcttgtcacccaaaatgatcatggcattcaggaatcaagtcatttagaagaattagaaactgtttgctgaattcaatctgcaagcatatagatgaagcctattgatagcaacaaagtatacttggatttttttgtctttgttttactcatttcaacctctactgtatacatcaaagagctatgaagaagcaattttccgcagagaacttgaacctcggcttaaagaggattcaaagaataattgttgaccagggatctattcaagagccaagaggcattgtctcgatctccgatttaaacccgaacaagttattgatttttgtttattatttacttacactttttctac

SEQ ID NO: 97180 - DNA, 665 bp, Glycine max
  unsure (1)..(665): unsure at all n locations
  Clone ID: PAT_MRT3847_58768C.1
aaaacatcgtatccccattttgacaacatcttttttttccataagctaatacacacaaataaaacaaaaaaacaactaaaataaaaaaaaaatgctacacagtttatatacatcctttaacaaaaaagacaaatgacaaggattttcttttttatagaaaaaaaaaattgtataaaaactcccaaaagacaaatttcaaccctcactggtgtaaccaatcagagagcaactacttgttacgaatttctatgtacaatttgaggaaaaatcctgtttgaccaggatatttgtgctatctgtagtttttttatgctttttcatactaactagctcttctcaatcaataatgatggtttcatgtattgaattcaaggccgaaataaccatttctatgttatgagttagcaatgaaagtaagcccgggtggtcaaacagggtattatttgcttgttactttcactgtagtacttctgggttggcatttcagttgagcaacatgcgttttcaggctacactctctaacctgcatagttgtaatcgctgacaaaaggtctctgcactcttcaagcaaaacacgctccttcgcacttaagttgnnnactnnnacaaccagcgaatttaattgcccaacctttggtgacaataggcatatggaggatgccatt

SEQ ID NO: 97181 - DNA, 326 bp, Glycine max
  Clone ID: PAT_MRT3847_58769C.1
ggatattttcaatgggacaagagcacgtaacaaacggcatctgtacagagcagcttgttgaatgtaagtggacaaaaatggcaccacattccagggaattgagtggaacaattgaaggggggggacctaaccaagggtcttgagacgtggggcaccgaaggggcaagtgaaactttgcggcgtattgagttttcttaaaggcaaggccgaaacggctgcccccggtggacattcttgggagaacaggccaagaattggacagtgctgggaatactcttatgccggcgttagctggccacaagctaacgccagatcttctgaaaatg

SEQ ID NO: 97182 - DNA, 390 bp, Glycine max
  Clone ID: PAT_MRT3847_5876C.1
ctgtgtaaggagaatttggttgagttggtggattcgttggggcacttcgttgttaagagcgaggctcacgacggagaaagcgcggttttttgtaagaacttgtcggcgttgcggtcgtcgaaggttgtcggcgacgaagaggagtaggattatgctgggattctagagaatctgttttattatatttttattttcttttttatctattttaatagaaaggaactaaggaagtgtgatgtggggtgcccgcatagggactggcccgcttttctccccaaaaaagggggtgaggaatgtgaaactgtgaatggcttttttgaatttattttaaaatttagtgcccatatccattttgttcctgaaattattatgctggaacaaattactcat

SEQ ID NO: 97183 - DNA, 1868 bp, Glycine max
  Clone ID: PAT_MRT3847_58770C.1
gagagaactagtctcgactttcttttctttgcccaactttcttttctttgccaacactccttcgattaggggtttcgatcccaaattacaaattggtcgccatgaacgcaacctcatactctgctcttccttctacgttccgcagtctccatcatcggaatttctcagcgttttgttctgatatccaaaatcctggctatgttgattgccattcaaattgtaataagtctacatctcaagcgtctttgtttttgtgttccgactccaacagtagaagaaatggtgtttttggtagaccactttgtgtgaacccctctggcaggagaaacctagttggtccagctttttattctctggagactagtgcttatgacgtggctgctttagaatctccttcccgtgttgcagaagaaaaagttggtgtgctgcttctcaatctaggaggaccagagacattgagtgacgttcaaccttttctgtttaatctttttgcagatcctgatatcattcgtcttccaaggttgtttcggtttctccagcgaccattggcaaaattgatttctgtacttcgggctcctaaatccaaggaagggtatgctgctattggtggtggctctcctttacgaaaaattacagatgaccaggcacttgcaattaaaatggctttggaagcaaagggcatctcttcaaatgtctacgttgggatgcgatactggtacccatttactgaagaagcaattcagcaaattaagagggacagaataacaaggcttgtggtactacccctttatccccagttttctatatccacaactggatcaagcatccgtgttcttgagcatatattcagggaagatgcctacttgtctaagctccctgtttccattataaactcttggtatcaacgagaaggttatattaagtcaatggctaacttaattcagaaagagctccagagtttttctgaaccaaaagaggtaatgatatttttcagtgcccatggtgtacctgtcagttacgttgaggaagctggggatccataccgagaccaaatggaggagtgcatcttcttgatcatgcaagagttgaaagctagaggaattagtaatgagcacactcttgcttatcagagtcgagtgggtcctgtacagtggctgaaaccatatactgatgaagttctcgttgagcttggccaaaaaggtgtgaagagtcttttagctgttccagtgagttttgtgagtgagcatattgaaacccttgaagaaattgacatggagtacaaggaattggctcttgaatctggcatcaagaattgggcacgtgtacctgcccttggtgttaccccttccttcattacagatttagcagatgcagtaatagaagctctcccatcagcaacagcaatatatgcaccgaccagaacctctgaagatgttgatcatgacccagttagatattttatcaagatgttctttggttcaatcttggcattcatcttgttcttgtcacccaaaatgatcacggcattcaggaatcatgtcatttagaagaattaaatcctgcttgctgaattcaatctgcaagcatatagatgaagcctattgatagcaacaaagtatactttgattttttgtctttgttttacttatttcaacctctactgtatacagcacagagctataaggaagcaatttttcgcacttgattataatgagaacttgcacctcggcttaaagaggattcaaagaataataattgtagaccaggatctattcaggagccaagaggcattgtctccatctccgatattaaaccccgaacaagttattgatttttgtatattatttatttacactttttctacattt

SEQ ID NO: 97184 - DNA, 452 bp, Glycine max
  Clone ID: PAT_MRT3847_58771C.1
ggctcgagctcaactcgctgctgctccccccaaaaacccttgctggtgctggggaaccatgagcaagcatactggcagagatctgcaatgtcttcgattgacaaccccaaggatgaggtcgccttcgataaacaccacaatatcctggctcgcgattacaaggtcaataaggggggcgtcaagagtgaagacacgtattcatggggttgatgtctcatggagctattgataatcatggaaaaggactatgttctgacccatctgctgacacaatgcatgatatatatgatatgaaagggactagtactgtggtcggagctggcaaagaatcaaatttgacttgtgacgacagtctggattattgtgagaaggatattcataaccataacagactagagaaaatggatgcatgtggctaagaatgtatacctggaacaagacacggttgccct

SEQ ID NO: 97185 - DNA, 453 bp, Glycine max
  unsure (1)..(453): unsure at all n locations
  Clone ID: PAT_MRT3847_58772C.1
cttaattgactgcagcagagacttggtttaagaaaagagagtttcttgttcataactagggttgatcaattggaggagcagggttactctgatgactagttgctttcatcttttcagaaagaaaggatcttcctcaggcacacagttgaccggagttgatatagatgtgacaaaaccaggcatgatatttgaatttgtggaagccaaaagtgcaaggaaacaaaaaggcaaggcagaagtggatagtaaatcttcgttggctgaagggaagcaagacgagtcatcttcatcaggaaccatgagctcttttgctaccatgaccttcacagcaatttatgatagaagcaattagtttgattgtgactaggtagccttgtagttggtcctcaatgatatatttttctctcccgctctatcaaagntgccaatctttgctgcattttttgttacata

SEQ ID NO: 97186 - DNA, 1090 bp, Glycine max
  unsure (1)..(1090): unsure at all n locations
  Clone ID: PAT_MRT3847_58773C.1
caaatcgtcttatcttcctttccctcgcctcgcctcgcctcccttcgcaagagtggagctctcgtcctgtgtatctcactggagctctgtggcccctctcacggtcttcgctatccaaatctctgaacgattcaacgacgccgtctttgagaatcgcgatttgacgctttattacgtgattctccctcctttctgccattaacttcattatcgggtttcttcaaagcgcaagttctttcagctaaacgattgaaggccgttagccattaaaaaagaccgaatcgttgcaaaagtggaagttttgtttggtatcaggtgatggcatctttggaaataaaatctggtgcattggtttctttacaagacctgcgcccatcttctcctttttttaagcaaggtgcttcactcagaataactggaaagttgcacgaatactctatagagacaggcctagcaacaattatcgatggtgatgacattctaaaagttagtaccaaacatctgagggaccttacttttcaagttggctctgtctaccaattcattggtgaactccttatccaacctgacaatgagggagttttgcaagcacgtgttggtagaaacgttgatgggattgatctcaatctttatcatcaatctctgctgcttttaagacagtttcaaaccaatcatttaaacaatccagcaacaatgtaggagtatttgaacacagaagtcgtcatgctaatataaaaatacacttctctctgtttttcccataaagacggtgttctgcactctacagtgttcattgtgtaaacagagtcttaacaatgttaagatttcattttattttattctcactttatttggctgcaaatggaacatgacatcaaagatctgttaggtatgagttgtgcttagctgggatgctttaaggggacatttagcttttcatgtgaagctatgcatcaaacttttggtcttcctttgttttgcaatctgaaaaatgaggtaagggagggggagggatggtggtntntntaaggcancntanaagatactttatttaaatacatgtcagctgtctcttttttattgttaaaaa

SEQ ID NO: 97187 - DNA, 454 bp, Glycine max
  Clone ID: PAT_MRT3847_58774C.1
cgggctgcacagagatatgacctctaaagcgtgttattggatgttgacatatgattaacgtaggtctcttttctgcactcttgtgtcgtcttattgctataaagattgggttccgatacaacagttgggaggctccaccatcgtctccctgtggagttcccacaactgagctacttgatcaacgctggtgagattgcttatattcatctgcgtgtcatagggtggcgtgtgccgaaacccctgaatacattcctgataattatggtaacgatctaggactgttgactgctaatgtgtcgctgtcatcaactaagtgtaactaacctagctttgctatggttacgttctttgagatgacactatgatgaacagcacccttcagatgtagtgcttcccttgatagatgaagtctgcatcttatctatctgtaccgaaaaactcaaaaaagggccct

SEQ ID NO: 97188 - DNA, 2550 bp, Glycine max
  Clone ID: PAT_MRT3847_58775C.1
ccacgcgtccgcaaatcgctgagtactctgagtaagtagcggccggaagtgagagtgaatgatttcccatttcccaacgacaatggcaaaaaccgcgaaaccctaaccccaaaacccctttcagcaaattctccactgtcttcaaaagccacggcgccatggacttcgatcaccacctcacggagctttccgcctcctcgccgttcattccatccggcgaggacttccacttctactacaaattcaggaacttccgccgcccgatcgaggaaattgcgaggagaacgcagtcgatgctcgacagaatcggctccgcggagaacatttggggcagaggctcggcgttccccggtgacgtcgacgacgcgtacgagtggctcgtgaacgcgaatgacgacgttttggagctggtggaggagctggtggacgagttgcggatgctcaagaaggacgagggagaggaatgtgacggcgcgaatccgaaagtgccgtttcatataccgacgatcaagaagccccagtatgcgtacaacattgtggttgataattcaaacgagccttttgagcatattttgttggagaagagtgatgatggtcagcgttacattcatccactggagaaactctctgttttggattttgttgataaagaaaatctcgagaatcttgtgccagtagagcctccctcaatagaatgcacccctttcaagcttgtggaggatgtcaaaggattgaaggaggtggctgctatgctgtcttcagttaatgaatttgcggtggatttggaacataatcattatcggtctttccaaggtttgacttgcttgatgcaaatctcaaccaggactgaagattttgttatagatactctgaaggtccgcaatcatgttgggccatacctgagggaagtcttcaaggaccctaccaagaagaaggtcatgcatggagcagatcgagacattgtgtggctgcaacgggattttggcatttatgtttgcaatatgttcgatactggccagtcttcaagagtgttaaagttggacagatatagtctgcaatatcttttgcaacagttttgtggggttactgcaaacaaggaataccagagtgcagattggagattacgccctcttcctgatgtgatgctaagatatggcagagaagatacacactatctgctttatatatatgatttaatgaggatcaaattatttgcattgtctaaggagtctgaaggttctgataatcctctactggaggtttacaagcgcagttatgatgtctgcatgcagctatacgagaaagagctgctgaaagaagactcgtaccttcatatatgggggttgcgaggggctggttttaatgctcagcagcttgccgttgtttcaggactttgggaatggcgtgacggtcttgctcgtgcagacgatgaaggtcctggctatgtattgccaaatagaattattcttgaaatcgttttttttttttttacccatttcaaagctaaccagatgcctgtcattataagcaatctacggcgaatagtaggaaggacaaaacacccatatgttgagcgcagccttgatgtcattgtcaacattgtcagacattctatgcaaaatgctgctgcctttgaagaggctgcactacgtttgaaagaagaacatgctgcaagtttgtcaaatgtgatacccgttaaggatggaactgaagtacctcatacactacaaaaggatggatgtgcagcaagaggaagcatgggaattgaaaatggctcctgtgttgatatcacacaaaactgtatgctttcttatgaccaagaggagaaaagttttcagcatcaagttgaagatggactatccgattgtctcaattcagatctactaagggtcaagaaggagatcaagccggaacagagtagatcgtcgttaaatattccatctcccttattgttgggcaacaatgagaagtcaagactagttgcagaaactccaagtgtaacatatgaaacatcatactcacgggagaaacttgtttcaggttcaccttctacctccaaccctattgggatggtaatggtagattcagccaaggaaaagaagatgaacgatgagtaagaataatgtctaagctctgagaaatgatttcaaacaagaagatcagacagatggagacaactgaagaatccaatggcttatggaagctagaatagaagctagaagctttcttttgatgttgaagtggaaggggacaagctttgcttttggaaagagaagaaaatgcatcgtcccacagtggagttagttactcaagatgttgagttcagatatgttccagatgtttcatttcatttctggagttgcaaccatctcatggttaaatgaaaataggttagatcattataggttcaaaatcagatgttgtcattacccatatcttctaattctagttgcgcaaaatgaagatcatctatgttcctatgttgtcattacccatgtcttctaattttagttgtgcaaaatgaagatcatctatgttcctttggtcggt

SEQ ID NO: 97189 - DNA, 426 bp, Glycine max
  Clone ID: PAT_MRT3847_58776C.1
tctttttttatgtttgtggtgttcttggcagacagcaggcagcacagggcaactgggagcaggctctctagtagttgatgataaatcttctcgtacaggttttgggagactatagggagacagaccagaactttcaccgctggcttttctgtgctcactagagcacagatcaggatgagggctctcagacacaacgcgtgtcaaagagttgtcactattctcgtcactcttgactgataaaacgcccacacatatgaactctatgtggtgaaggctcttcaaaggaggtgtttctgagcaagggtttagtgcctacaaagtgcagaatccgctctcacgagcggatatgagagatacattgagcaccatagtacaaacaggtatctctggaagctaactgtactagcttacatatgtgatgcaaac

SEQ ID NO: 97190 - DNA, 255 bp, Glycine max
  Clone ID: PAT_MRT3847_58777C.1
aacacgaagaacaagagaagcgtgaggggacaaaagcttgaaaggaaaaaggctagcaaagggaagaaccctccactagagcacaataagggaggaaaggattagagacccaagcagcgggagaacacgatgacggaggaaagaccacgaacaggcaggcataagcagagcgatgacaaaaggggacgccaagcagggggaagcaagcctcacagatgcaagaacaaaggaacacaggaggaggaatcagaggga

SEQ ID NO: 97191 - DNA, 378 bp, Glycine max
  Clone ID: PAT_MRT3847_58778C.1
tacggctgcgagaagacgacagaagggggggaacagacctgcccgcaataatgaagtgtttctcggtgtccttagcctctttatgggttctccttgctctcttttctctgagtgtgtcatctcaaaatatatctgagagtgggctacagcaagctagcctcccaccaagaggttggaattcctatgattccttttgctggacaatttctgaagacgaatttttacaaagtgctgaaatggtttctcaacgtctcaaggctcacggatatcagtttgtcgtggtggattacctctggtataggaagaaagtcaagggtgcttaccctgattctcttggatttgacgtgatcgatgaatggggaaggatgatccctgacc

SEQ ID NO: 97192 - DNA, 511 bp, Glycine max
  Clone ID: PAT_MRT3847_58779C.1
acgaggttggcacaattggtagcggcttaggtccctaaaccaagtggtccaagatttaaatccggggttgatcaaaattacttgaaagctaaaataaacaaaaaaatcatcatatttcaaactccaaaatgccaatgaaacaaaaaagttgaataattaaacaaaatcattaacaaatcaagaactaatacaatttgtgaaatagggggaaaatgaaaaagaaagacggtaaaaatgaagaaaaaatctttggcgttcatttaaaagctactgtatctaaaggtggaaaaattggtttcctacaatgggtgacttgccatggtctcccatcattgcattaatctttacattactagcattagcattcatgacaaggataggaaaaaaaattacaactatattatttcaaacaagaagtacatacgataaaattcatatgttacctctgatgttggtggaacttatcattggaaagaaacatcggtaggtgcattgactataataaattgaa

SEQ ID NO: 97193 - DNA, 1016 bp, Glycine max
  Clone ID: PAT_MRT3847_5877C.1
cccacgcgtccgtccaaaacccctctctctctctctgacacacactaccatggcggcactgaagcttctcctctcccaagctcgccgccattccctccccaaatgcgctttctctatgacctctcacagatccctctgtgcttcttcggaatcaaactcaaaccctccccgaagacccttcgaacccatccccatccaacccgtctcctaccccgtcaagcccaaacccgcaccacccgaacctcaaccttcacccgaacctcaatcacaatccctccccccttcctcgccggactcgcaacgcgcttggacgcgcgaggacatccgctacgtgaaggacgtgccgtcgatcgcgccggtggcgtacgcctcgcgcggcggcgtggcgcctctccccgatgacagagctcccgtggaggacgcggcagagagcgagaggaggatgatcgaggcggagaatgaaatgaggttgcgaatggccaaggccgtcgaagaggaaagaatgaaggtgccgtttccgctgctgattaagcccaagaagaacgagaagcctcatccgcttgatttgaacgaagccattcgctctgttaagtgtgatggtttcgcaaagtttgatgaaactgctgaagcacataaaggtttcgtgtgtgagtcaaagcgaacagaacatatatcaagagacatgacaggacattcaaacttacagatccgtcatccgaacactgcccacctggtgagtttgttcgtgaaatccctctttcaactcgaattcctgaagatgccaatatagaagcatactatgatgggccaggatcagtgcttgagatcatggtgccaaaacttcgtgtgggatcagaagagcatgaagttcgtgtttgccttcgccctcatcttggagggaatgatcttatgttgacttgagttttaggctcttattaaaattgttggggttgcaagcatggtccgaaaatcattgttttactaactttgtgcctgtgttatctacaatacaaaag

SEQ ID NO: 97194 - DNA, 129 bp, Glycine max
  Clone ID: PAT_MRT3847_58780C.1
accacgcgtccactcaatattcttacagactttatgctgctctctaaaatagctttcgcgtgattttaaaaatgtcggtgctctcaactctcaccatccttaacctcttaaacactacttataaaatta

SEQ ID NO: 97195 - DNA, 371 bp, Glycine max
  Clone ID: PAT_MRT3847_58781C.1
ccccggaattgtagcccaaccgcgatcacaggttgccgggccttatttccggaaacaaaagcattcgtcacttgatttcaagaatctctcaatctcttcttactggtttgggtacgatctctcaagggaaagaacatcactctctgtgctggccacagacttcgcgaatcattttctttgccactcttagtttatttgctggacactctcctatttgatataggacttcgggtcagatctaaactctttgtgcctctttctgagcacgctggtgaaatttaagctcaaggtggcgacatctccggattggtgctggccctctcgggtcgagtctaggacttctcgggtagacttcactatctcattcccac

SEQ ID NO: 97196 - DNA, 360 bp, Glycine max
  Clone ID: PAT_MRT3847_58782C.1
ggctcgagctcctttttaatcttttattggcgtggtctgcctgttctctctttgtactggcgtgaatcttggtgaagctcagtgtgacgctgtggggagacatggtaaactgcattaaactatggttgtgcttcatgtactgctgtatcttgaagtcaaggctgaagggatggagatgtgacttatagaacacgtaatgggatcggtggctagtgatagttgggatttgaacatcataaacgaatttcgaagatgcatactccaattccagcatttaaacctgtgccaatcgcaactctcagagttttgaccgttaccataacccccttcagttgcagtgtgctatcctattgccaagcc

SEQ ID NO: 97197 - DNA, 2765 bp, Glycine max
  Clone ID: PAT_MRT3847_58783C.1
ccgacgcgtgggtttatgtttaacagtaggctaagtaaagtgtgtttcaaccgtatgatgaaatgatgagaatggttaggaagaagatgttaacaatggtttcaatttcaaatctacgccatagttcttctcttcctataaataccaaatcccaatttctttctccacgtccacacacttttctttcaggcacccatctaagactacccgataagaagcaactctcaatttctgattttcgaattcgcagacatttctttaatcgagtgcttccggtggtatcattcaagaggagagtagaggaagataaagagatgacgataaaacctgttgttcgtgtttcggaggggaagctggtggtgaaggagcgaacgattctgaccggaatgccggagaacgtggttgaaacatcgacagtggaaggaatgtttctcggagtggatttggagaaggaagacagcagacaggtggtttcgctgggaaagttgaaggatgtccggttcatggcgtgcttccggttcaagttgtggtggatggcccagaaaatgggagatcgagggagggacattccgctggagactcaatttctgttgatggaaaccaaagatgggtcccacctcgagtcagataacgacaaaaacaagaaccagatcgtgtacacagtttttcttcctctgctagaaggctcattcagagcgtgcctccagggtgactccgacgaccagctccagctctgtctcgagagtggcgacgtcgaaaccaaaacgtcgtcgttcacccacgctctcttcatcagcgccggcaccggccccttcgccaccattcaccacgcttaccatgcagttcggaacgaactcaacacgctccgacgccgagacgagaagaaactccctggcatcatcgactacttcggctggtgcacctgggatgccttctaccaggaagttactcaggaaggagtcgaggccggaatcaaatccctagccggcggaggcacgccgccgaagttcgtcatcatcgacgacggatggcagtcggtgggcggtgacgacaagaaacaaaactcaaattcgttgcagaggctgacgggaataaaagagaacggcaagttccagaagaaggaggagccagaattagggataaagaacatggtggaggtagcgaagaagaagcattcagtgaaaaaggtgtacgtgtggcacgcgataacgggctactggggaggggttcgtccaggggtgaaggaaatggaagaatacggctccgtaatgaagtacccaaaggtgtcgagtggagtgacagagaacgagcccacgtggaaagtggacccgttagcggttcaaggcttgggcctggtaaacccgaagaaggtgttcacgttttacgaccaattacacagttatctggcgtccgctggtgtggacggcgttaaggtggacgtgcagtgcattctagagactctcggcgcgggactcggcggaagggtggagctcactagaaattaccatcaggcccttgacgcttcgatttctagaaacttccctgacaacggttgtatcgcctgcatgagccacaacacggacgcgctctactgctccaaacagacggcggtggtgagggcttccgatgatttctacccgcgtgatccggtgtcgcacactatccatattgcgtccgtggcgtacaatagcgttttccttggggagattatgttgccggattgggatatgtttcactcccttcaccctgtcgcggagtaccacgcttccgctagggccataagcggcgggcccctctacgtgagcgacgcgccgggggagcatgactttgatctcctcaggaaactggttttgcccgatgggtcggtgttgcgggcccggctcccgggtaggcccaccaaggactgcttattcaccgacccggcccgcgacggggttagtctgctgaaaatatggaacatgaataagttgggtggggtgttggggctttataactgtcaaggtgctgcgtggagtgctaccgagaggaagaatgcgtttcaccatagtacggattctggtgctgctgccatcacaggatatgtgaggggttgtgatgttcacctcattgcggatgctgctgctgatgatgattggaacggtgattgcgcgctctactctcactactccgggcagctgattgttcttccgcacaatgtggcacttccggtgtcccttaaggtgctggagcacgaggtgtatgctgttgcgcctgttaagaaggttttgggtggtggtgctggctgcagctttgcggctcttggacttgtgaacatgttcaatgctggtggtgccgttgaagggctggtttacgagcaggggttggttcgtgtggaggtgaaggggtgtggtaagtttggggcttattcctcggctaaaccaacaaggtgtatgctgggaaacaatgaggtggtggatttcgattacgacgctgattccggcttgctcatcttcaacatagatcatttgccgcaagagggacacagggttcacttagttgagttagtttatagtctatcttcttaattatttagttaccatattgttgaatcagagagggagaggatattggtatggtggtgtggtggtatttctttcttttgctggataggatacagtagagggttttcaacaatttctactttgtaagatttcacgagccatctttgttttcgaattttgatagaaattgaatacatgtttcttactctagttattttttaaaaa

SEQ ID NO: 97198 - DNA, 240 bp, Glycine max
  Clone ID: PAT_MRT3847_58784C.1
gtgctcctgctggtgctggtcccggatttcttgggtgggcccgaccctgtccgcccgggctggtgagaagacacagaaggggttaatattaactccacggtcgcagtagacaccgatattattaccttgtgcttgcgcctccgagattattacatgtcgcccgtcgcaccatttattttccccggttgatcctccctttgcatgccattagcttcttgggcgcgattttcgacctctgct

SEQ ID NO: 97199 - DNA, 216 bp, Glycine max
  Clone ID: PAT_MRT3847_58785C.1
gactttttgaggctctggggccttcaatttggccttgcatcctctttctccgtgtgaacatcaaccatgatcaatgacctcatattgcttccctagataaagaagaggccgccattctaggtttgcaagctttttggcaatgcttataggtcgtgtttttatgccgtggggaggcctagccaccttcattaccctatgatattcataaaaatatat

SEQ ID NO: 97200 - DNA, 284 bp, Glycine max
  unsure (1)..(284): unsure at all n locations
  Clone ID: PAT_MRT3847_58786C.1
angnaaatacgannagnnagantggnancntggaannaangtagaanngnnngcagaangnnatnntanagagnacatggaaatgngatcanggtngaaaaaaggtgncagcanagtnnagatgaaagcagntangaggtagtnggcnntgnnnagagngaagagatngatgngnangtttgnnnagngtagnaananggtgttngnanngggtagaganaannagcngcaggaatcagagancnnaggnangacganangnnntagagganncagnnagcana

SEQ ID NO: 97201 - DNA, 646 bp, Glycine max
  Clone ID: PAT_MRT3847_58787C.1
cacagttatagtagaacacaactcttcagcatggactatagggctaaacgttgacttgtggtccacaatatatggtggagttgttgttgctggtttgataatctacattcaactatggtgcactgagaaaaaagggccagtttttgtcacagtgtttaatcctctttctacgatattagtggcaattctagcctactttgtctttggagagaaactttatttgggcagcatcataggtgcaataattgtcataattggtctgtactttctgttgtggggcaaagaaggtgaccaagaggtttatatgaagaccaaagataaatcccagtgcagtactgtagacccagaatgcagaatatagaagaagtgtgtccagtgttctcttatcaaggtgggaagagaacagaacgtttaagtcatgaagctttctattctagtcatacgttttggccaaacattttcgtgtgaaagccataacggtttgttgctttccaatgctcttgaaatcagacattttagttaactaattgggtgttcggatctacgtgacattccttttaaaatcacgttgtgtttgtgtttgacgtgaaaaaaaaaaaaaaaaaaaaaaaaaaaaaaaaaaaaaaaaaaaaaaaaaaaaaaaaaa

SEQ ID NO: 97202 - DNA, 150 bp, Glycine max
  Clone ID: PAT_MRT3847_58788C.1
gttgaggtgattgcatttaataatgtagagggtgatagatttctgactactatcttgagcagtagtgcgatagctcatatgatactctggcacaacattggatggatctgatacgatggaggtgatgagtaaagattttcttaaggagaa

SEQ ID NO: 97203 - DNA, 310 bp, Glycine max
  unsure (1)..(310): unsure at all n locations
  Clone ID: PAT_MRT3847_58789C.1
gcacgccnngcaggaccggaccggaaggcccgggccgacccacgcgcctcggttcgttgcgaaaagcgagccaccacccggcgcgctgtaagtacccgaaccaagccccggccgcccaaanccaagggcgancgagcncncccggcgaccacacncgccnccacaccggcacaaagcaagccgaagacccgcngcgagccgagacaacgcgccgcgccccgagacgcacacagcgcgaccccaccaggcacgcccccgggcagcacgacaccccagaagcacccaagaccggcccggnnaccaaaacgca

SEQ ID NO: 97204 - DNA, 275 bp, Glycine max
  unsure (1)..(275): unsure at all n locations
  Clone ID: PAT_MRT3847_5878C.1
ctcctctcttccacagttgggggagagtctaatatctatcattaatgactaccatatacaacctatgatatacaggttctcctgctttaactcaactgggaacccactatttncanccananccaacaaatacggaactagaaactgttgatcaaccaaagaaccaatttatcactctccacaaaaatatcaatccacagggctgagaatattaacttcaaattcgcatattgtagtccttaatcatagatattagactctcccctcttccacat

SEQ ID NO: 97205 - DNA, 154 bp, Glycine max
  Clone ID: PAT_MRT3847_58790C.1
gacgttctggattattcaatagtagtgaccaacgcttggctgacactagactactctgcccctttcgaagaccaaaccttatatgcatccagatatgcactggttactgattctgagctggccatctgatgatagatttacatttagggggaac

SEQ ID NO: 97206 - DNA, 520 bp, Glycine max
  unsure (1)..(520): unsure at all n locations
  Clone ID: PAT_MRT3847_58791C.1
gtcaactcataagcgacagttatgtgcaccagcatcttgatactgcttccttttaggccagcatcaaactattctatataggacatgatacaggacaacaatagcagtgtacaacctttttctcacattatccaactacagngtgtcagaatgaccagggtttcgagtgtgcgagattcgaggttcattctacacaccagacacctatattgcatagggatgaacactaggcaatatgtgacatatagctgcactaggagttggtaaagaaccctcgctatggaagggaggtgagaataacaagaagatttttatgctaaactccctgtgtcgtgacagactttgaagggaatgctaaacagttactatgtggtacacacctcagtaacagaggattataattccaaaatacacactagtacttacttagtaacaggctacagccaaatgcatgcccttcttcaaacattcaaagcttggacaaaactggcttacgattctagttatgggcgatcactgg

SEQ ID NO: 97207 - DNA, 233 bp, Glycine max
  Clone ID: PAT_MRT3847_58792C.1
attattggtgctggttcacattctttataagattttcctgaaaaggaagatcatgaaaaacccacaccgattgatgcctgattgagacaaagaatagattctctctacaatgaggtttaggctcagatgggaacaaaacagtttaaattgactcttgttgaggttgtaactcctcaaggatccatggtgggtcttaaaatatctcaatttaaaaatgggctttccaaaaacac

SEQ ID NO: 97208 - DNA, 324 bp, Glycine max
  Clone ID: PAT_MRT3847_58793C.1
ataaaacacgaatctttgcttcaaagcaaaaaaggaaggggggttcaaacactctggacccatggcttaaaaatggagggaaaatggctgctatcagaatcaatccagcccgagtacatctgcaagtctttaagaacccacaaaactccatccgctacccacaataggcaacccaaaagagcttactgctcgtaccagggttacaacactggttccggaaaccgatgtattcatactctccaattactgcgcgagcatgaccctctgtcgcagctcgaccatcacataatgctcgaaccaccttaaatgaaaagacttcttggc

SEQ ID NO: 97209 - DNA, 348 bp, Glycine max
  Clone ID: PAT_MRT3847_58794C.1
aaaaaccgagggacaaaacaaattaaaaaacccccccaaaaaggtgaaaccaaccgaccccacaaactaaggggcccccaaaggggacccggacacaaaaaaaactaaaaaaagggaagggaggggaggaaaagggggcccccaagggggggggaaaaaaaattgacacacgcccggggccgggtgggcggggttttcatttgcccccatccccggtccaaaaaaagggcgaatagacaacgcttgaactcctggaaaacgaggccccccctccaaaaggggcccccgacaaagctttacccccaaatcttttccacgcctactttcctttccaaaaagggctttaaa

SEQ ID NO: 97210 - DNA, 1744 bp, Glycine max
  Clone ID: PAT_MRT3847_58795C.1
ctatctttacgaatcttcttcattacatggcttcttcagatcccatctcttctcgccactacacttacaacagaaaacaaaaatggttttgtcctccagtgactaatttcttgcgcttcctaaaacgccaaaactgtaaaatggttggggtctgggttaggcccacccaaataagtttttagaaggcgcagaactatcgccatagtaatatccttgggggcatttgggtcccgctaaggtaaccaaaaatggaacctcccaggataaggatttgcagcagctctctgactctacaagacttcaaggaagagggagagccaggtagcgtgaatttactgtgggggtttgtgcatccggttataatactgaatggtaacactgatttttataaaaggcgagggataggccatcttccacctaccattatcatgcataaaacaaattgtacttatacttatgatccgtaaaatctagattggaaagtaaaatctctggcactgattctccagaatttagtctagctctttgtctgctctaatgaatcatagatctgccttgacgatgctgcaaaattgatacttggggatgcccattatatgtatgcattgagaacgaaggtctgacacctatatgacatcgcacctgtgctatcctccatgaaccttattgagaagacccatacaatggatacacgaaaaccagcattcaggtggctcggttctgaagggaagacatgggatgagacacttcacaaatcaaacctaaacgactctaggaaaagggcgtttggaagtgatatcactaacatcagttttgagaggaataaagtggaattgttcacgagtggggacttgaatccgaatcctaagaagccaagaatggaaaatggtagtgggctgggtgaggcagacgaaaacaatttaaaacaaggcataaaacaagcttcaaagagctatgaatttggtcctttcgctccagcttgcgtgcccaaagttggagcctctcagaataataatatgaagcaggtgcatgactggggcagtcttgcaactgcacatagccctcagtatcaaaatgaagcttctccctctctgttgcagcaaggccactgcacggtcaaagcatctagctgtgcctcctttgtgtgattttcaaagctttctgatgcatatatcctctttgagcgagtgagagccagccgagggataggtcagcttcctccaaccgttatcctacataaaaaaactggttcttagacatatgaaccccttgagagaactcttctcccattacatggaagcatggaaattgtggtactcagaaattgctaggaagaggccattacaaattttgtaaacgtatgccaaagtcaaactataggtatgtttggatttagtaaaatttagtctggaaacttggtttcagagaagcaagacttgggatactagtgtaaacttaagtttgcaaattttaatccaaacatggggtgtgactttcctcactagagaatatctgtagtatgcattctcttcatgcgtttgtagagctgagcttccatttactgccttttcaaccgtgatgttgaccgactgaatcagcttaggcagttcttgcaaattatttatcacatttgtttgttgtatagtttctaccctttatttaatgtagcaggaaatcttgtgccctactcctgtactgcagtctggagctgctaatttaaggaaaataaaattcgagttgtttt

SEQ ID NO: 97211 - DNA, 460 bp, Glycine max
  Clone ID: PAT_MRT3847_58796C.1
aattctcttatttctttcgcaaccaatttttttttttgggttttttttttattttggccgcccccaaaaacaacaaagcgcccgggccctcagggaggtttttatatttcaaaaactccatccccttccccgaaaggaccaccaaaaaaagcttattgcccctaacagggggacaacaccgggtccccaaaccggagggttgaaaccccctatttcggcccgggcaaaaagacccttaatgggggctaggcccccgcccattgtggttaaaccagctttttttttttggaggcaaccttaaaaagggcttttgggaacaaaaacaacacgggtaatgccacgggggctggatcccccctcggggggtaccaagagacaaggttaacaaaggttttatttaatgccagtcccccccttgggataaaaacacttggggtggttttgcccccaaggggggggg

SEQ ID NO: 97212 - DNA, 462 bp, Glycine max
  Clone ID: PAT_MRT3847_58797C.1
tacggctgcgagaagacgacagaagggggcagcacacacaaacaaatactctctctctctctctgcatgagaagataacaaacaaaacacctcattcttcatggctcaccaatcctcttcttctgaatctgatgaccatattccttctcatcatcacccattggacctaaacagtccccatccttctaaagatatcatcttcgacgacaacatggagctacaacagcaccaacaagaagaagagagcaacattaacaaccatgaatatgatggagataataatagagataaagatgataaggatgatgttactactacacaaaacccatctgcagcttcagaaaccaacgaggagaaaattgcattacaagaagaggcttcagatgatgttgttgttgaagcagaagaaaaagaagaggatagtggacgagagaggctgaatcggcatagagttgaagtggc

SEQ ID NO: 97213 - DNA, 466 bp, Glycine max
  Clone ID: PAT_MRT3847_58798C.1
ctgcgagaagacaacagaagggaggtcgcatctccgtcaaatgacgccgtcttctagtcctatattacaatccgagaatgcaattgacaatgttcgagaagtaagccattcaaagttttcatgtgtctatttcttgcttgcatctatctcttttttctccacagtttccactcatacactaacattgaagccaattaagcattaaacataaccctcttcgtgctcttgaatgctaactcattcattcacattggccattataaccctccttccacttccataccctcattcacaaaacttcactttcttgctctcaaccttgcactttttccccaggtaatttaactgtctatcttctgcaaatacgtctggtttgtcttattcttcttttatttcaaatgctgatcatggcaagtttagttctatgcttgctatatatcaagctaccccgatttatttgtttttt

SEQ ID NO: 97214 - DNA, 634 bp, Glycine max
  Clone ID: PAT_MRT3847_58799C.1
aattcagtggacacaatatccgaaccgatactcgttatccaattggttttatggatgttgtcagtatcccaaagaccggagaaaacttccgtttgttgtacgacgttaaaggtcgtttcaatgttcaccgaattactgaagaagaggccaaatttaaactctgtaaagtaaccaatgttgctattggtagaaaggccattccttacctcgttacccacgatggtcgaaccgttcgataccctgatcctttgattaagcaaaatgataccgtcaaattttccttggaaactaatactattgttggacatgtttcctttgatgttggtaatcttgctatgattactggaggaaataacttgggtcgtatcggagtcattgaacgacgagagaaacatcctggaagttatgaaattgtgcatcttaaggattctgctggtcacaagttcgctacacgattgagtaacgtctttgttattggttctggagttactgctttggtcactgttcctaagagccaaggagttaaattgaccatcatgcaagatcgtcaacgaaagttgaaaaaccagagttaaataataaaatttggtaaatatcctagcctggcgtaaaataaaacagtttttctatcaac

SEQ ID NO: 97215 - DNA, 652 bp, Glycine max
  Clone ID: PAT_MRT3847_5879C.1
taatgatgaagactatactttgtctgttaatgctccttctgatcgggttccagatatagacatgcaaccaagtgagcatccctggttgaatgactttagtggggtgatgaagaatgtccgtggccctgttactgctgcaaaaactatttatgaggatgaagaaggttacatgattgttataagtctgccgtgtgtggatctttcaagtgttaaagtttcttggaggaatactctcactcatggtatcattaaggtttcttgtgtgagcacatctgggaagccatatatcaagagacatgataggacattcaagcttacagatccatcatcggaacactgcccacctggtgagtttgttcgtgaaatccctctttccgctcgaattcctgaagatgccaatatagaagcatactatgatgggccaggatcagtgctcgagatcatggtgccaaaacttcgtgtgggatcagaagagcatgaagtccgtgtttgccttcgccctcatcttggagggaatgatcttatgttgacttgagttttaggttcttattaaaattattggggttgcaagcatggtccgaaaatcattgttttactaactttgtacctgtgtaatctacaatacaaaaaagtgcatctcacaattatctcc

SEQ ID NO: 97216 - DNA, 1468 bp, Glycine max
  Clone ID: PAT_MRT3847_587C.1
ccggctccaggaagccgcagggcgggaacacaagagaaagaagaagaagaagaagaagaagaagaaaagggttttgtgtgtgtcgaagtgtataattccttccttcaattaatctccgatccttcaattaatctccgatccgaaaccgaatggggattctgtacgcgctggttggtcgtggatcggtggtgctggcggagttcagcggcaccaccaccaacgccagcgcaatcgcgcgtcagatccttgaaaaaatccccggcaacaacgacacgcacgtttcttactctcaggatcgctacatcttccatgttaaacgcaccgatggactcaccgttctctgcatggccgacgacaccgccggaaggcgaattccttttgcgtttcttgaggatattcatcagaagttcgtgcggacttacggacgcgccgttcactccgctcagccttacgggatgaacgaggagttctctagggttttgagtcagcaaatggagtattactccagtgatcctaacgccgataggatcaatcgtctcaaaggtgaaatgtctcaggtacggaatgtcatgatagaaaatattgacaaagttttagatagaggtgatcggttggaattgctggtcgataaaactgctaatatgcaaggaaacacatttcgcttcaggaaacaagctcgtcgcttcagaagcactgtttggtggagaaatgtcaagcttacgattgcacttatagtcgtcctactagtgatagtttatgttgtattggcatttgtttgccatgggcctgcgctaccatcttgtttttaagtgaaggattggcaagtgaattttatgtgtgctttcttgtcttcttcagcttgcagaggtcacttcttttttatctgccattgttatgcagactcccatttcttcaacttaatttctgggttgtccacttttgtgctagtaaatttcttgtaatagattcaagtgttttgggttgtatttttcattatgagacttgaggggcaaaattttttttttgtatcatgttatttattgtattctcctaccagcccaaagatttggattgaaccagaaaatgactgagattataattgatgtatagtgttgcagcttgaggttgtcaacatgtcatggatgttctcttgttcaagagggagaagggtaaacctaaaattccatgtgtcccttcatagcttagtgaagggggatttttaaattgctcggcccggttctcttgtccaattgatgtgtgtgcaccacataagcttaatgtatattttcttaaatttatctttgtctgttttaatgttccttttatgtgtcaagtgtgaactgtgaagtatgaaggttcgtgactttatttcttttcgcgttggtgattctgaaatggtccaaagaaaagtgattgtgatgcaagagacctatgtcattataatcagcaacagcgtttctgataaaaa

SEQ ID NO: 97217 - DNA, 643 bp, Glycine max
  Clone ID: PAT_MRT3847_58800C.1
cccacgcgtccgagatcgcgagcggccgctcgcgatctagaaccccacgcgtccgaaaaaaaaaaaaaaaaaaaaaaaaaaaaaaaaaaaaaaaaaaaaaaaaaaaaaaaaaaaaaaaaaaaaaaaaaaaaaaaaaaaaaaaaaaaaaaaaaaaaaaaaaaaaaaaaaaaaaaaaaaaaaaaaaaaaaaaaagggggggggccctttaaaagaaacaagtttaattaccggggggtggaaaggaaaaatttttttaaaggggccccaaaaataaaatacgggggcggggttttaaaaccgggggaagggaaaaaaccgggggttccccaaataaaacgctttggaaaaaaacccctttttcccaaggggggaaaaaaaaaaaaagccccccacaaatcccctttcaaaaaggtgcccaacctaaaggggaaaagggaaccccccttaaaggggccattaaaccgggggggggggggggtttaccccaagtggagcggatattttggcaagggcctaaaacccggccttttgggttttttcccttcttttttacacaagtgtggggggtttccccggaaaagcttaaaaaagggggcgccccttttgggggccaaaaaaaagggtttaaggggccctacacccc

SEQ ID NO: 97218 - DNA, 734 bp, Glycine max
  unsure (1)..(734): unsure at all n locations
  Clone ID: PAT_MRT3847_58801C.1
gaaaaatatagacttagcgaggacttatattggtggtgtgtacagtgcagaaatttcgtccataaacgctgcagactacacccactatatagttatgcttcaaaagtttggtgtcactctgggaaaaccaactgagttgtagtaacaagcttaaaggctacataaatggaagataaagctgcgataaaagaattgctggaagacgaggaaaacccatatgataatactggaaacaaacaagatgcggagaaattaccaatgctacacacccggcagtttttgaatatgggcgagtcttcatcaattttagacggcaacacaaaagcatgtgcaatagcagaaaacgctgaaaagaaaatgttaggcaaaaaccttgcatgtgatgataataagtacaatgttgaaggtgaaatcaacagtcaaataacatcgcatgaagcaaaaagcacagaagatcaagtatctgaggttacttgcaggagagctagagtgtccataagagcaagatcagatttttcttcgatgtttgatgggtgtcaatggagaaagtacggacaaaagacagcgaaaggcaacccttgtcctcgagcctactaccgttgtagcatgggaactgcatgtccggttcgtaagcaggtgcaaaggtgtttcaaggatgagactgttctcatcacaacctatgaagggaaccacaaccatccnctcccaccagcagcaagacctttggcaagctc

SEQ ID NO: 97219 - DNA, 286 bp, Glycine max
  unsure (1)..(286): unsure at all n locations
  Clone ID: PAT_MRT3847_58802C.1
caaatgcccattgnttttcccaacaaacttcctcttcctcctcaagaataaaggcattcttaatattaaaagtcttacgaatttcctctaaaatcttccccttaatcatgtcgactacagtttaacatgtaagatccagcacactcttaatattgaagtgggtancatccatgatgagatcgaacatcgtagcctgggcgaccgtgacgaaattatcatcccagaccttagaatcctcctcataaaagtggtcttcgggatccacaatcctcacgtgctgctgaca

SEQ ID NO: 97220 - DNA, 436 bp, Glycine max
  Clone ID: PAT_MRT3847_58803C.1
ttctttacgcgtccgaaaaagtttgcaggttgagagcataggagggttcttatcagcagctttacaggcaccagagccacgggctgttcaaaatgctattgattttctcaagatgattggagcattagatgaacaagaaaatcttacgaatcttgggaagtttctctctatgcttcctgttgatcccaagcttggaaaaatgttaataatgggagctatatttcgatgctttgatcctgttcttacaatagttgctggccttagtgtcagggatccttttcttttgccccaagacaagatgggatttagcagggacagcgaagtctagggttctctgctaaagattaccagtgatcatatggcatcttgttcgagcatatgaaggatggaaagatgcagaaagagaagggtcggcttacgagtacctgctgaggga

SEQ ID NO: 97221 - DNA, 362 bp, Glycine max
  unsure (1)..(362): unsure at all n locations
  Clone ID: PAT_MRT3847_58804C.1
cttataaaactatgtttcatatttattagaatctaaataagagaaaatataaattaattaacttaactctaaaatcattaaaaatgtgtctagttttatagcacataatcctaacaatgattctgaaggaaaaaaaatcataataatgatatgaataattttatatttatataatttctccctcactcacataatcgatatgcaatggagggaaaaacataaaggattgactcattaatggaagaacaatcatagcaagtgggtgctgaactactccacttggcattccttngagcagtggataatctaccatgtttcatcaaccaaatgaaagtccgaagtctgaggaactttgagcttcc

SEQ ID NO: 97222 - DNA, 348 bp, Glycine max
  Clone ID: PAT_MRT3847_58805C.1
ctctaaggtgacatgtgtggaacatgcagaatcccacgataagtcacaaattccccagctatatagacccttgctgcgctcacgcatgctgtctggtgcacaagcttaacctgacactcgtgcacgccaagactagtgcctagcatattctaatatcactcagcactttcacgtagggacacacaacataatgcatctacgtgtaaggaaccgcatgatgaaactgctacaagcgctgcccaacacaatattgtctggatgctgtccccgaacagcgcacaggtagtacaggctgaacaccggaaactggcgagaggacgcgaggctgacgacgaggaagagcatcga

SEQ ID NO: 97223 - DNA, 507 bp, Glycine max
  Clone ID: PAT_MRT3847_58806C.1
gggaaagggggaaaaaaattttttttaagaaaaaaccaggggcaagggagagaaaaaaatttttttaatagggggcctatttaaaaactggccaccggccagttaaaattgaaaaatactaaggggggttttaaaaaagggaaaaggtttacaaaaaaaataaaaatagtggccccggaggggccccaacgggggaaaaagtttcccgaaacttgggtgggtttaaaaaaaaaaaactggaatttttgtttttgttaaaaaaaaaaggggtttaaaaaaaaggggaggaaataaggctaaaagtcccaggcttttagaaacccattgtttccttttgggccgggccccttgttacagtataaaacccaattgtttttttgggagctcctataaaacttcaaaaataaaaaaaatccccaaaaaaaaaaatccccaggggaggggcgaagaaatcccctaaggggcggaaaattgcaacattttcggggccttttttttgaaaccccc

SEQ ID NO: 97224 - DNA, 169 bp, Glycine max
  unsure (1)..(169): unsure at all n locations
  Clone ID: PAT_MRT3847_58807C.1
ccaaggcgtccgcngacccctgggccaaacaatcgttagtcgtctggtctgtcccgcgggagcggaggagctgtgtttatcggcaaacaacctcaaaaacattcatcaacggtcactattaatccatccatcattaagtaagaaaataagggtcgagttttttatcttt

SEQ ID NO: 97225 - DNA, 232 bp, Glycine max
  Clone ID: PAT_MRT3847_58808C.1
tcgacctgctcatgtcgcaggcgtgccgttgcacacatcgaggtggcccaccaccggtccggtaaaggccaagaacggccggaagacattcctgaggcacgggcggaggtcgcttagagcgctccgagcggacacgcgctgcagggagtgacaagcactcatggcgcacgcgtggcgccgcacaggacaacgtacagcacgagccggcgccactgcgggctgttcatgccgg

SEQ ID NO: 97226 - DNA, 150 bp, Glycine max
  Clone ID: PAT_MRT3847_58809C.1
gccccggcagatcgacgaccagattacaagggcacttggatccacccagaaattgacaaccccgagtattctcccgatcccagtatctatgcctatgataactttggcgtgctgggcctggacctctggcaggtcgcgtctggcaccatc

SEQ ID NO: 97227 - DNA, 784 bp, Glycine max
  Clone ID: PAT_MRT3847_5880C.1
ccacgcgtccgccattttccaaaacccctctctctctctctgacacacactaccatggcggcactgaagcttctcctctcccaagctcgccgccattccctccccaaatgcgctttctctatgacctctcacagatccctctgtgcttcttcggaatcaaactcaaaccctccccgaagacccttcgaacccatccccatccaacccgtctcctaccccgtcaagcccaaacccgcaccacccgaacctcaaccttcacccgaacctcaatcacaatccctccccccttcctcgccggactcgcaacgcgcttggacgcgcgaggacatccgctacgtgaaggacgtgccgtcgatcgcgccggtggcgtacgcctcgcgcggcggcgtggcgcctctccccgatgacagagctcccgtggaggacgcggcagagagcgagaggaggatgatcgaggcggagaatgaaatgaggttgcgaatggccaaggccgtcgaagaggaaagaatgaaggtgccgtttccgctgctgattaagcccaagaagaacgagaagcctcctccgcttgatttgaacgaagccattcgccaagttaaggccaatgccaaggcaaagtttgatgaaactgttgaagcacatataagattgggtgttgattcaaagcgaacagaaatggcagttcgtggtactgtgattctgcctcatggtgctccaaaggctgtcagtgtggctgtttttgcagaaggggctgaggcagaggaagcgaaagctgcaggagctgata

SEQ ID NO: 97228 - DNA, 508 bp, Glycine max
  Clone ID: PAT_MRT3847_58810C.1
gattttttggttctgcaagggcatgcattcgtgatatggagggatatacatggttatcaattcgtgacctaattactacaagctttattatatggtattgtattccacttgggaccatcgcatatttatatacaagaatcggattggtcttatggaatagtggcttaaaacctcttgaaattcggtattctagtgactcatatggtggaccaccaacattaacaatcaactatgaaggggaatcattgactggtaatggattacaaagatcaaattctaatggtacacaatcaaaaattcatgatcatacttcaatcaattctgatgtactagaaacacgaaaacgaataattcggcttcttatcgcaattgtctgctcttttgctgttttaacacttccccatcatgcacgattattgtatacgatgtggtcagatacacatatgtgtaatagcactgcaacagcattattacaaccttttgcatatttatcattatttatgtcatc

SEQ ID NO: 97229 - DNA, 214 bp, Glycine max
  Clone ID: PAT_MRT3847_58811C.1
aggtgagattgataacgacattaaaacagatgagttagcggaatttgaattggctagcatcaaatttgcaacaaataactactctgaatgaaataagcttggacaaggaggattgggaattgaatataagggtaagcaatctgatggacaagaaattgaaattaaaagaatgaatataaattctaaccaaggagaaaaagaattaaagaatgaa

SEQ ID NO: 97230 - DNA, 235 bp, Glycine max
  unsure (1)..(235): unsure at all n locations
  Clone ID: PAT_MRT3847_58812C.1
taancacaacatctctatcnagtaaattaactatgaagcctaccctactattatccctntccttcctnacctctctttgctttcctggctctttcacaagancttcaacaagttgtgggacntnagtccncnacccnatttncccatgnntnncgtatnacangatgccancaactnggnngcnnaccatntggcgattnaaangagngtgtacatgaaagtnaaactcgccggt

SEQ ID NO: 97231 - DNA, 336 bp, Glycine max
  Clone ID: PAT_MRT3847_58813C.1
cacaactccactctgtctgtctctctgtgattcaacttcagcgaaatcgacccctaaccgaagaccgtgcttgtacgtctgacaagccacgtttatacttgcggctctgctaatacaatcagacttgagccgaatacagaaaaattctgtgaacaagggagatgatgtcgcggtgccacgccatacattctgctaatagcacctggagcccttaaggatactactacactgttgctggcttaagtcaacacttattacgaagacttggtcattgcgataaaaagggccacaaatgatgtggaacgtacagctatcgaaatacatataacacctata

SEQ ID NO: 97232 - DNA, 355 bp, Glycine max
  Clone ID: PAT_MRT3847_58814C.1
tttttatttttatttttttggaggggatttttttatttattttatattcaaatgtaataattgtttttaaaaaaacctaatgggaacaaggcgccgaggcttgattaagcaattaaaggataaggaaactagttccccccccggcttgcccaaaaagagggccatataaaatgggctaccttttctcgaaaacgacgtcccctaaaaaaaaaaaagggttgggaaaagacactatcaaaaggggaccggggaaatctaaaggttaacaaagagccgaaccaagaaagaaatttttagaccaagggggacaacaggggccttgagaaaaaatggggggggaggaaaaaaaattacc

SEQ ID NO: 97233 - DNA, 340 bp, Glycine max
  Clone ID: PAT_MRT3847_58815C.1
gggcacacttcaagccctgcaaacgtgcggatgctatgtgaaaacaatatgtggaatggcaagaaggacacggagctcagacgactctatggaggcacatgacccatactgctgagcaggaggagccataaagccactgccttcatacgaacatgagccaggatgtgctacaatagctaggcagatgggccacaggaggaaaaactcaacatgcagataatgagggcgaggaaaagagagctcaacacagagaatgtaaacggctgacataccaaaatgacaggtggacctaacacggcccagaggcttgaattctgtctaacgaattgaggaaccgcat

SEQ ID NO: 97234 - DNA, 395 bp, Glycine max
  Clone ID: PAT_MRT3847_58816C.1
ggtttctggactgaccgttggattcctggtttccaacctctctcttctatgatgcaggttcaaattcctccacaggaatgcaatctggcagtgtctgcatatagctttcatgatggctggaattggagagggttgaataacattcttcccagaatgtttgttctaccattgctgcaataaatccacctgttcaaggttacaaagatactccaatatggtgtacctcgagaaatggtatgctatcagttaagactgcatattggtatcttgcaggttattatgataatcccagggatgagtctggagatttcaagatgatttggagatatgaaggccctcagagagtatgtttgtttctatggaaattgatgcatgggaggttgctccctaatgaa

SEQ ID NO: 97235 - DNA, 764 bp, Glycine max
  Clone ID: PAT_MRT3847_58817C.1
tcgggatgtttacatagtaagtagaaacccctgaatttctcactcttttctgttcctgtctgtctcttttgtgtcactgctagacacttctttcttccgcattgcttctctgcaattctttcgccgctttctgcgtccatttcggtcttctgacattttgggtcttctctttctccgagcttagacacgctctcttaaaagattgctttttgataacttcccagtggtttctgtgaactgggaaatgatcacccccactcaaatagtagtgttgctgcatttggattaggaaaacctcgttggtcacgattctcgaggagccccaagggtttccaaaaattccgtatctttttgggtacccatttgagaagagatcactgggtttcagcctgaaattattggagttacatgggtttcccttgatctcagccgagaatcggtgtcactattgtcgatggaactcaactggggtggttgtgttgtgtgtgccaacctgaatgctgctgattagggaaaaacaaaaaagaaagaaagaaaagaataaaaataagattgaatcttttaaaaccccttactataccttgcaaggtttgtgcatgacatacatacgtatacttataagccattaaagtatttgtttgtttgactgatgctgttttattagtttaattatttaattatgcatcaaagtattgtttctccctgataaggacttgtgatattaaatataaagttttttttttgttttttttttgtggaaaata

SEQ ID NO: 97236 - DNA, 538 bp, Glycine max
  unsure (1)..(538): unsure at all n locations
  Clone ID: PAT_MRT3847_58818C.1
agatgtccattcaagtagcctgccaacccctctccttttagaatagaaatgcnnctacgttcctttagcggttaagtaggatttatatagaagggataggttttagtcctggttcaaggtgtgaagagagaggctgtcccaaaaggacaggtacaagacgaagtggcagaaagatagaagtattgcacccttcaatgccttttcatgctgattgagtagaagaagtcagatagaaggactagtcccttagggaatgatcttatctggctttagactcctttcaacgacacaagagacaaggttatgaaagagtttgcctaagaagcttaagggcccttgccgcaacacagcgctaaaactttcgactcaccggcggntggcttcgtcttcactttcaagctggaacagaacgtaagttgacaacctttagcttctactacaacaacaatagacctatccttcctacttaactgcttaacngcagctngtgtgacactcgaatccaatcttctaaggagtaagttaaaatacccttctt

SEQ ID NO: 97237 - DNA, 1351 bp, Glycine max
  Clone ID: PAT_MRT3847_58819C.1
agaacacttggtgattggacccggagtctttaacagaggttaacagagtgttgccagccaccggacaacggcaagagtggacttctaagagctgaatacttgcaaggagatagaagtccgagtactctccctaaagttctaattgatggtccttacggagcaccagcccaagactacaagcaatatgaggtggttttgctagtggggctaggaattggagccaccccaatgattagcatactgaaggacatagtaaataacatgaaggccatggaagaggaagaggggagcaacatagaagagggaggagcaagtagtgggtttggtaataaatccccaagagggtcgtccccacacaagaaaagtggctcgagcaacttcaacactaggagggcctacttctattgggtgacaagggagcaagggtcctttgattggttcaaaggggtgatgaatgaggtggctgaagaggatcataggggggtgattgagctccacaactattgcactagtgtctatgaagagggtgatgctcgctcagctcttattgctatgttgcaatctttaaaccatgctaaaaatggcgtggatattgtctctggcacgcgtgtaaagtcccactttgctaaacccaattggcgcgctgtctacaagcgcattgcggttagtcatccacgatctcgtgttggggtattttactgtggaccaccagcgctaaccaaacagcttggtcagttagcttcggatttctctcacaacacaaacacgaaatatgatttccacaaggaaaatttctaataagatggagattgttgagggcaagatggtcttccagctttatatcacaccatgaagattattacaccatatccttgttgataataattaatccatgtgtttcaatgtaggaataataattacggatttgtataattgcgaaagctttgctttaaggttaaaatggttgtttgtgggctaccagataccaaaggtgtgattggatggcaacggcatcagttccaaaagtgaatcacgagatgatgtgcaatgcgagtagcagaagattacatacttaaacatttcgtggaggggaataatttttccaaccggaaataggtggcagcacttacattacatgaacctcataagaattagtccaggtgcatcatggactctacaaggttgattgtgtttaaatattaagcgatcgatgttatggaaatgaagacctataaccattgtagcaagtaacattttgcattgtaaaaaaattaccaccttggccttcaagaagatattaaagtatatatatatatatatatatgcaatgaataatcaaccgtgctttatc

SEQ ID NO: 97238 - DNA, 2285 bp, Glycine max
  Clone ID: PAT_MRT3847_5881C.1
taacttggcgaatggcttcgttcaaatcaagcggaggcggcttctcgtttttctggggcttaatcagcagcgggaaaggctctttcattctttcatcctcggcggcgttggccattcgcatcctcatttcattctccgcctcgatcatccttctctcgctctccaccgcgtcctccgccgccacaggcgccctgtcgtcggggagcggcgccacgccgcgcgaggagtacgacaccggtgcgatcgacggcccgtctttcacgtaccggatgtcctcgcgcgtccacgcgcgttgcgagtccggcggcggagggcggtgggattgtggttcgggtgaaggttcaagttcgggttgaggttcgggcggcgggggtttgggtttgacagggtaggagacgggttggatggggattggttcgaagggtctgcggggagggtttgagtttgattcggaggaagagcagagggatctgtgagaggagagagagataggagagtggaagtgagaagcgcgtttggggaaggaatggcggcgagcttgggagaggagaagcttaagtgccgccatggtggaagtgtgtgagagtgttagagggagagagagacagagaggggttttggtttttgggaaatgaggttttgctggggaagaaggaggccacgttggttcgggttttgaaacaccccgaattctaatacccctctctgtctctctctccctctaacactctcacacacttccaccatggcggcacttaagcttctcctctcccaagctcgccgccattccttccccaaacgcgcttctcacttccactctcctatctctctctcctctcacagatccctctgctcttcctccgaatcaaactcaaaccctccccgcagacccttcgaaccaatccccatccaacccgtctcctaccctgtcaaacccaaacccccgccgcccgaacctcaacccgaacttgaaccttcacccgaaccacaatcccaccgccctccgccgccggactcgcaacgcgcgtggacgcgcgaggacatccggtacgtgaaagacgggccgtcgatcgcaccggtgtcgtactcctcgcgcggcgtggcgccgctccccgacgacagggcgcctgtggcggcggaggacgcggtggagagcgagagaaggatgatcgaggcggagaatgaaatgaggatgcgaatggccaaggccgccgaggatgaaagaatgaaggtgcctttcccgctgctgattaagcccaagaaaaacgagaagcctcctccgcttgatttgaacgaagccattcgccaagtcaagttgcggccaatgccaaggcaaagtttgatgaaactgttgaagcacatataagattgggtgttgattcaaagcgaacagaaatggcagttcgtggtactgtgattctgcctcatggtgctccgaaggctgtcagtgtggctgtttttgcagaaggggctgaggcagaggaagcgaaagctgcaggagctgatatagttggtggtaaagagcttattgaggagattgctagcggtaaaaataagctcaaagttgacaaatgcttctcaactcctggaatggcacctaatcttggaaagatagcacaatatcttagaaagcgaagactgatgccagataagaaactaggtactcttactagtgatattgctgggcagttgaaagagctaagacagggccgtgtagagttttggaggaaaatggatattcatggtatcatcaattttgcatgtgtgaggaaacttgggaagccatatatcaagagacatgacaggacattcaaacttacagatccgtcatccgaacactgcccacctggtgagtttgttcgtgaaatccctctttcaactcgaattcctgaagatgccaatatagaagcatactatgatgggccaggatcagtgcttgagatcatggtgccaaaacttcgtgtgggatcagaagagcatgaagttcgtgtttgccttcgccctcatcttggagggaatgatcttatgttgacttgagttttaggctcttattaaaattgttggggttgcaagcatggtccgaaaatcattgttttactaactttgtgcctgtgttatctacaatacaaaagtgcatctcacatttgtctccattttttcttattaattgcgatggtttttttggggtccataaatctattagcgtttgattgtaatcattctttatcttttaacatccatccctaatcatttatatgaaattattaaatctgaccttatgtata

SEQ ID NO: 97239 - DNA, 733 bp, Glycine max
  Clone ID: PAT_MRT3847_58820C.1
tctgcgaaaaacttctaaatattaaccctatagctatttagcgcgcacctcgctaaacctcacccagagtcatcatcgattttgccttcgccgctcgctttgtgtcctcagtccattcatccactcactggtcgtcgtacctgtgtcctgtgtatcgtgccggcattgcgtgtggccatcgtcaaccaggatggatatgaggatatcatcatattagcagacaactttgctgcatttaatcaacgttcactggtgccagtaaaagttgcttccgggtcttggtggaagtatgctaacagagctgtatctaaccagataaagagttgtatcttggaaacatgttaagaagtttgaattgatatctacgtgcctattcgccacaatagagtacccatgcttcatttgtacatatgctttttcatcaagctatttgtatgattatctttttataaattgaaactctcaactagtaagctttatatttaggtgagtgtgctaaaggagttaaacagagtgccttacatgtgaatatgctatgaatgatcatgtatacctaagacggctctcagctggtaattgcatgacacactgcactcccacctgctcttgtcagcagcatgtgcccactagaccagaattcctgcctgacaacccgggattcctttattagatagtgattacacaactgctagatattttcaacagataaggcattatgttaagaggggactgt

SEQ ID NO: 97240 - DNA, 358 bp, Glycine max
  Clone ID: PAT_MRT3847_58821C.1
gggaaacaaaaaaatattaacattaggggtttggaaaacccatttccccaggcagaaaaaatttaaaaaaagtgaaaaaaaaagccgggggggggactcccctgaggacccgaggggaggggatattatttatacacaaccgggggggtacaaaagagaaaaaacctttataacctaaaacaaataaccttttataaaaacagaagggtaaaaatacccgataaaacaggctacataaaaagaaggggggggggaataacaaacattatttttgggagaaaaaacaaataaacttttaattaaaaaataatttttgggaaaattccatttaaatggcaaaaaggttaaagcctttttg

SEQ ID NO: 97241 - DNA, 211 bp, Glycine max
  Clone ID: PAT_MRT3847_58822C.1
atcagccaaggagattgttggtgttaagaagttgattgaaaagaaggctgggcggtatgttcagaatgatctgcgtctcacgactgactatttgcgctttgatcttaacactgacattgctggtaagcctaacgatgagaagaaatcacacaaggaactgactgctaagctctttctacgatatcagcattatggatcatgcaacaaaaat

SEQ ID NO: 97242 - DNA, 420 bp, Glycine max
  unsure (1)..(420): unsure at all n locations
  Clone ID: PAT_MRT3847_58823C.1
caanangnangntnnggacnnncaganacacanancactancngnncgnganangcgnnangcnancnnnacccgtntgcacncangnnngntgcaccgctancgntgtcntgnangcagnnngcngctannnacgagcacangcaccagcnaaganncncatcntcnaagcgncantncngnacnngnatgncacnanaagnggnagagttngncgctcagcantganaancannctggagcgnttnaacacatncancncacgatagcagccgtngnnacncncangnnacgnanctagtnngtngacngnnnnntgagancganggcagaagangntnancacaangagctcngtggnnncaagtccnaganancngngnacagnaggnnantnnnnagccaacncnacnacangaa

SEQ ID NO: 97243 - DNA, 339 bp, Glycine max
  Clone ID: PAT_MRT3847_58824C.1
ggagagaagtaaaactcactatttattacaaactatttgtacaggaaatatttgagtttggttttaaacctataacatagtgcgacgacatattattgatcacaaattctacttgggaaatatctttagggggaagaaagggcgacagaaatgacatgcaggcctccatgttggctatccattcctctcatatgacgagatttattcatgaaatatactattaaggacacatagaatcacactggatctcatttttatgtagggcttattggcagtattagcagcaagctaagcaacctttcgcattcccataacaacagccattaatgcaacggaatt

SEQ ID NO: 97244 - DNA, 275 bp, Glycine max
  Clone ID: PAT_MRT3847_58825C.1
gtttactggcaaactagttgatgctttcttctatggtttgacatccactttgtgtcatcattctgtcttgcgctatctcattatttacaaacctcatccatttcatctgcattggtaggttcactgctttaacgttccaatttctttttcacattaagactatcctagtccttatcttataatttattttctttctaaaatatggtctcaatctacatttttttttattcattatcatcttaatatcattaattgtttcttatttcttttctttt

SEQ ID NO: 97245 - DNA, 116 bp, Glycine max
  unsure (1)..(116): unsure at all n locations
  Clone ID: PAT_MRT3847_58826C.1
agnactagtccttggatcttaccctnttgngtgctcaatatanctcattcttctgtcnctgttcttgctccgtctgaactaanagatgtngntgtcnntcaccangctgactnagc

SEQ ID NO: 97246 - DNA, 446 bp, Glycine max
  Clone ID: PAT_MRT3847_58827C.1
ataacccttggagtcacttggtatcagaaaatatctcttgtttactcctttaattacaaaatgtcactttattcttactttgtttcttgtttttaaaagcttgagtaagtaagaagttgtggaaatggaaaatgaaaccaaaaaacaatagaaagttgctttgttttaaaacaggaaacaaaatgaaaacaacgtgagagttttgtagttaaaagagaaatcagaaaatgaaatttaaatacattttctcaaaccaagctatccaagtgttctatcccactctatttgaattctgtattttttgtctggtatgtatggatataccattggattttgtctttttacttattgtagcaattattttatccatggggatttacctcatgttaatttgtgtgtttgcaatatgcatgcatagatattacttataattctggtggtttttg

SEQ ID NO: 97247 - DNA, 434 bp, Glycine max
  Clone ID: PAT_MRT3847_58828C.1
ggctcgagttctggcctctgtgccttcttcacagttgcctcacgagcttgtttcgttagtttcataagatgccttggggaaaagcaatttcttcatcagctgctaagtcatccaagcctgaggagccagttgaatctgatgagaaggttgattttgaggaggcaaatgatccagaggaagcaatggaagaggaaattgaatatgaagaagtagaagaagaagaggaagtggaagagatagaagaggaagtggaagaggtggaagaagaggaggacggagatgtctgtagaagatgaaggggcagtggcggtggagactcgaagtcctaaccaagcttttggagcctttcttttgatagagtcctttgtcttttttcaattgttaatttcatgaaactatgtagatatgggactgaaatggtatttctgctgggt

SEQ ID NO: 97248 - DNA, 1306 bp, Glycine max
  unsure (1)..(1306): unsure at all n locations
  Clone ID: PAT_MRT3847_58829C.1
tcctctagagcggccgctttttttttttttttttttttttttttttggagggggaggtggaaaaaattgtttattacagtttatttatttttcattctagttaattcagcagcaaaatgacatgggttaaacctaacaggtattgtagaaacaaaatatacctgcttttcatgtctgatgtacattctcttttggaacatttcataacaaaaataattagaactttgggatttcttttttgttgtatttacataaaagaattgatttgcttgataaaattaaattcttaattagttgcacagcattattgttgagtaattaatagtccagtgactggcttagtcgcatatcgattatggacacaatggatttgattattattctttaagtgcaatcttggctgttttagattaatcgcatattggtagcccccaagtttggtgtatagatgggcatgcaaaacatcaagtaattagtgtgtgcccccaagtttcattctaccttctatgtttgcttaacatatagttatgtcttaaaccttactggataagttttaataatatactcagcagagtgcaattctagttacataggtctcagcttctgaggactaacatagtttaaatcctggattgcagactaatctagtgttgagttattttggtggattattagggccatagagacgatgcctattgtcactgaagatatggattctgcattccaaactgcaggagcaaacccgtatccttacaaccattttctttcaaattgctttatagtttgtgttagtttgttgaataggtagtagttattttttagttcagacatttcatgctaaagaaaataaaattcgttttaatttctaatgacaaaggcaccaaaatgaatagctggttaactagcattagcccatgtctcattggttatggagaaaaaaaaagaaagataggatatgatatggaaataggttcttgtattctaataatgatatattttaaaatagttgggaagcacataaaagtcttgacgtggagacttatttcttgagttttatttttaaagatgtctcttagctcttctagatttgtgtttcatctgtaaattttatttttaaatgcatcacatttcttttttcaagtttctgttttgtacttaacttaatgttcttagaggcttagaagtttggtgtattgagaaccagcggctggtttcagtgtcaaattcaagccatggaaaattgtatactggaagtaccctcgtgtctttcgcagncggacgctgggtcgaccgggaatncggaccg

SEQ ID NO: 97249 - DNA, 402 bp, Glycine max
  Clone ID: PAT_MRT3847_5882C.1
ggctcgagagctcagtacaatatttcgatttttggtcgcgtatagacaaatgctccgaacatgatctatttatccaaccttgaagattatggatgaaggatatagacggcttagagtgaggtgcattcaggagtaaaaaattcgctgaaaacgtggtctaagcgtttgaggttgtaataacacatctatatggcctgggtggatgataggggggatactgcgaagttgagggcctatggggcccttaggttatgatttaaacagagctttatgcgcaatttcatcttcagagatttgaaatgactatgtctggatggggaattaggttatcaacacgttagatcagacatggaatttggctggcaaaatatcttgggaaccaattgaaggattatttggggc

SEQ ID NO: 97250 - DNA, 676 bp, Glycine max
  unsure (1)..(676): unsure at all n locations
  Clone ID: PAT_MRT3847_58830C.1
gggtttctaatggaagaaggtttcggttttttcggtttttttttaccttaaaacatattacaggacatggcccaccctggccaagtttatacttttcccttaagaacacttaccaaacaggaaaataacaggcattttattggacccaccaaaaagggaaaaggcattggtacccaataaattttaaacaaaaattcctttggagaacattacaaggtttgccctaagccttccaaattatggccccttggaccaaccccctaaaaggcaaggcaaacatttttggccccaatcatttatttttggcggccaacaagggaactggaacttgaccccctttccctgggagaaaccagaaaaagatagggggaaaggccgggctgagaaaggttggtttgaagagaaccgaaaaggtggctaaaaaagaaacccccggactggcttggggaggttaaaggataccaaaggttataaataccactcaacccgggaccggggcaacacttcattgggaaaaacccattaccnnncattctanntggttcnaaaggngatggaccgaaacaggccaacggttacccaaaactaccaaaggacccacctannttaaaattaaggggnnnnaatccctannnntatgggtaaattcnnnnnnaanacaaaaggtttttggtct

SEQ ID NO: 97251 - DNA, 1144 bp, Glycine max
  unsure (1)..(1144): unsure at all n locations
  Clone ID: PAT_MRT3847_58831C.1
tgaaaatggtgagacaatctcagatgagcgtaaaatcagaataaagcctttgcccaaaaggatagtttcaagaccacctgaatttccagctgatcatcctgttagtgatgtcggcttggttagcaggaattcatcacatttagattcatttctggatcctgccttcatgtctttgattaaagaccctgatgaaagacgtctagagcagtgggagaaaactgttcaagcacaaagaggctggaattttgctaacttgcttggatttggtgacttaggtggacctccattgtctgccgctgaagaatattctgtgcactctagatatctttcaaaagcaaaatccttaaatttgtctgaaattgcagagatgaaagttgtctatcgtggaggggtagacattgagggtcgtcctgtcatggttgttgtgggggctcactttttgcttagatgtcttgatctggagcgatttgtgctttatgtggtgaaggcagccagacctaggttggatgaaaagatttcaacaaatacttggacggaagcaccagcacaacctgcatgcaatatatgtcctccacccaacccttggactaaaattgacaatatttgcacttcagttgcttgtcaacaatgtggtttggaagaaagtggtatatgttgatagactactccagctcttcagatatgtaccccgtgaacaattgaccatcccagattttgtctttcagcatgacttagaagtgaatggaggaaaaggtctcgttgtggatccaagaacaaaatatgtttatcatcgaccataagcatgccatctgcagttctatcatcagttgatacaagagcatcacttactgtagtttcttcattatttgccttgccattattctcactggcaagtggaagagggtctatatatgtgtagggaagaactcatttttttttttactttttgaaaattttaaaatattgataagtttctttgtaagtaaaatagtgttgttatttttttttttgtgacattctgagttgtgaatatggtccaaggtgactttgatctctgttgaagctggcttgtggtgcacaagggtataaaatcaggcttaagattttcatttttccnnnnnnnnnnnnnnnnnnnnnnnnnnnn

SEQ ID NO: 97252 - DNA, 344 bp, Glycine max
  Clone ID: PAT_MRT3847_58832C.1
ttttagatagaattattcttttgatagggaaaaacgattcattatgttaaataaccaacttgtgctcaatatttactaaattgaccagacaagtgatacgaaggtaacatgtacatttgatatactgcattaaaaacaccttaagggcaataaactacaaactaaactctcagatccaccatcatgaaaaggaattaaaaagtttgaacctctctaaatcaaaaggaacaaactgacattgtgctatgagtaggccaactcacaaaaaatttaaacccaagttcttgagtgaatggaaattcataatttgtggagaacaaaattttaaacactcaacagttata

SEQ ID NO: 97253 - DNA, 289 bp, Glycine max
  unsure (1)..(289): unsure at all n locations
  Clone ID: PAT_MRT3847_58833C.1
cnaccatcctagaatggattctgatcntcctcctcntcctcanttctctgttttcttatntaattcattangtttgcngattactttggngtgaanaggccttgcnnntggtgcaccagaatcgatcacatcctagagcctgggaagtacaagagttcttgcagagntcttgtgtntgaagctcatgnctctganatttcccaaacnggggttctgtnctaatcatcncaaanctgggangagtcacaangccatgtgtggagggattgccntccttcgtnccaacnag

SEQ ID NO: 97254 - DNA, 232 bp, Glycine max
  Clone ID: PAT_MRT3847_58834C.1
attggactacactagtacccatacattcagaactaccaaagtcaatggtggcgactttttcccacgaacatgcagcccattgtcatcacagacagcactgaaacacggcagaccgtgggcttatattgagggacagttcagcgaataccaccctcccatcacatctgtcggtggaggaagcccttacgtcaaaaaagacattcagtttgcccagcggtgcgaggttaatcag

SEQ ID NO: 97255 - DNA, 142 bp, Glycine max
  Clone ID: PAT_MRT3847_58835C.1
ctcaatctcagtctcattctctacacacaccttagaagatcaggacagaaccaccgcatatcattgcttttaaaagcggatagagcaatggcgttcttaaataaaattggaaatctgctcaagaattgctgctgtcaagcac

SEQ ID NO: 97256 - DNA, 380 bp, Glycine max
  Clone ID: PAT_MRT3847_58836C.1
tacggctgcgagagacgacagaagggcacttattaacttaattgattgagtaatttatagtctaacctccaaaagaattcttcaacttattgaccgaacaatttataatccacgacgaaactctttaacttattaactgcatcatattccattaataatattttattgattgttttgaacaatttttagtcaatgctttatgcctttatcttcatcattttaaaataaatattgattttgcaataataataaccaagtaaaaacaaatgcaaggatgtaatattataagaagggatttcatggacattattagaacaaaaacaaaaaaagatttcatgaacgattgctttgctaggaaaaggatgttcattcccgcagct

SEQ ID NO: 97257 - DNA, 459 bp, Glycine max
  Clone ID: PAT_MRT3847_58837C.1
ctcgagccgaatcggctcgagacggcgcgagacgacagaagggatgatgatgatcctgaagaaagcagcacagcagggatgatgatggtcgtggagatagaaagcacagaagggaggaggaagagcggggaaacaaaggttatgagagggaaagccgtggagattactccaagagaggcagatactaaggttctcgttcgagtgagaggtgtgaaagtgactcatgaactgtgatccaggcatcttgagaatgtttacttgctgctttaatatttgaattagatgtgtcagttgtcttatacatttgctttttagaggatgtaatttgtgtgtgaactatgtttcatgtgttttcgtttcaaatgccgtattatgtttttcttaccaaaattctgtatcatgttgtgactggtagttttttaaaaaataaaatacaaaatctactgcagatttaagata

SEQ ID NO: 97258 - DNA, 260 bp, Glycine max
  Clone ID: PAT_MRT3847_58838C.1
attgagggaggtgcttatttcttggcaggagctttcttggcagcggctttagcgggagctttcttggcggcggcttccttagctgctggcttctcggtggcgggagctgcgggcttggctggcttctcggcggcgggcttggcgggcttctcagcgacgggcttaacagcggcaggcttggcggacttctcagcggcaggcttggcagcgggcttagcggcaggtttggcagcagtcttcttgtcaccggcgggcttggc

SEQ ID NO: 97259 - DNA, 602 bp, Glycine max
  Clone ID: PAT_MRT3847_58839C.1
tcggaattccgtatacctctagattctcactacgattcgctcttcctaaatcttccactaacactccacatggcgacgtacgaagcatgcataccgaaagtctaccgatcggcaatgctgccccgtagagcatgtggcgcactagagccgcccgcaagtctgctccaggtgaccgacgcagtgaagaagcacacacaggtctcaggccagcaaccgggggcctgacgcagatcagcacgtaccagaacacacggatcttctgatccgatagcttccgattctacggtagcatcgtgatctccctcgtgacttcaaaactaatctgactatccagaccagcgccgatacgacactccatgaagacgctgacgctcacttggatggtctctctgaagacactaagctttgtgctattctcgctacgagggttaccattatgcccaagggtcttcaactccccagaagaatcaggagtaagagggcttacgtaaataattcactttggattgaggttaacgagaccttgtatcaacgccttgtgtgcgaatctagatccgtgcgcaagtgctgattatatttcttgcaatgatggccttatatat

SEQ ID NO: 97260 - DNA, 458 bp, Glycine max
  Clone ID: PAT_MRT3847_5883C.1
tccataacaaccgttatttctagcacgtagaacgaccatgcttatgggtgatcggacaacattcccagattgtaccgatgctctggctcctgtgctatccaggtttcggtgactatgcgatcatacctaggtctacaggcgtcgtactgatcccaatatataagcattagctttacccctaagatgggctatgatatcgaatgggctgtacggtcactgattgagactctgaaacagaaccgtctcttgacataacgaggagatgataacgtattccacaatcatacagacattctgagcggtgttgcaaacctttacaataccgtgtgatatttccatctcgatggacatgacgaatgaactggcctatattttctccatcgtgatcaacgaactcatcatattgcaatgacatttccatatgggacacatgatcatctatgccatgcttatgagag

SEQ ID NO: 97261 - DNA, 163 bp, Glycine max
  Clone ID: PAT_MRT3847_58840C.1
cccgggtgcccccacgagtccgtaaaggcgtcagctgagacaacagggcagaatgggctacagacgttttcctatcaagatcgtggattcaggggtttgtttgttgaactctattctctttgcaggcttgctcttcggtgcattcaccagggtatggtcacat

SEQ ID NO: 97262 - DNA, 1395 bp, Glycine max
  Clone ID: PAT_MRT3847_58841C.1
gcagcgctcatcctctctctctttccttcattggtggctttcaacccaaagctgaaatcatctaaacatggcaaaccaaaccgaaccaaaaaccaacattcctaatatcaacgccttcccccaataaggaaagtaaaaatcaacaagtacatccttactcagctctctctttcaacaacatcccaccacacactaacaccaactccaactccaactccaagtcttcccctaactaacaccactaacaacaatcactaaaaaaagaaagaaaatttaccctgatcgcaggatctccgaacaaagctttgatttcacaaaagctaaatttagataaacacctgcatattaaatttttctgctctatacatgcatcacatgtccctcacactaaacaaaagaaaaacaccaccaccctttgcttttgcttttctataagtagtcaacggctcagccttaatttctttgctttttttaggttaaggtacatggtgagggagaagattcagattaagaagatcgacaacgccacggcgaggcaggtcacgttctccaagcgtcgcagagggctcttcaagaaagctgaggagctttcggttatgtgtgatgctgatgttgccctcataatcttctcttccactgggaagctctttgagtactcaagctcaagcatgaaggaaatacttgaaaggcatcatttgcactcaaagaacctagcaaggatggaacaaccatctctcgagttgcagctagttgaaaacagcaattgctctagattgagcaaggaagtggctgaaaagagccatcaactaaggcagctgagaggagaggatcttcaaggcttaaacatagaagaattgcaacaattggagaggtctcttgaaactggattgggccgtgtaatagaaaagaagggtgagaagattatgagtgagatcactgatctccaaagaaaggggatgctattgatggaagagaacgagcgactcaaacgtcacgtggcgggcataattaatggtcaaaggcatggtggtgccgaatctgagaactttgttatggatgaaggtcagtcttcggagtctgtcacgtacgtttgcaattccactggactcccccaagactatgaaagctcagatacttcgctcaaattggggctaccatactccggctgatgagaaagtgtgtgaggagataaaattaactcaagcaaaagtgcacaagattatggtctaaatttcattaatgattatgtctctagtatgtccccgtggtgtgtataggtagtataaatattagtaaatagtaaggacttatgttatggggtactctaatgtcattcagaattaattgttttttaaaaagaaagcaattcgagttatgtttttaattggaaaaaaa

SEQ ID NO: 97263 - DNA, 1206 bp, Glycine max
  Clone ID: PAT_MRT3847_58842C.1
cccgcctcgacccacgcgtccgactaaactcatatttccaaaacgcagaaccaacaatgtcgttccccttcaaccactctcaccgcagggacgacgacgacgacgacaaacgacccgccgtttaccctcctccgggtaacaccttcaacaaccctccaccacccttctacggcgtccatcagccagaaacccacgtgtcccatgtcttcaacaacagcaactactccgctcccccgcctccaccaccttcccataaccaccaccatgactccttcactcacggaggcggcagcaccgtgcaccacacccctcacaacaacgcgccacccaccacctctgttcatcacttgagccacctggttaacaccggtgttctctcgagcaaacccactgtgagagttttcaccaaagccaatcccaatttctctctcaccattcgtggcggccaagtcattctcgctccctccgatcccaccaatgagtaccagcattggtataaggatgagaagtacagcactagggtgaaggatgaagaggggtgccctgctttctctttgatcaacaaggccactggtgaagccttgaagcactccatcggtgccactcatcctgttcggctgataccttacaagcccgactatcttgatgagtctattctatggactgaaagccgtgacttatgagatggccacagagctataaggatggtcaacaatgttcatcttaatgtggatgcttttcacggtgacaagaattttggaggtgtgcgtgatggcactacaatagtcctctgggactggaacaaaggtgataaccagcggtggaagatcttaccttactgagtaaaattgacgggatttgtgagtggctttgaagatgccttaagttgagaggactattggcccttctatttgagtagtttggtgttgtctagagtatgaatggtgtgtattgcatttactggtaccaagcaatcggcttttttcaatagaataagggggtttatctaatatttattgcatccatgtggccctggttaatgtgctgattcccatatatatattggtatccagttcatgtatcttcttactagtatatcttaatgtgattcagtgtgaccaattactgctgttgttccttgttccatctatccctgatgagtgatgattagttaactaacccggggagagtccaatgtgccttgct

SEQ ID NO: 97264 - DNA, 1403 bp, Glycine max
  Clone ID: PAT_MRT3847_58843C.1
agcaagtcacattgtactctccccgtgttagttaactaatcatcactcatcagtgatagatgtaacaagtaacaacagcagcagtagttgttcacactgaatcacattaagatatactagtaagaagatacatgaactgtataccaatatatatatggcaatcagcacattaaccagtgccacatgtatgcaataaatattagataaacacacttattctattgaaaaaagccgattgcttggtaccagtaaatgcaatacacaccattcatactctagacaacaccaaactactcaaatagaagggccaatagtcctctcaacttaatgcatcttcaaagccactcacaaatcccgtcaattttactcagtaaggtaagatcttccaccgttggttatcacctttgttccagtcccagaggactattgtagtgccatcacgcacacctccagaattcttatcgccatgaaaagcatccacattaagatgaacattgttgaccatccttatagctctgtggccatctcctaagtcacggctttcagtccaaagaatagactcatcaagatagtctggcttgtaaggtatcagccgaactggatgagtagcaccgatggagtgcttcaaggcctcaccagtggccttgttgatcaaagagaaagcagggcacccctcttcatccttcaccctcgtgctgtacttctcatccttataccaatgctggtactcattggtgggatcggagggagcgagaatgacttggccgcgacgaatggtgagagagaaattgggattagctttggtgaaaaccctgacagtgggtttggtcgagagaccaccggtgttaacctggtggctcacgtgatgaacagtggtggggggtgcgttgttgtgggaggagaaagcggaatggggggtgtggtggtgagactcgtgagccacgtggtgcacggtggtactgctgcctccgtgagcggggtaatcagctgcagcgggagcaggtgggtaagcgtgggtgaaggagtcatgatgacgatcatgatgatggtgggaagggggtggaggcgggggagcggagtagttgttgaagtcatgggacacgtgtcctggtgtcacgtgagcggaatggaacacgtgggtctccggctgagggggtggtggttgagggacgccgtagaacggaggtggcgggttgctgaaggagtttcccggcggagggtaaacggtgggtcgttcgtcgtcgtcgtcgtccctgcggtggtgggtgtgggtggcgtgagagtggttgaaggggaacgacatggtttggctctgcgttttggaatatgagtttagttgagggaagagaaatggtgctttgttgttaagctgcttccccttgtgtcatgttctcgtatccgta

SEQ ID NO: 97265 - DNA, 753 bp, Glycine max
  Clone ID: PAT_MRT3847_58844C.1
tacggctgcgagaagacgacagaaggggatacagaaagccatggcttctctggcaagcttagctgttgttcaaccatctactgttaagggccttgctggaactaagctctctttcaagccctctcgccagagtttcagacccaagaatttcagtttaatattaattacaggagtggtgctgtggtagcaaagtatggtgacaagagtgtgtactttgatttggaggatctaggcaacactactggtcagtgggacttgtacggctccgatgcaccttcaccctacaaccctcttcagagcaagttcttcgagacatttgcctctccattcacaaaaaggggattgttactcaagtttttgatcctgggaggtggttccaccctggcatacttcagttccacagcttcaggtgacattctaccaatcaagaagggcccacaacttccaccaaagctaggtccccggggcaagatctaattaagtttcccaattccatctgtttagctccttccccctccccttcttcttttgaattgaacaacgtgtatatctctgcttgcatataacgtgtaagtatgcctaaagcttacttctattaaatgatgttcatttccggtccaattgagtgttcagagtaataattatttacttttatcaacttttctgagttcagaaacagtaagctactagtaagtgatcactcaccactgatgatgacactcatgatcttttaataactgcagttgaccttga

SEQ ID NO: 97266 - DNA, 354 bp, Glycine max
  Clone ID: PAT_MRT3847_58845C.1
gacaccacacacacacactgtctatgaagccgaaaaatcggttctcccatcgatgaatccccgtggataagatcaaacactaaaatttgttcttttttataatattactgccccaaagaagttacctttcaattctttccccttccctatatataatcctttcataaccccttcaaactaccacccctgcagtttttgagttaccttgcatgcctaaagaaaccactcgttctttagagcacttttcattttcctctcttctttaactctcaaaggatatttttctctaatatctaagcttcaagatcatggatgttgcgcatttcattttcgggatatttgggaatgtttctg

SEQ ID NO: 97267 - DNA, 785 bp, Glycine max
  Clone ID: PAT_MRT3847_58846C.1
ccacgcgtccgtaaaaaaacataacagaacacctagagaatgtgcattgaagctggattgaaagaacaaagagaatagatgatagggattaagaaaaaaaccctaagaataatattcaaatacctcaaattgtattaaaactcactgatcctaaccaaacaaccttagaatcagaaaccaatgtgaagtattaacaaataacaaatacagaaacactacaaaataagctgcacttaacaaacaccccaggtctgcagctgtttcaaatgttttacttacttgggctggcaatgttgctgctcaaacagaagaggttatgagcacacttgttcattgattgatgtagatctaatcaaactattctgttccttcccacttcataaatctctcttaaattttatgcatgcatttaagcatatttgtaagtctgtattccaacgatgggatgaaatttaataattttacagttcacctttctttcaagactcaagtaatggtgccttttaaacacggcggttaaatccttatagtgagctgctttttaggatgagccatgaagaactttggcttattattgggcttgcaagtcaacttaatttaatgatatataatgatgcaaatgtttcacggtaaaaatctgtaggtttaattatataattaaagtctttgatttatcaaactaggaaatttcatttggtgatttcaaaaaattgtttgattgattttctgcttcttcttatttgatattagaaaccaagaatcaatgggcacgtgatgaccctgca

SEQ ID NO: 97268 - DNA, 346 bp, Glycine max
  Clone ID: PAT_MRT3847_58847C.1
tatctggcggacctgggaatacctttttttttttttttttttttttttttttttttttaatctccacaaatagaatgttgacttccaataaacccatgccccttccccggaaaaaaaaaaaagaaaaggggggccttaaaaaaaaaagaaaacccttgccgccccctcccctaaaaagggggggcaccaaaaaaaaaaggcagggggggccccgccccccaaaacccgggggcggggaaccctaaacgtgggcggcccccggggttaacaaaacaattttggagaaaaaccagcgggggggcaaactttgggttaaaaacggaatttcgagcccgggccagggggg

SEQ ID NO: 97269 - DNA, 636 bp, Glycine max
  Clone ID: PAT_MRT3847_58848C.1
gctgcgagaagacgacagaaggggacacagaaagagaaagcaatggcttctctggcaagcttagctgttgttcaaccatctactgtcaagggccttgctggaactaagctctctttcaagccctctcgccagagcttcagacccaagaatttcaggagtggtgccgttgtagcaaagtacggtgacaagagtgtgtactttgatttggaggatctaggcaacactactggtcagtgggacttgtacggctccgatgcaccttcaccctacaaccctcttcagagcaagttcttcgagacattcgccgctccattcacaaagaggggattgttactaaagtttttgatcctgggaggtggttccaccctggcatacttgagtgccacagcgtcaggtgacattctaccaatcaagaagggcccacaacttccaccaaagccaggtccccgtggcaagatctaattttgtttcccaattccatctgtttagctccttcccctcccccttcttcttcttctcttgaattgaacatgtatatctctatttgcatacaatgtgtaagtacgcctaaagcctacttctattaaattatgttcatttctggtccaatagagtcatgattatttacttttagcc

SEQ ID NO: 97270 - DNA, 351 bp, Glycine max
  Clone ID: PAT_MRT3847_58849C.1
cgaaagccccgagacctgaattgatgcaaatcatgtcttgatctcagtcgctccatatgacactacatctattttgtctgtcacgaaactgagaaggatagtttctgatcactgaatcctcaacacgctcatccgcgaatgtcatttaaccgatccttatatactccaccttatagggcgcaaggcactaacccaattgttagagacactggacaatgtgatggaactagatttatcattcaccagagtcagtgcattatcctcaccttttggacgtccaagcactcgcaagatgctaagtcttgtgataactaacattgagagcttgccttcgcgtctcaggaatcttac

SEQ ID NO: 97271 - DNA, 327 bp, Glycine max
  Clone ID: PAT_MRT3847_5884C.1
aaaccggagcaataaaagcgtccccttaccaaaaaaaaaaaaatttttaccagggggcaattttttccactgggttttaaaaaacaggttgcaaattcaacatgttttttaactttgaattaaaaaggtggcggggttggatttttattacccccaaacccttagttttatcccctgcccatgaattcacgcctcattttttaggggtagagaacaaaattttcgaccaaaattttagttttactttcggggggtttctttttttccaaattttccccgggggggtttaaaaccgttttttttttttgggggccccccccccccccg

SEQ ID NO: 97272 - DNA, 307 bp, Glycine max
  unsure (1)..(307): unsure at all n locations
  Clone ID: PAT_MRT3847_58850C.1
nagtcgctgcacgcgtacgtaagctcggaattcngctcgagnggctcgagctcagncatgggcctgctannntgtnttangnnnaccnncctgantnaatnttccaaaggtggtnctngcgtgncancactcntntntacgcanaattttcaacgaancttgattttgtctggtggccatgnancgtattnnngggantttaacaggggancntacactncactntatatgggancnngnacnntnggngggnntnccngcgctngantcagggngcctcatgtangnngtctcngacntntagncc

SEQ ID NO: 97273 - DNA, 437 bp, Glycine max
  Clone ID: PAT_MRT3847_58851C.1
atccgtatatttttttatttgaaaaatagactaattgtttttttttgtactattggaggaatgttttatggtgaaaacaaaacaacaaacaccttgtatttttagcggcgaaattgaaaatggggcatgcgcttactactttacagggtgtgcctatgacaaaatattactaccggtaagtaatccgcaagggctcctgttttttttatcctcgcttggaaaaccctgcttttgttatcacacccggtgcctggcacccactttcactatcaatgggggacccgttgagaataagtatctaacctaagtaactcatttgcttttcgaaacgggaagggagacgccttattctgtctaccactcaatgtccgaactcttttgaggagcaccacaaaccttttgttgagcccaaggaataccactgtatttcgtatcat

SEQ ID NO: 97274 - DNA, 453 bp, Glycine max
  Clone ID: PAT_MRT3847_58852C.1
catactgtatgacgtcctccttctttgggggggggggggggggaagggagacaagtctggtggggttgtgtgaggggtggagggggtaattggacaaaggcaggtgcgtgtggaaatatggtggtaaatcctagtcgggcccattataaatgtaggtgttatagtaatattattagtattcgatagggttattcctgaatatgtaagtggagcttctaatggttaagttactcttgcatagttatcgcaatacgaaggtatgggcttctaaattcaatattcctcaaatgtcgcgccttgtcgtgttccgtcattgtatttaagcgcgtatgtaacgttgtaagttggtggtgaagggttttggattgcatgtaaattatgtgtgtacaaattaaggtctctcgcgtatggttcacctcttatgtgcgaattcgaagtatgtactaatcgata

SEQ ID NO: 97275 - DNA, 344 bp, Glycine max
  unsure (1)..(344): unsure at all n locations
  Clone ID: PAT_MRT3847_58853C.1
gcacgaggtggagccgtcgttctcaccgcctgatttttttggggtatttttatttaaaaggattttgagatctgttgttatttttggttttggttcttgttttaatctgtctgaactggattagtttaaatgtttttttttaaaaaaaaaaaaaaaaaaaaaaaaaaaaaaaaaaaaaaaaaaaaaaaaaaaaaaaaaaaaaaaaaaaaaaaaaaaaaaaaaaaaaaaaccttggggggggggcccggcccccaattcccccttttggggggtgttttacccccccctattggcccggtttttaaaacggngggattggaaaaaccctggggttccccaattta

SEQ ID NO: 97276 - DNA, 212 bp, Glycine max
  Clone ID: PAT_MRT3847_58854C.1
gaaacaaagtctcttctacgggcaattccttcggcgttatgatctcaccagtcccgtcaggcgcctgaaccttgtcctccatcgggcatggctgagaacagccacagggagtttttgcaatcgccacccttgtctctgagcacgacgtaggctccgtcgcggaaggcagacagctgaggtgggagatgcatctgtgcatcgaatgctgttcg

SEQ ID NO: 97277 - DNA, 459 bp, Glycine max
  Clone ID: PAT_MRT3847_58855C.1
ctctggtggcccacacgcgctgctgacaatgctattcatatactctgtgacgagaaatactcatcctctggggaccgattgatcaagatctggtatatgcgcaatggtgcttgcaacgaagacgtcagtaggccacgagaagggcatagcgtgtgtccaattcgacaaccagcgtgtcgacagtgggagcaatgataacacaatccggatctttgaccatgcctcacgcgcagaggttgcctgtctacgtggacacgccgacttagtcagaaccgtccaagcaggctttggcgacccgcctggctcagaagaagctctaaagctggaagctctagcagttgaccgagaattctggaatgcccagagatcgggcgaagcaactgatcttgggccccgtgccttaagacgggccggccatattcaagacaacaactggatcccgcaacccgcgagacatta

SEQ ID NO: 97278 - DNA, 711 bp, Glycine max
  unsure (1)..(711): unsure at all n locations
  Clone ID: PAT_MRT3847_58856C.1
gaattcgagctctttacccggggatcctctagagtcgacctgcagctagctctgttgcaacatttatatgattaaattacagcataattgctggttgttgccattgtggatagctccatattgtggccgcaacaggtgttgcggtccacaatttagaaccttagtttttttaataataaattgcaactaacacggatgaacatacataattatgaaattatattggaaaaattaagattacatcggattaataaaatcataaaccacccaaagaaaaaacatgtatcaagtacatgaataacaacaggtggtaaatagcttatatttctaactagggctttgtggttttagtggctgcttgtcgatacctagatgcatatctatgaaacaaggcaagcgcattattagtaacttctgccacattcatggccttaacctaagctgctctcttgttaatccaatgaccaggaaatgagtacacacaactactagcatctgttaatgcagtgctcacccatgtctcatcattgcttatgcgccacaacatgtcatcattgatggtggagccacgttggttcaacctgcgtagttctttgatggcttggctaattaagttactccacactatcaatgantttggttcacacaatcttgcacggctaagtactcccttttattgntcttgacacccttggccttaatttgcttagt

SEQ ID NO: 97279 - DNA, 295 bp, Glycine max
  Clone ID: PAT_MRT3847_58857C.1
aaaccaaaaattggccttccataaaaataaaagaatgggggtgggtgaattctcattggaatcccaagggttaaagggtgaggggggaacaacaaattttgttcacttaaaggtaaaccccaaattatgggagccggtgccacatgggaaagcccaggcaattggtttgacagcttttggaacaaaataccaggctgcaaaaggaaatggaattggcttggcctcgatagggggagagtcattggcaaaccatgttttctgtcttttaaactggcaaggggcaaaacaagaattt

SEQ ID NO: 97280 - DNA, 520 bp, Glycine max
  Clone ID: PAT_MRT3847_58858C.1
tccgctttaagattctaagcttttggctgaaaatcttttggatacaatctgtacggagtgtggtgcttcaagggtttcatcatgtaaggtttatagtgctgttccacctccacagcaggtatacactgctgttccacctccccatcaggtatatagtgctgttccaccaccccagcaggtttatagtggcccttctttgttgaagcagattcctgctgccatttcacccccacaagtttatagtgctgttccacccccacagcagttgttgactggagttcagagttctggaattgacctagaggcaggtgccagcctaatcactagttcaatgtcagcagctggggtcttgacaccggttcctccagcttccttggttggagtgactggtgtcactggtgccctcactttggggactacagcccaatctataagacatttaaactctgggcctcaagcaaacatgactggttatactcctccccctttagtatcaggtggcactagctatattggatat

SEQ ID NO: 97281 - DNA, 474 bp, Glycine max
  Clone ID: PAT_MRT3847_58859C.1
ggctcgagaccctttccttggatacgtgtacataacagggttgtaaacctatctaatgaacgaaaaatatccaataaactttgttctgttattgcgtttgaggaaggattcgcgtgagactatttttttagttgaggatgatagatgaaatgatcttcaaaatagttatttcaagatttaatgatctgctgatgacttcgaagaaaataaagatttaaactgctgttattataaattaaatgactagaattacagtttattcatattatgatcatttaatatttgagtgaatcctcaatgactaaagattgctaaaaaaatatcaataatttttaagcgtcgcatcatgggatggacaagtagttgttattaatttaaattaggaaatacataataaactatattaaatgttgtattgattatgatacttgctgtgttaacaatgttattatttattccacttaagtatattag

SEQ ID NO: 97282 - DNA, 525 bp, Glycine max
  Clone ID: PAT_MRT3847_5885C.1
agtcagatgcgtctgcagagtaggagatctcaatctcgagaagacttgaattcttcattggccgagacacaccatagtgaaggtttagggtgtgatcttctgaaaactttgcatttcagtttttgtcatggagatgcccaagggggctaaagaagagttggcaagatttgtttaattccagactaatttgcttcttctggatctcacttctaaactgatttcctccacaagatgcatagcacaacaaacaagcactcataagccttcagatgattaaagaaatttcaacgtctgccgagcacaagaagcttttcaaactgcgaagatcaaaattcatttgtgactattttcataccaatttttagactaataaacctccattactacagagaatatccccttgtttcataggggacttttgactgggaaaagcacttggaagctgtgtaagttaagccgttaagaaaagttgtaatatagaatattttacatgtcaaataagaattcagttgcaccttgcaagct

SEQ ID NO: 97283 - DNA, 256 bp, Glycine max
  Clone ID: PAT_MRT3847_58860C.1
gcacgagagaagatcatctgacaccaacactacaaatgcaagcaacaacaacacaagttctaggcctgggaaaatggtgtctgttccagccactgtttcatctttggttatggataagagtaacaattgtggtggagaatctggcgccaagaggatcactgttaagaggaatgttggtgatgctggttcaaggggtactgcatcaccacgtgctcaatctcctgctagagttaatgggaatgtgggaagggataaa

SEQ ID NO: 97284 - DNA, 459 bp, Glycine max
  Clone ID: PAT_MRT3847_58861C.1
ggaaatgaaactgataagtcagccattctatatgtcataagaaagccaaattaacatttcataatcaaacaaaaaaagctatattcatatgaatcatcaccaaattgaagaaagacatatctctctagctatatatatgatatgatctaagtaacgtatataaatatctatcctatagaagctgagattcttctaacccttgcatcatgtgattcccatccaaaggaagcaaaggaaacccaccaatctcagaaatgaacccttccaaatcagagaacccacccaagtatcctccagaagaattactttgatcatcactgcaacaaaccccattaacctcttctttgactttgggtcttattggcacatccaatccccaacaatacccaccattgggattattattgggattattattaaatttcactgggggggggggaggagcctctgacatgccac

SEQ ID NO: 97285 - DNA, 434 bp, Glycine max
  Clone ID: PAT_MRT3847_58862C.1
accagcagcttcaagtttttctttagtgaacaaatcccaggactccttctctttctcaaatgaaactacctaaacttccaaataaacagttggggtaggaggaactaccaacccctcctgctgggactttgatgaaccaaaagcatattcaggcgcgatggtcatcagggcaacctcaccctttttcatagggaatacacctctattgagcccatcagcaacttgttcctcacctgggaagaatgcaaaccgtctgctcttctgtatgatggaccttttccaaaaaggcggcaccatcttgtagcttaccaagctcgttgaactttagcaatggccccttcatttggacgctcatatcctgccccttacttcaggatcttccttatgaccttgttgtcatgagttacttcagacacagttttacatgaaactaa

SEQ ID NO: 97286 - DNA, 370 bp, Glycine max
  Clone ID: PAT_MRT3847_58863C.1
ggctcgagggccacagcaacaataacaatggccggctcactacaagctgactctaccttcatgcaaccgagcagggtgggaatggccgctcgcaacctctagtgtgcacagtgcatccgtaaagcatttggctaccggaccctgtgggcgtacctcatttgcttatattaggcccgatctaaaagatggtgctaaaatgtgtgtcgacgccacctgagtggaaggattatcccttgacaactcaacatcatcatagctactggagcgagtgcagagtgtgttctggggaggctaatctttgacctaactcacagtaagagattcttgctagctgacggaactgcaactggtaaacagggcccgcccattg

SEQ ID NO: 97287 - DNA, 283 bp, Glycine max
  Clone ID: PAT_MRT3847_58864C.1
cccacgcgtccggtaaaaaggaaaggttaaggatgcaaggcacggaaggagagtggctgtatgccttatcatcaccagacatttataaaacctctttcccttccctcaaatcgctcatactcttccaatcttttaattttactttttttttacctttctccctccctcaataattccaaacaaaaaacaagaacaacaaagttttcgcgattgcatccaaacggatcttgaaagaactcaaggatcttcagaaggatcctcctacctcttgcatcgcccctcc

SEQ ID NO: 97288 - DNA, 250 bp, Glycine max
  Clone ID: PAT_MRT3847_58865C.1
caattattgattagagaatagtaccaaaactacattaggatatgcatctaagttttgtctacattgaaattggagaaacttgatttttgattccattgcttgttgatgtgcgtgtttggtttctctttgggcaattgattctgagttcgtaattgattttgaatacattttcaaatgtttggtttcacgctggagaagaatttatgattgattctgggttgaagcaactttgagtagtttctgcatggat

SEQ ID NO: 97289 - DNA, 1786 bp, Glycine max
  Clone ID: PAT_MRT3847_58866C.1
aattcggctcgagctagttctagattcgcgagcggccgaattcggtctaggccctattcccttctctttctctgaaccttcttcttctctctttcacattctcataagatataagacccatacacacacacacacacatatctgcttcttgtagaacaagttaagtttgttttgttttgtcgtttgcttaaggattaatcaatcaattatctgatgatggaagagccggttgtggttaacaaaggagattatgatcatgatcatgatcagcctttggatttacctccaggtttcaggttccaccccacagatgaagagatcatcacttgttacctcacagagaaagtcctcaatagagccttcagtgcaactgctattggagaagctgatttcaacaagtgtgagccttgggatttgcccaagaaagcaaagatgggggagaaagattggtacttcttttcaacatgggataggatgatcccaacaggcatgcgaaccaatagagcaacccaatctggctattctcaaacactaagcaccagcctgtggtctgtccctcgcaagaacaaccttgttggcatgaagaagacccttgttttctatagaggaagagctccaaagggtgagaagacaaattgggttatgcatgaattcagattggatggcaaattcgcatgttacaaccttcccaaggctgcaaaggatgaatgggttgtgtgcaaggttttccacaagagcagcactactactacagatgttaacaaaagggtactcccaataattaaccctggccttctgagaatgaactcaagtaatggagaagatctattatttgatttctcttctctcccacctctcgtggatcctctctttgaccaaacctcaaacaagcacattgacaatgatttcaagggtactaataacacaccttcatcttcatcagctaaactaccatcatcaagtggctactatcttcccaacttcaacaacaacaacaacaatcagcaaatgcttatgatgaagccagaagaacacaaaatatatgagattcccatcaacaactatgcctccaccagtcaagtggatttcactacaactaataacccaatgggaattagcacaagcaataataatatccttctttctcagcctcaaattcgaacccaaaattcaacctcagtacccttcaacatgttccaagattgttataatcatacgcaccaaggaaaacagtgcaagatggagcaattctccattgacagtactaagaaacagcccgtggtcagtgcctctcaagacacgtgcctcagcaatgacacttcctcggtggtttcaaagcaagacaataacatgggaaggaacaaggcattgtacgaggataattttgaaggtccttcatcagttgctactaccctctcagatttggaatgcctgtgggatgattactgaagaataactgaaaaacctgatgcatgaagagagagattaaagcaagttaatttgttggtttatggttttttctatagttactacaacataccatatattttctgattttaggcagtcatatatacagatatatgttatatattagacatggaaaaagttctggtgggatacccgtatactgtatagatttatgattgatcgattagattatccagggtcttgttaaagttcggtttatatttcgtagaccaaggagaaggattcgatcatgttcatgtacatctttcttttgttatataattagtgggtttgttttattgatttattatttttttcc

SEQ ID NO: 97290 - DNA, 890 bp, Glycine max
  unsure (1)..(890): unsure at all n locations
  Clone ID: PAT_MRT3847_58867C.1
actcctcctcctcctcctcctaccctttcattttcatttcccacatttctctctctctctctcctatacttcctctttacactccccatctctctcacttttcattttcatctccattttttttctctaaaactccaatttcccattttacccctcactgtccccacgcgtccggccctcgctccgattcctaggaacagggttttcagttttcactgttccattaagtttccgagctcaattcagcttccgattcgccgcgcgcaaaacgacttcgtttttggattttggcgtcgcgtcctattcagaagctatatactataagatgagacgaatgaagaaagatattgaagatgaggtgcttcccaatgatatgagtggggcacagttgaatgatgagagttatgaaggaagtgctggcattgttctgaagaaggggccatggacatcaactgaagatgatattttggtggattatgtcaagaagcatggggaggggaactggaatgctgttcagaagcacaccgggctgtttcgttgcggaaaaagttgtcggctgcggtgggccaatcacctaaggccaaatttaaagaaaaggggcgtttgccgcagaagaggagcggctgattgctgaacttcatgccaaaatgggaaacaaatgggcacgcatggcagctcatttgcctggtcggacagataatgagataaagaactactggaacacccggatcaaaaggcgtcaacgggctgggttgccactttatcctccagaagtgagtttgcatgctttgcaagagagtcagcatagccaaagcactggtggacttaaatggtggcgataaaatgcatnctggattcttgcagaaaaacagttatgagatacatgatgc

SEQ ID NO: 97291 - DNA, 171 bp, Glycine max
  Clone ID: PAT_MRT3847_58868C.1
tcaagaatccgccagttgttcggtatcttgttcttgctcactgtcatgatgtgcattctgtttccaagccttgtgatctatgtcagcagcagggtcaacggtgcctgctgtttcaggctaccgctttggttggtcagcatcctaggagttctgatcactgtcggatgccct

SEQ ID NO: 97292 - DNA, 1128 bp, Glycine max
  Clone ID: PAT_MRT3847_58869C.1
tgcgcgagattagggtcggatcgctcggtctcgctaggtcggagagagagagagagagagagaatgggagtgtttgtttgtgtgtgatgcgagtgagagagaagtgtgaaaaggggcgaggaagcaggaagccgacgtttgaggaaaatatataaagggtatggaatagggttgggagggatcaaaacccacaacacaacacggcactgagttattagtaattgtgttgtgttgtgttgagcagagagaaggagcaagaaaggataagaagaaagagggaatagggttagggttagggttagggttaggttgaggatgccgaagaacaagggaaagggaggtaagaacaggaagaggggaaagaacgaggcggacgacgagaagcgggagctggtgttcaaggaggacgggcaggagtacgcgcaggtgctccggatgctgggtaacgggcggtgcgaggcgatgtgcatcgacgggacgaagaggctctgccacatccgcgggaagatgcacaagaaggtgtggatcgccgccggagacatcatcctggttggactcagggactaccaggacgacaaggctgacgtcatcctcaagtacatgcccgacgaggccaggctcctcaaggcctacggcgagctccccgacaccactcgcctcaacgagggcatcggcgccggcttggacgaggaggacgacgccaccgccaacgactacatcgagttcgaggatgaggatattgataaaatctaatcaccctcgcaatcgcaattatcattcatatctgtctctgtctgtctctagtagtatttcgctctctgcttgtttgcaactccccgtgttggatttcattttataattgtgcactattattcaataactcagatatttccgattctcgtctcatgccatgccattttgtgtccttatgattgtgctactatgcatcctgtttaattagatattagtctattgttagttccaagtataattgggggaaaattgaagggattcgtcttcttttttctttttttgcattgtgagtaatcatggacaaatttggccgcaaaaaaaaaaaaaaaaaaaaaaaaacccaagcgcgccgctctagaggatccaagcttgcgt

SEQ ID NO: 97293 - DNA, 1968 bp, Glycine max
  unsure (1)..(1968): unsure at all n locations
  Clone ID: PAT_MRT3847_5886C.1
aaacggatctcaattgcaaacgcangaaagggccgtttagaaaacagaaaaagaaaaaagaaaaactcaaacggatctcaattgcaaacgtaggaaaggggtttttgtttcgcagtgagctgagcctattatcaacatcaacattcaacacaaacaatttcagtaaatcaagacaatttttttttttttttgtcttcgtgattattattatttggatcatgctcttcgcttcaattttcctttccaaatccccctgaatattatttctttctgaatcacatcagattcaattgaattataccccctcaatgcaatggtggtctgcaaatgtcgcaaggctactaagttatattgcttcgtgcacaaagttcctgtctgtggggaatgtatctgcttcccggagcaccaaatctgcgtggtccggacttattcggaatgggttatagatggggagtatgattggcccccaaaatgctgccaatgccagtctgttttggaagagggggatggatctcaaacaactcgactgggttgcttgcatgttatccacacaaattgcttggtctcgcatatcaagagttttcctccacatactgcccctgcaggatatgcgtgtccttcatgttctactacgatatggcctcctaaaagtgtgaaagattcaggatcacgtcttcattccaagttgaaggaagctatcatgcagtctggtatggagaagaatgtttttggaaatcatcctgtatcagtgacagaatcacgaagtcctccacctgcttttgcttcagacccattgattattagggaaaatcatggaaactcagactcagttgatggatactcacctgcaactgggtcagaactacctaaactttcagtgacagatattgtggagatagatggtgctaatccagcaggagatttcttgaaaaactcaagtcctgttggtcctggtgccaccacaaggaagggcccagtccatgttgaacgacagaattctgaaatttcttactatgctgatgatgaagatgcaaatcgtaaaaagtacacaaaacgaggtccattccaccataagtttcttagagctttgcttcctttctggtctactgctttacctactctaccagtgactgcacctccaaggaaagatgcatcaaatgcagcagccgaaacctcggaaggccgtacacggcatcaaagatcatcaaggatggaccccagaaaaattcttctcctgattgcaattatggcttgcatggcaactatgggtatactgtattacagactagcgcaacggggtccaggggatgagcttcttaatgatgaataaatttgtctgccattgagtgagtgctcttaaagtccggagatgttcagcggctcccattttccatattgctggttactgttgcttcttaaatccgtttgccttctttatttggaccagtcgcagtcttggcaaacatacaagtagtagtttgttgataatttttcatctggaatgcctatgacagtgacatgttacataaaatcctagtcagccatctttgctctttgccctcagttttggtgtccacttggaatgaaattgcatcatattcagattttaatattgttctcttaattggattagttgtctccaccatttcaaaaatcaattaaagacattgttagccggcccgtgtttaaaaaaaaaaaaaaaaaaaaaaaaaaaaaaaaaaaaaaaaaaaaaaaaagggcggccggaaaagagataggggggggggaggggagatataaaaaaaaaaaaaagaaaaaaaatgagggggggggggcagggagaaaatgtggggtaaaggagggaaattagggcgcgggcagaggggggtttaaaaggggggggagggggagagacgggggggcggacggtataagcgggaggggagaagcctgtttggcggtggtggggaaagaagaagggcccggtaa

SEQ ID NO: 97294 - DNA, 3258 bp, Glycine max
  Clone ID: PAT_MRT3847_58870C.1
ggctcgaggaaatcaaagacattgaatctcacaaaaaatgggtccaagctcgaagaaagcttcacctaaatcaggtgtgacaaagcacatgaagggcttcagcctctgcaactcaaccctaaaagtaaatgggcaagtcatcctctcccaagtccccaagaacgtaaccctcaccccatgcacctacgacactcacaccaccggatgcttcctcggtttccacgccacctccccaaaatcccgccacgtggcacccttaggacagcttaaaaacataagcttcacttccatcttccggttcaaggtttggtggaccactctctggaccggctccaacggccgcgacctggaaaccgaaacccaattcctcatgctccaatcccacccttatgttctcttcctacccatcctccaacccccatttcgcgcctcgctgcagcctcactcagacgacaacgttgcggtgtgtgtggagagcggctccagccacgtaacagcctcatcattcgacactgtcgtctacttgcacgcaggggacaaccccttcacgctggtcaaggaagccatgcgcgtcgtccgggcccacttggggagcttcaagcttctggaagagaaaaccgttccgggaatggtggacatgttcggttggtgcacgtgggacgccttttacctgacggtgcaccctgagggcgtcagagagggcgtgaaggcctggttgacggcggttgtcctccgggattcgtcctgatcgacgacggctggcagtgcatcagccacgataccgagagaagccggggaagtttaaattacactgtgccgggcgagcagatgccgaataggttgataaaatttgaagagaatgacaagtttaaggagtataagtgtcgcaggcagggtaataaggggatgggtgcgtttgtgagggagttgaaggaggaatttagtgggttggagtatgtatatgtgtggcatgcgttttgtgggtactggggaggggttaggcctaaggtgccggggatgccggaggccacggtggttccgaccaagttgtctcccggagcggagatgactatgacggaccaggcggtggtgaagatcatggagattggggtggggttggtgccaccgcatcgggcgcatgagttgtacgaggggcttcactctcatctggaatcggtgggaattgatggtgtcaagattgatgtcacgcatattctagagatgctatcggaggaatatggtggtcgtgtcgaactcgctaaagcatattacaaagcactcactgcttccgtgaggaagcatttcaaaggcaatggtgtcatttcaagcatgcagcagtgcaatgatttcatgttccttggtacggaaaccatatcacttggacgagtcggtgatgatttttggtgcacggacccagctggagatccaaacggtacctattggctgcaagggtgtcacatggtgcactgtgcttacaacagcttgtggatgggaaatttcatacacccagattgggacatgttccaatctgatcatgcttgtgccgaattccacgctgcttctagagccatttctggtggaccaatttatgtaagcgactctgttggaaaacacaacttcaagttgcttaagaagcttgttctacctgatggctccattttgcggtgtcaacattatgcacttcccacccgagactgcttatttgtagatcctttacatgatgggaaaacaatgctcaaaatttggaacctcaataaatgttccggggttttgggtctgttcaattgccaaggaggaggttggtgccctgttactaggcgaaacaagagtagctctgactattcacactccgtgacttgctttgcaagtcctcaagacattgaatggggcaaagggaagcacccagtttgcatcaaaggggtggacgtatttgctgtgtacatgtttaaggacgacaagttgaagctgctgaagtacacagagagtgtagaagtttctcttgagccttttagttgtgagcttttgaccgtttctccagtggtgatcttacccagaaaatcaatccaatttgccccaattggattggtaaacatgctcaactctgggggctctattatgtaattggaatttgatcaacaggaaaatttggcgaggattggggtgagaggacatggggaaatgagggtatttgcatccaagggtgtcacatggtgcattgtgcatacaacagcttgtggatgggcaatttcatccacccagattgggacatgttccaatctactcatccttgtgctgccttccatgctgcctcaagagccatatctggtggccccatttacatcagtgacacagttgggaaccacaactttgagctgcttaagaccttggccttgccagatgggtccatcctcagatgtgagcactatgcactcccaaccagggactgtctctttgctgaccctctccatgatggcaaaacaatgctcaagatatggaacctcaacaagtacactggagttcttggggtgtttaactgccagggaggaggttggttccgtgagattaggtccaacaaatgtgctgctgagttttctcatagggtatcaaccaagaccaatatcaaagacattgaatgggatagtggaaagaatccaatttccattgaaggggtgcaacttttcgcttcgtatttcagccaagccaagaaactcatcctctcagcaccatctgatgacagtgaagagatttccttggagccattcaatttcgagcttataacagtttcccctgtgactgtcttgcctggcaagtcagtgaagtttgctcctattggtttggtgaatatgctaaacactggtggagcagtccagtctttagcttttgatgagggtcagaatttggttgaagttggtttaagaggcactggggagatgagagtctatgcctcagagaaaccaagaacttgtagaattgatggcaaagaagttgattttgaatatgaagggtctatggtcaacattcaagtaccatggcctggttcttcaaaattgtccactgttcagtatgtattttaagcctagaagtgatttctttttaacttttgaatggttgtccacagtgaatgatgtgaaagggctttttctcccttactaccgagtgaaataatagagtgatctaataattgtatcaagagctagattcctttttattcaatgaaagccagtttttcttgagtgtaaaaaaaaccttttaagataa

SEQ ID NO: 97295 - DNA, 151 bp, Glycine max
  Clone ID: PAT_MRT3847_58871C.1
ggagaaaataacggatgctagtcaaaactggggatgctgtgagctggtgaatcatgacatacgccatgactcattgaacactgcgaagaggatgaccaaagagcactacaagaaacgcatggaagatacgttcaaggaattcatggcaagc

SEQ ID NO: 97296 - DNA, 1362 bp, Glycine max
  Clone ID: PAT_MRT3847_58872C.1
cccacgcgtccgcccacgcgtccgcccagacatcagcgcacgtgtccgtgcagcctatacttgagtttctatctagccataacttgtagtttacttcaaacttctaagcaacatggtggtcctcactttcacagatgagttcactagcagtgtccagccaagaagattgttcaaggctttgatccttgatgctcctaacctcatccccaagctgatgcctgaggccattaagaatgttcaactggctgaagggaatggaggccctggaagcattcaggagataactattgctgaaggtggtaacatcaaacagttgaagcatagaattgatgcaatagaccttgagaaattgacttacagctacgcagtgattgatggggatgctgcactggaaaaagtggattcaatttcacatgagattaagttcgaggccactgaagagggaggttgcaagaccaagaatgttagcaagtatcatcccaaagaaggagttgatgttaaagaggaggatttcaaggctgcaagagaggaaggtttggctctcctcaaggtagtggatgcctatcttgtggcaaaccctgaggcctatgctgaaggaactataaatagcgatgagtttactagcactgtccagccaggaaggttgttcaaggctttggtccttgatgctccaaacctcattcccaagctgatgcccgaggccattaagaatattcaactggttgaagggaatggaggccctggaagcattcaggagataacaattgttgaaggtgataagatcaaacacttgaagcatagaattgatgtaatagaccaagagaagttgacatacagctatgcagtgatcgagggggatggtgcactggaaaaagtggattcaattgcacatgaggttaagttcgaggccaccgaagagggaggttgcaagatcaagaatgtcagcaagtatcatcccaaagtaggggttgatgtcaaagaggaagatttcaaggctgcaactgaggaaggtttggctctcctcaaggtagtggatgcctatcttgtggcaaaccctgaggcctatgcttgaagcattgaagggatatattatagggcacctatgcattacattatattttgatgttctctaaactcagcctatatagtctactttgaaaccaaatatgatatggcttataataaaatttgagttattttcatgaggctctaaaaaaaaaaaaaaaaaaaaaaaaaaaaaaaaaaaaaaaaaaaaaaaaaaaaaaaaaaaaaaaaaaaaaaaaaaaaaaaaaaaaaaaaaaaaaaaaaaaaaaaaaaaaaaaaaaaaaaataaaaaaaaaaaaaaaaaaaaaaaaggggggg

SEQ ID NO: 97297 - DNA, 457 bp, Glycine max
  Clone ID: PAT_MRT3847_58873C.1
accgcgtgtacaaaagtattcattaataccggtgacaggaaattattacccccgatcacgacaaagatagtctaactctacaccgcatatgttaattccataaaccatgatctgaagactattttacactttgcactccctcctcatgaaacagttgcattacattatgaacctgtactggaggggggggggctaacacgggatgctagattgcaaccagacaccgattatcagatctttaactaaggacgagccacacacggcacaggaattcaggatattcatagggcttgggctttaagtatcattgaagctgagctaggcttcggttagatacaccgccgaataattagacaatccctcgaaggcttaactttccatgcgtgaggcgcatccgagcatgaataacagcatgtacaggattagagggaccaagtccccgttgtgaaacaggctc

SEQ ID NO: 97298 - DNA, 283 bp, Glycine max
  unsure (1)..(283): unsure at all n locations
  Clone ID: PAT_MRT3847_58874C.1
catccctcctcttcananattttctnagcnctctcnannagnaattcngangntgactctttgaagcnggtatcattgganaaactcagttnagtctcagccagntnaananggccattccnnntcactgtatcanggcgaacatccccacgtgtcgcgcgctacataagctaattntcatccgaatagcancatgctnggantatgttgccacccattacttcnacctccnttcccggtcctctctctttcgtggcatgggccaatctattggggctgtcca

SEQ ID NO: 97299 - DNA, 310 bp, Glycine max
  Clone ID: PAT_MRT3847_58875C.1
tgttcttggcggcagcctttgggaccttggctccggtggggtctttcttctcaacactcttgatgactccaacagctacggtctgacgcatgtccctcacagcaaaacgaccaaggggaggatactcagagaaagtgtcaaccaccatgggcgtggatggaaccatgtgagcgagtccagcatcagcattcttcaaaaatttgggctccttgtgaagctccttaccagatcgccggggaagcgtggtcaagattgcgcaaaacttcacaggaatgtgagacgtgtggcgatcgaggactggtgcgtgtcc

SEQ ID NO: 97300 - DNA, 139 bp, Glycine max
  unsure (1)..(139): unsure at all n locations
  Clone ID: PAT_MRT3847_58876C.1
agnaantaacctcnctcaanctcgggatcncagnaacnancaacaggtctggcncngnggttcacgatgttgctggaacttgcacttggtttgtttgtgttagcnttgtttctgcacttgcgtcccacnccaantgcna

SEQ ID NO: 97301 - DNA, 495 bp, Glycine max
  Clone ID: PAT_MRT3847_58877C.1
gatgaattccatgcaaacggcgtcatcccaaggggagccaatgcttctttcattactttaattcctaaagtgtccgaccctcattgcctcaatgatttcagacctatcttgctcataggttgcgtttacaagatagtggctaagttactagccaacagagtgaagagggtaatgccatctattatagacgaatgccaatccgctttcatagctggaagacacctcttgcacagcgtagtcatcaccaatgtagtggaggaagcaaggaggggcaaaaaattatgtatgattttcaaagtggatttggaaagagcttatgacttcgtgtcgtggaatttcctctcctacatgttacgaagactgggtttttgcaataaatggattctctggatagagggctgtctcaaatcagcctcggtgtcggtgttggttaatggtagtcccacagtagaatttgtccctcaaagaggccttagacagggtgaccctctagca

SEQ ID NO: 97302 - DNA, 651 bp, Glycine max
  unsure (1)..(651): unsure at all n locations
  Clone ID: PAT_MRT3847_58878C.1
gttgatcatgactcccaagagcggagagggagaaaggtgcaaaagacaaattttcttcacttgtttaatttgaatggtttataggctaatccaccaatcaaattcaatcatcaatggagttgcgttgcgttgcgtcgagagctataatattctatactggaagcagagcatccgatccgaatattctcctagatatgccttcctctttaaaactggtttcgaatattctaccctttcctgctcattgcatggcatgttcgcatatatcaccaacccaacttgtgcctccccctaacgcaacccatgtcagtttcccaattcaatggccaacacttgcccatcaccgtttttctgtcacaacctaataccccagccagaaccatgcactgcattttctgatttaaataaccagaagaagagtttaaggacatattttgtattattaagttccaatattatattacttttccttactaatctaataattgtttttttcatagtaacattagttttcaacaacttggtattatattatattattcaacaacctaggatccatattcatttgagagatttaaagttcaacangtaggggttagataacaccccacaagtctttttcttattggcatgagcctgtctcttctatcc

SEQ ID NO: 97303 - DNA, 191 bp, Glycine max
  unsure (1)..(191): unsure at all n locations
  Clone ID: PAT_MRT3847_58879C.1
gnttttttttttttttttttttttttttatcaagaaaaaggaagacacatttgccacttgtccatcctttgtaattgatttcatgagagtcaacaactttcgtctcacttacagcaacaattatatttgaccctgactcttacttacatagcagtatgcataacacacagtttggtctagcatttgaattc

SEQ ID NO: 97304 - DNA, 413 bp, Glycine max
  Clone ID: PAT_MRT3847_5887C.1
gttgttaataataacagtctctggttgctcaacatttttccttcgtctctaattacgtctttttggcggttggtatattgtgtggatcttgttacattggtaccgtccttttgaattctgatagttggcatgtttttcggatcttgttacattggtctaactttcatacacgtgaaaaatatgcaagacatttctttttgtggttgaaaagctgtgtggactgtatagtggcatttgtggaggtgaataaaagtaaattcttaaaatttcattttttttaatagtgatttgaaaatggtttttgaagtttttgtaagaaaagaaaatgagagtacgaaattggtttctaatttcttttctaaggatttttttcgaagatccggttgaatcatgtaaaagtttggttacataat

SEQ ID NO: 97305 - DNA, 431 bp, Glycine max
  Clone ID: PAT_MRT3847_58880C.1
tttttatttgctgtaaattttttgattttgtaaaaatccctgtgggatttgttttttattatttaaagtagtgtaatttggctatcaatctgccttgaatcagtttattaattattaatgatgggtgaagccaccaaaatggactttaatttgataacctttttttgcactacaattaaggaacttcaaagaaaatagtagaataatgatggggaaattattaaagtttaaaaaacgagagagaattgtgagtatgtctaaataattatattttttctctctacatgctcattgccatgcacactgctagtgttggaaaatatgatattaatgtcttataataatacatagaagaaatgatgatttgaattggtttcctttctgtccacagcatacttcattgagcccggatgggaaactgggtgtgattg

SEQ ID NO: 97306 - DNA, 370 bp, Glycine max
  Clone ID: PAT_MRT3847_58881C.1
atatttggtggagtgggccactcaggaatgacctttattctcttagggtccgtgggaaccccttgatcactatttacaaaattaaggaaagtaatgcaataaagtatacctttttctatattttaatgttgattactcctaccaaaaagtatgacaaacctaaagtgtcctatatgagcaactaggttagtattaaaacccaaaataagaacaaacctacctaatgagtccctatgtatgtgaatcatgaagatgatggatgcatgggtgattttacaaaagagggttgaacctctcaacacattcatcataccacttatcatagggatttggtgccttacaatacctattttgggcacctataaacaac

SEQ ID NO: 97307 - DNA, 275 bp, Glycine max
  Clone ID: PAT_MRT3847_58882C.1
gacactatgcatagagctgtgactgcacacgcacgcatacctaggacttcggctcgagctactgcaccgcacgtggctccatcatgcgctctgtcttattaccaatctctccgaccctggcctgcacaaaagcgagtgtgggttctcatggcactcgcttgcttaaacgaatgatccaaatggtggcctcccagggacctacagtgtattcttgtttttcttccgccttctctttggatggctatttcaacatgcatgcacatgattttttttac

SEQ ID NO: 97308 - DNA, 719 bp, Glycine max
  Clone ID: PAT_MRT3847_58883C.1
gtcacaaatgtcttaattgtgatgctatgaatcacagtttgaaatgtcaagatacattatgtatctttacaaagaagacacaaactagcacctataaccagtgcattagttctacatggcaacaaattctagaggataaaatcaagtaattatcacagtaaagcattaaaaaaaaaacagaaaaagtgaaaaccccttcattaatccaatgttgtctgcttaagcaacacctccttgattaatttgtccaagttcatgtatgaaccaccaccgggcctggtttcctcttctgccttcttcttcaactccatggtcttttgtcccatcttctttcctttctctcccaccatcaactcattcaccagcttttccaaatcctctctcttggcattggtatcaatttccatcccaatttcccactcattgcaaatatatctacagtttgttggctgatctgcaaagaatggccaacacaacattggcactcctgcacaaatactttcagtagttgagttccatccacaatgagtcaggaatacaccaattgaaggatggttcagcacttgctcctgtggacaccagcttgctattaggcttctgtctctagtttcattgacaaactcagatgacaaaatcacagagccaccaatgacaaggtcaggcctaatgatccacaaaaagggtttcttgctgttggccaaacccccaagcaaactcca

SEQ ID NO: 97309 - DNA, 159 bp, Glycine max
  Clone ID: PAT_MRT3847_58884C.1
ggctcgagctcaaaggctagccaaaacgcacctttcaatacccaacacagaccaccccaaaagacaggacggcgcataatccagaagcaccccccagcagacgcggccacgaccccgccaacacggctcaacaacagctaggaaggcacagaatgcccg

SEQ ID NO: 97310 - DNA, 183 bp, Glycine max
  Clone ID: PAT_MRT3847_58885C.1
gcatgattgatagcgctcctggcatgtaggcgctgcatatgaacgctgcagacgaggctatcgtgaggctcacgacggagatcgtgcccgggatggatgcgacctgcatgaaaggggcagaacttgatggctccccaaggatgggtccgacattcggagctattatgaaatcatggcataaag

SEQ ID NO: 97311 - DNA, 360 bp, Glycine max
  unsure (1)..(360): unsure at all n locations
  Clone ID: PAT_MRT3847_58886C.1
ttatttcattctctctgctctattccctaccttttctttcaatatgcatatcttcatgggggcggtcgcctaaaagaccaccccccttaattcttaaatctctaacaccatctacaatctctaggccaatatccatgacatggaaggaattccccctcatcatcctcgtctcatcttcgccggaaagcatctctaggactgccgttccctttcctactacaacatccataaggagtcaacccttcaccttgtccttcttctccagggtggcatgcanatcttcgtaaagactctcactggcataaccataaccctagaggtcgaaagcatttacaccattgacaacgtcaaggccaatat

SEQ ID NO: 97312 - DNA, 452 bp, Glycine max
  Clone ID: PAT_MRT3847_58887C.1
gacaacatactttaagtccattcattaggagaaccgccaatctggggaggcatgagaaaaacgacactcattttaaataaaaatatagctgactgattcatccttttgacaaaaaacaatgacctgtcaagggaactggtttgaaccccctatttgtccagcaccagcaggggggtcgatggctccccacaggagagaacttgtgattgctatggggcctgaccacactccccctgtggtagggggcctccctttttttgccataatacctttcgtagagggatagagatgcgccaggacccaatggccggagaatgcaccagctagcatacgggtccactgcggtatgacactgtgtatgggtctgatcactccatctgcttttggtatggagttgcccatcataattgtgaatggcggcatcattaagcgatgccattttacagtgggga

SEQ ID NO: 97313 - DNA, 384 bp, Glycine max
  Clone ID: PAT_MRT3847_58888C.1
ggagggccaaaatcaacttttttaaaaaaaaactttattttaggggggaaattttccctacaaaccaattgggagtttgggggggtttaaacatttaacaacgggaaaacttaggaaaattttacgggtttttaatcaaactaaacccccaattttggggcccatcagaaacattccgccccccagttatgggggagttttaaatcccccgaaggggtttgattcccaaatagcccctcaagcaggggagcattttggttccctaccaatggatacagaaaatttttttaggaaactttcgggggtaagttcaacaaaggggccgggatcaggaatggcaaagttgtttaaaaccttgggagaaaaaatgccaaaagggccaat

SEQ ID NO: 97314 - DNA, 400 bp, Glycine max
  Clone ID: PAT_MRT3847_58889C.1
aatgaggtcccgaattgctgcatatataaacacgcacttactattactgcatctgaccaaccctcaacctttagtgcaccgggatcagaaaccattgaacattcccctggaccataatcattacattaatataattcatgatgaattgccaaggatagtttaggctgtagctaaattgtaacacaatgctaccataacatcaccaactgaaacatttaaattttttaatcccaagaattataaaacactaattcttattgagaagtccattgtatattctcttcggatcatatatctacaattattgacaggaaatgctccaattgaataggctaaccatgctgaataatctatagaaaaagatatcttcaaacaaaagccaaacccatctatcattgac

SEQ ID NO: 97315 - DNA, 398 bp, Glycine max
  Clone ID: PAT_MRT3847_5888C.1
caaatgattatgtaaacctttgtatcgcacaaatattttaaaagggggacaggtccctggttcattacctaatggttaccaaagccgaaaagacccacatgtttgagcaccacctcatatttcactatttacaaaattaaccttttaggaagtttgggacttaaaaccttaatgggggggccactcttattttaataggcaccgagacttaagttacagaactttttatttgtttaccaaaggctattccaaaattcctttttttcaccaacatcttgagggcgcttccaccattccacatacattacatgggaatatttgattacagccagacacactgcatatatgctactgtgtggggggctttgctacatatggccacaagattttgtggcaca

SEQ ID NO: 97316 - DNA, 280 bp, Glycine max
  Clone ID: PAT_MRT3847_58890C.1
cccacgcgtccgcgaacgatttgattgtttggaatgcattaacaaagcaacgagtgttcggttcgaaaccagcagagagaaaaaaaaaaaaaaaaaaaaaaaaaaaaaaaaaaaaaaaaaaaaaaaaaaaaaaaaaaaaaaaaaaaaaacaaaaacaaaaaaaaaaaaaaaaaaaaaatataaataaaaaaataaaaaacaaagagaatcaaaaggaatagagtcagattaaatagaaggcttttaacagaaagtgaaggttacgattaagacgagcaga

SEQ ID NO: 97317 - DNA, 181 bp, Glycine max
  Clone ID: PAT_MRT3847_58891C.1
agctccctggtgataattttctgtcttccatatctccccagaagtcgctggacatctcctaaataatcctcagccgttacttctgctagtccgtgccatgcttatactggtgatcaagatgcctatgtctccaccaccgtcgctcatctgcttgcctctatgttgtctggccggatctact

SEQ ID NO: 97318 - DNA, 526 bp, Glycine max
  Clone ID: PAT_MRT3847_58892C.1
aacaaaaaaaaagcaaacctttttttttttttataaaaggggttacaaaggggtttatttgaaatttctcaaaacctaaaaaaaatgggggcccgttttttttttttcaacctaaaaaaaaaccgccacctttggaatccctttcccggggggggggggcccaaaataagttttaccccataaataatccccagtttttttgggacaagaaaaatcccttggaaaataaaggcctcacctaaaactgggttggccccctgggggggggggaccctggcccaaaacacatactgggggggattaaaacaaggtccgggggattttgaattcccccccgggggggggggttttacaggcccggtgccccaggaacctggggtgggctccccaaaacccgattttgggggggatggaacaagggcttaaaggggcttggaaatgtcaaaaattgcaatcttaaaacccggaagttgcttttgaaaacttgctgcaactgagtggagcttttgggacccgggggggcccc

SEQ ID NO: 97319 - DNA, 384 bp, Glycine max
  Clone ID: PAT_MRT3847_58893C.1
gtacttggacaagttataacatatatagcaattaaatgaagtgacattctcaaagtacactctaacgaatcagacccaaaattatttctgaaggaaaccaagagggcaattatgaaactaatttggacaaactttttagaacaaagctgcgattagatgaatatataaaaacactctaacaatttacctgaataatgcgacgaaggggtctttgggggccttcgactgcatgtgtgcctaaccatggtgagtgccgccacacggttttgccatcgctgcctgcaacaaacttgaggacaccaaccaccaactcaagagaccacataccaggaagcaccggacccagcacaaagcaaccattcaagactggtgacttgagcccca

SEQ ID NO: 97320 - DNA, 448 bp, Glycine max
  Clone ID: PAT_MRT3847_58894C.1
ggtttaatgaaattctaacccattcgatttttatttttgatgggagctatcatgaatgacccatgcacctctcacctttttgcaaattcttggcaatagtccaacgtacttaagactgaccgaagagcaaacctacaagcatgagtgttcgtgaggttcattaggccacttatccctggagctcctttagggcatatgctgagttcaggtttgtagcatcacccctttcggggttagagacggcacaccccaagggcgcatacttacccatgctgctcagcaacaaactattggatctctttcctgatacagagcttagcttaagctagctccctggatgggctttttacacggtactgttggtttgcattaaactgaggagtggatttcttgatagacatgttcttgacaggatctatctgatagctatacaatgctgcttgctact

SEQ ID NO: 97321 - DNA, 1897 bp, Glycine max
  Clone ID: PAT_MRT3847_58895C.1
cgagactagaactctcacactcagtctcatgataacagccaggtgaagtaagcgtctcacgtgttaagtgaagagactgtgacgagcacctttacctgttcttcagttagttaagtctgagctttgaaagcctaagcagcaacacgcattatttcggacactcgccctccctttcagcaagatttgacccggaggtcatagcctaccgggtaacatttagtgagccccacgtcctctgtctgctgtcttattgtgctggagcttggccttttgatcatctcggtttccttggggtggcttcttcggcatgtccaactggtttgcctcaccacgctcgacgatggatgtcggtttctacctcaccggcacgaagcttgccggatctcttttcaaactcagaatacacgccaagggcttcttcaactcctgctttgagcaaggagaacctttcgaggttttgatactgccatggatacatcgccagattctctggctctctttaaatacattgaaggggaagcaggcgggcttgattatattggcatgaactcctatggacatgaagaggtttgggttgctgatcttaagatggaggaaaatgaggagtacagtggatctggtcgtgggttattctctggtggattataccgcatgttccttcaataccatcaaagatacaaacagctaaatattcccttcatcattactgaaaatggggtttcagatgagacagatttgattcgccggccatatctcttggagcatttgcttgctatttatgctgccatgatcatgggtgtgcgtgtacttggttacctgttctggactatttctgataactgggagtgggctgatggatatggtcccaagtttggacttgttgcggttgaccgggcaaataatcttgcacggacccctcgcccctcttaccatctattttctaagattgtgaatacaggcaaagttacacatgaagatcgtgaaagagcatgggatgaacttcaaagagttgcaaaagagaagaaaacaagaccattttatcgggctgtggataaacaccgtttaatgtatgcaggtggacttgacaaacctgaacagcgaccttatatagaacgagattggcggtttggtcattatcagatggatggactccaggatcccttgagccgcttctcaagatccatttttcgaccattctccctcttctcccttaaaaggaaaccaaaatctcaaaagaagaatgccaaattgattctccagcctcttgaaacttagcaattgatttgtcttgtcccagattctatatttttgagtgatgagcactttccatttcaatattcaaccccagacacatctgtctaactttcattatatgtgtaatattgtactgggtgtattatggtgcattcttgttgtaaagcttatttgtctcatttttaccaagaagtcaacgtattaatataatcactggacggtaatatgtgatgcctgtccctgttagcggaatgtcatgtattgtataccctggacatacacaaagaatgtaaatcgctgatcaccactttatgtaagcaagagcctcccttttttctttctttttttctccctaaggaaccttgatctcctattttctatggagtgagatattttgcatctaagttttcccaattcatactggtcatggcatatcagtatcagtatattatacaaatctcgtctccttattgaagagaaagatcaagatcagggaatttcccgcttccgggaaatggacgagaattgcattgtctcacagtcggagccgcattagttatcacctttgtataacatgtattccagttttgctgcattattcagataatatataatacataaatatatgaaagattttccaaaa

SEQ ID NO: 97322 - DNA, 500 bp, Glycine max
  Clone ID: PAT_MRT3847_58896C.1
catgcatgtttttattatagaacgcgggggtagaccagagactacaccagcggagcttaaaagatttacatctactatgactacgggattacatgtaaatagaagtgcagagggaccttttttggccaagggaaaaacagatgaccaggggcgccacccctcttggaaggaacacaaagaatacatgataaatcctggggtgacgaggagtcagctataaactgtatttgcactgatcaccactgacagatatccgcctgtaaagaagagcatccatccctattagtattgcataaactccttgaaagaaaaggatgccaaatcacacggcgacccggacatcatatggacaatatagacgggatagctctgataggcctgcgcattctgagctttgaacaggtcaaatagacggtcctctctggcaaacacgagaagactgaaggccatgttgacggcggcatacaaggggacttacatagagatgccttgactgtgaa

SEQ ID NO: 97323 - DNA, 1538 bp, Glycine max
  Clone ID: PAT_MRT3847_58897C.1
gtcatttctagaattctgttgggcctgctttggatgtgagtttgaggaatcgtggaaaagaggaaatgagattgaaaactgcagagcaatctgaaaacactgcaatttatggatatttaatttagtatgctgccaagacctggtgtaattctcatccttacatgcagtcagggtctggagattttcatacttttatatgttctgaggaccctgttgggcctgcggctgatgtgccttttgacactgctgcccgcgaggaacagttaagcagttctgcagattcatctgaacagaaaactcctttaggtaagacccttaagttaatatcaggatcatgctacttgcctcatcccgataaagaagaaactggtggagaagatgctcattttatatgttctgaagaacaagcaataggggtggcagatggtgttggtggctgggcagatcttggtgttaatgctggatattactctcgtgagctcatgtccaaatcagtggaagctattcaggatgagcccaaaggttcaattgatccagctagggtgctggaaaaagcacactcaagtacaaaagctaggggttcctctacagcgtgcatcattgcacttactgatcagggccttaatgctatcaatttgggagacagtgggtttatggtggtccgggatgggtgcaccatattccggtccccagtgcagcaacatgatttcaatttcacttatcagctggaatgtggtagtaatggtgatttacctagttctggtcaggtttttaccattcccgttgcacccggtgatgtcatagttgctggtacagatgggctatttgataacttgtacaataatgagattacagcagtggtggttcatgccatgagaaccggattaagccctcaggtgacagcccagaagatagctgcattggcacgtcaacgggcactggataaagacaggcagactcctttttcaaccgctgctcaagatgctggtttccgttactatggtggcaagcttgatgatacaacagtagtagtttcatatattactggctctggtgatgcataatttcattttgctgtgccctctgtatataatcactttatctcggttgtgacatgttttgatttgaagttaagatttgtaggtcacatgataggtccattgaatttaaaatttccattgtccttgttgtgcttggatggtttgtccaactgagtagttgctacactgagaatagtatttccagttagatttaaagggaaaaaaagatacttgttttgaggttgagcagtgagaaaccgagtctattgacttcggttggaggttaattcctgttgtcaatgttgtgatcataacaaataatattccctatcatgaattagggttgcattttgttgaatttaaaaaaattaaaaaaaaaaaaaaaaaaaaaaaaaaaaaaattgagactagttctctctctcaatacataaaaaaaaggaagaaattgtgaatatttgataaagataaaatggtgggtaaaggctcaaatttgaaaaa

SEQ ID NO: 97324 - DNA, 462 bp, Glycine max
  unsure (1)..(462): unsure at all n locations
  Clone ID: PAT_MRT3847_58898C.1
ggggggggggggagacacggacaagacccacaancaaaacnagaagaaagacacacgcaaagagaaagcnncaagcaaaagagcaaaaagacgacagccaggcaccaccacaaacagggaggcccncnnccaccaccccagcaggcgccgaannaancaaaggggggggggagaancccancnncancngcccccgcagcaanccccagggaggaaacggccggagccgccangagagcagcggagaaaccggcaggnccccagcccgcaccnccagagagggggccaggcaggggcnncccaaaaggcgcagnngagaaggagcangcaccagnnncagcagcaccccgcccgcaaccagaccgggaggcaccagagacccaacccacgcgcgcgaaagaccaaccgccggcccccccgagaggagggaagcaggcaccggccccacgcacgggagagcca

SEQ ID NO: 97325 - DNA, 518 bp, Glycine max
  Clone ID: PAT_MRT3847_58899C.1
cgtactcgtgggtgggtttgtgagcctcacgcatctctacttgtctaattcgtactttgaaggggatatttcttcccaaatctctcacctttccaaattagtcttgcttgatctctctggtaatgattcgttaaggtggaacttggaagagattgctccaaaaaggtgaaaatggttggaggtcaactcaataaaaaggtgaaaaggaagacaaggatgagatctaatgaaaatggtagcagaatgaattagttgatatatggcatgactgcagaatgtcttgttccatacctggcatctttgaaaaaaaacttaagggcaagaactttatcacactgcattgcatgggagatctggttcaaagttttgatgtaatatgaatgtgttatatatacttttgctttttgtgtgttcttttcttgtttatgtgtagaagagtgcgaagtacttcatttgccttgagctttcatcagctaggcatgtgaatgcacggggcttcttttttaattctgattttg

SEQ ID NO: 97326 - DNA, 280 bp, Glycine max
  Clone ID: PAT_MRT3847_5889C.1
gctctaatctgggaggaggagaagaagaagaattaatttcaacatttttgttgcaaccatgaacaacaccaatgaatgttgttgcaacgatgaaaatgggaaaatcgttgttggggtgcccttagttttcaatttcttcgataagaacaccaacaatattgagaagagtctcaagggccaattagaggaggaggacccaatttgaagatcatgattgtgaccaagaggatgatgatgatgatctggaggccacatttttgggagacgcagccccgagtcc

SEQ ID NO: 97327 - DNA, 661 bp, Glycine max
  Clone ID: PAT_MRT3847_588C.1
gttatggaagaaagtgacagtggatgaacacaagagaaagaagaagaagaagaagaagaagaagaaaagggttttgtgtgtgtcgaagtggataattccttccttcaattaatctccgatccgaaaccgtatggggattctatacgcactggtaggtcgcggatcggtggtgctggcggagttcagcggcaccaccaccaacgccagcgcaatcgcgcgtcaaattctcgagaaaacccccggcaacaacgacatgcacgtttcttactctcaggatcgctacatcttccacgtcaaacgcaccgatggactcaccgttctctgcatggccgacgataccgccggcaggagaattccttttgcttttctcgaggacattcatcagaagttcgtgcggacttacggacgcgccgttcactccgctcagccttatggaatgaacgaggagttctctaggattttgagtcagcaaatggagtattactccagtgatcctaacgctgataggatcaatcgtctcaaaggtgaaatgtctcaggtacggaatgtcatgatagaaaacattgacaaagttttagatagaggtgatcggttggaaattgctggtggataaaactgctaatatgcaaagaaacacatttcgcttcaagaaacaagctcg

SEQ ID NO: 97328 - DNA, 384 bp, Glycine max
  Clone ID: PAT_MRT3847_58900C.1
aaaattcaaaaatgatttttgctttaacacccaagttcaagggggcgtttgtacaaaaggggttcatttgtccctcttaaatgaaaaattattttttgggccgggatcattttatttcaaaaaatttttacatgaccccccaatttttgttttcataaattggaaacatgaaattgggtcttttgaagattaacttgggttaccccaaacccttcaatattttttcaaaatgaaatacccagggtaaaaaaaaagtccccttcaagagcattttttaatttacccgggtctagatggaaatatattctcagctttgctctaaggatttctcatgttgcaatttgggcattgccaaatgtttagggagagcttattgtaaggact

SEQ ID NO: 97329 - DNA, 258 bp, Glycine max
  Clone ID: PAT_MRT3847_58901C.1
atttctatttctaactaattattgtgcttattattccggttgagaaagataataatgcgccagttactaatatcctttgagttgaacacaggggccacgattccttctggcgtcctaggcacttggcaagctgagcctggtgttgtaggcaaagctgtcaccacagccattctggttggatacaggcatattgattgtgctcaagcgtataacaatcaagcagagattggttctgctcttaagaagctttttggtgat

SEQ ID NO: 97330 - DNA, 241 bp, Glycine max
  Clone ID: PAT_MRT3847_58902C.1
ggagaactgaagtcatttttagaagcatgtctcctaggcataacaggtactatctatttctatttgccttaaactttgcctttgtcctcttttttcatttaagaaaaagaaaatgtgttgggacccaacccaagcaaggtacgacttttgagtctcatattttaagtattatattctgttatggagtttgtaagacctttccttgatcttgtcaactatagtgagtagctttcatggtgtg

SEQ ID NO: 97331 - DNA, 434 bp, Glycine max
  Clone ID: PAT_MRT3847_58903C.1
tccgtaattccagggtcgaccgcacgcgtccgcccacgcgtccgtttatatctctccctctctgcatctcaccttcctttatcacttacctccatctacgtctttcatattatcaagcatcatcacatcactactcagattctctttcaaccactcgcagctaatatatactctcatcccttttaccattttttcactaaaaatatattatgatactcaacaactactcaatcgcttgaccaatgctataagcacatgcccgtcatcacgcgctcctatctaaccactgctcttgtcaccactatcatattctccctcgatataatctctcacatatcatttatacttgaaccctataaagctcatgaagcactattaaatctatcacctgtttactaatttcttgaactctaataaaatgcacttagatttcc

SEQ ID NO: 97332 - DNA, 439 bp, Glycine max
  Clone ID: PAT_MRT3847_58904C.1
atctactaggaatgcggccgccctactttttttttttttaaaacctagctcaaaaaagagccagcgcacggatgcgctttacttccagaaagcgagataggctccttgaaggctgtagtgacttggctactccgactgaacctggtagcatcccatgaagtctcactgatgatgaaccgataccattatcatgatgtgagagcctgggagtttacgcgaaaaaagcgggcacctaggcgctttttgcttcaaaagggtgttcctactttgacagcaaagccttaccaatgattggtgccactatggatggtctcttggaccgctagacagggttcattttgaggttcactgcttatcccatgagaaatcctctccagtgccctaccgctttggcaagaaacggaggctccctgtgggatttattgactttgcttcaaag

SEQ ID NO: 97333 - DNA, 314 bp, Glycine max
  unsure (1)..(314): unsure at all n locations
  Clone ID: PAT_MRT3847_58905C.1
tngatantgaagntnttntngnnnangtnnnnganntnntnngntnnnttntanntantnnanncngnnnttatnctntgncngtgagncngcncnnccnaaggggtnctnncgctgtcntncgnngtnnctgtnccccncgtgnctnngtcgagcngctccaccnctgnccngnnntccnnctcgtncttgctnncntctncccnttggnntgggnngtgntnngncncgnncgttnggtatgggntgtaggggttntntnntngncgttngtgtttgttgtgtngtggttattgntgttgtggggtgtggtt

SEQ ID NO: 97334 - DNA, 1026 bp, Glycine max
  unsure (1)..(1026): unsure at all n locations
  Clone ID: PAT_MRT3847_58906C.1
cccacgcgtccgtctaaaatgtctcactacgactgaaaccctaaatctgaacaaagaaagctttccgcatctctcgttgcgtttcgtttcgttgaagaccagcggcgtcaccgaccggagcaacctcgcctccctcacagaacttaaaaaacccgactcttcaaatttactctacttcataccgaagctccatagtgaacaggaactcagaaacaaatgccattggatatcttaatcttgtgactgaaaaaatatataatgtctgaagaggctggatctatgttggtagtttatgatgatccctccgaccaacgctcactatctttggatgatgcaagcagcacagaggagtcacctgatgaaaccaggctctccttggaaacaacaaatgatgctattccatatattggtcaaaggtttgccactcatgatgctgcttatgaattctatagtgaatttgctaaaaggagtggcttctcaattagacgtcaccgtacagaaggaaaagatggtgttggaaaaggacttactagacgctactttgtttgtcaccgtgctggcaacactcctgtcaagacatcaactgaaagtaaacctcaaagaaatagaaaatcttctcgctgtgggtgtcaagcttacatgcggattagcaaaacaacagaatttggagctccagaatggcgtgtgactggttttgctaaccatcacaatcatgaacttttagaaccaaaccaagttcggttcctccctgcatacagaactatctcggatgctgacaaaaaccgaatactcatgtttgccaaaacaggaatatctgttcatcaaatgatgaggcttatggagcttgagaagtgtgtggaacctggatatttgccttttactgaaaaagatgtaaggaatttactccagtcatttaggaaattagatccagaagaagaaagcttagatttattaagaatgtgcagaaatattaaggagaaagatcctaattttaaatttgagtacacacttgatgcanacaaccgt

SEQ ID NO: 97335 - DNA, 244 bp, Glycine max
  Clone ID: PAT_MRT3847_58907C.1
gcggccttctttttttttttttgtcaaaggccatttattcgtatcagaccctagttactagagacaatggtgactcccgataatggcaatcccaatatcacagggttaatattggctagcaataacccaatggaccccccccgccatgtggaggggtttgactaattataagacacttgcggctagaaatacatgtacaaaggcgcattagatgcaggctccatgactcagtcacgtgagaaca

SEQ ID NO: 97336 - DNA, 425 bp, Glycine max
  Clone ID: PAT_MRT3847_58908C.1
gcgatcaaaacggacgcgcggacggatttctggttttacccggaaacaccggaccggcaccagcacgcggacgaggggggccaacagcgaagacgaaaaggacccgccccacacacgaaaagggcgggaaactgagcaaaaccgcaaaaccgccacaaaacaacacaagagacgaaccgggaagcacaaagcggaaagaccggggggcccaaagagcgaccccacccacaacaaaaagggccgcgggaacagaccgcccgccacaccgggaaacagcggggccaagcgggaaaaaggaaccggcccgaaaagcggcgaacaagaggcgcgcgcacaggacaccagggaagacccgccgacaacagagagaagggcaacagccaaaagaggcccacccccgacacccgaaaaagacgcaagaaacc

SEQ ID NO: 97337 - DNA, 211 bp, Glycine max
  unsure (1)..(211): unsure at all n locations
  Clone ID: PAT_MRT3847_58909C.1
cccacgcgnccgcccacgcgnccggaccacactcangagancncnaacannanaagcaacgcgggcggcaccacaaacgggcnggcgccccncgngaagaaccnggangcagagcnnggacacgggaagggaaccangacaaccacgcannccaacacnggagaccagaggcncnnggaagcgncacaccgngacccgagaagagccaggg

SEQ ID NO: 97338 - DNA, 473 bp, Glycine max
  Clone ID: PAT_MRT3847_5890C.1
ggcttggaacctttgggctgatttatgtgcttggcgttagacaaacttctttagtgccttctttgtagtacgctcgctagcttcgactgcgccggagcgaggggttggctcttagttcccaacgtttcagtagtcaaccccgagaatttcaacgtcaggaattccctaattttgttcttagcaaccagaaagtcgcacttaaaactcgcgatattagacctcgtaacatcggtgttaaaactcgtagttacagtcgtatccagcctcctccccgaatagttattcctagtatgagaaatcacgacattaaagctaaccaaagcgagcttagcaacgtttaaactaaatttcgagaaaaacgataaggagaacctcgcgagtattagagcggaactctccattacataggaagacgcgaaagaggacgaaaccgaagacgaggaaagctccgcgacctatttacacgaatgttc

SEQ ID NO: 97339 - DNA, 369 bp, Glycine max
  Clone ID: PAT_MRT3847_58910C.1
acggtacaaaagttgaaaaagacgaggttggttcggggtggtgaaaacagagaggaaaaaacagagcccattgagaacacacgtgcttcattcactacttcagtgtcgcttcccatctctatctctttcacaacgttcttcaattcaaaaccacttgtttcttcagttccactctgcttcttcccctttctcttctcatactcacccagctttcctttttattaaaaaataaaaaaaaatgttgaagctttcgtgcaatggcttggaccgggctcactcgctggcccaatgcggctttgcgggccggcccgcctgcgtcgtccctcgccggaggataagcggcgtctccggattctggtcgccgggcgg

SEQ ID NO: 97340 - DNA, 186 bp, Glycine max
  Clone ID: PAT_MRT3847_58911C.1
aatgggaaggctttaaatattgaaaaatctaaaaaaagaaaacaaagttgaagttctactttgaaacgggaacaagccgggacccaaaaacaatcaaaaacccaaaagtttccacagttcttaaatgaacggggaactgctgaagctagcgcccctggacaaccatgcccattataaaaagaaggc

SEQ ID NO: 97341 - DNA, 299 bp, Glycine max
  unsure (1)..(299): unsure at all n locations
  Clone ID: PAT_MRT3847_58912C.1
gntgnangngtangtaagntnggaattaggntngagttagttntagatngngngnggttgntgantagtgagntngtngaattgggaattaattnnggannggtanatntaggtgtannagntttnnatatagtgagtngtattanagnttngtgtaatnatggtnatagatntttnatntgtgaaattgttatntgntnanaatttnananaanataaaagnnnaaaaantttnntnnnnnntnttntannnnnnannnttgnnnnannnnnnnngnnnnnnnnnnnnnnnnnnnnnn

SEQ ID NO: 97342 - DNA, 356 bp, Glycine max
  Clone ID: PAT_MRT3847_58913C.1
cctccttcttttgtttttttttttgttttggtttagaaacaaagacttcggccaaggaggggaaaaaaaaggctttgaacccgccactagtgatcctctttgctaacgtaaacgaaaacgggtctctaccccaaggggccttttagtgtttccaaaaaaatttttgggaaaaactaaaggggcccctcgaggcgggtcaccttttttggaaacaatctcagagttgagcaaaagtggactgttattaacgctttgtttccccgccattggccgaagacccttgggattttgccatccccaaaacttccccagggggggggggggcaaacttgggggggggaccaaattgggggggg

SEQ ID NO: 97343 - DNA, 289 bp, Glycine max
  Clone ID: PAT_MRT3847_58914C.1
cttctttcgaacacctgtgccatgaaagcacttacactttacactgacaagaattttcatgggtggggaacaatgatgctgtattagacaaccaacctaagagaagtgatagaaaagagatgacaaagcggtggcatgatgatgatgatgataaatttgagggaagagaaattaacagttgaagtgaagaaaagagatcaagaaggcatgaagacgatgacttatttgaggggagagaaaataacagtaaaagagaactgaatagttcaagaaggcatgtatttgatga

SEQ ID NO: 97344 - DNA, 580 bp, Glycine max
  Clone ID: PAT_MRT3847_58915C.1
actaataaactacccatatcagtctctctgtccatattttttttatagtcaaacccttcccgaaagtgttattcggcaataaattgtttcatcaaacatgaaaaatataaattcaagttatcagatttacaaaaagggtaacaaattagttctaaagttaaatttgtgaaactattttatcgttaagttataatgttcaaggattaatttgacaataaattatattttttaaagattgagttaacattaagttacaaagtttaggaatcaaattgtcattaaattgtttataaaattaatttgttgtactttttacacattcacgaattaaatttaaatattttaatttgtcgtgcaaaactaattttttagactatcacactttaagaaataaatttgactattttttctttgaaattcaaaacatcaattactgaatttgttgttttaaataaaataaaaatgtgagtctgggatatgttacgcgtggtgttccgcaagtgtaccgagtcgcacaagtagtataaaatgataagaccgagtatcgtatccacaggaactttgactgtactctttgact

SEQ ID NO: 97345 - DNA, 841 bp, Glycine max
  Clone ID: PAT_MRT3847_58916C.1
ttttaccaattaattttactttttttatatcatttaggggataaatacaaattcacaagacttaattaaaaatatcaaataattcaacaacctaccaattaatttaacttttttaatatcatagacaacttttcagttctcttaataatttatttgtagcattgacgttgtaggctaataactcgaattaattatgactcctgtgaagaagaaattcccttccgagagatcaattaacaggaactgacttttcctacaaagttgtagtaagcaataatacaatgttcctaagcccaatggccagacacttggaatatttatagcattttggttatgtatgaagtgtacctgctaacatatatagtagtattaattaactaactaattatggcattcattggtttgatgtagttgatcaagttctaggaagcaagaaaattcatgcagataggcgggttaactttggcaagagcaagaatggaagcgggaagagcccacaggccttctccacaaatgagtccagaggcagttgctggaatcatggcctctgccttcttagtgttaagcttgtgccacacgtaaaccaccaaactcccaaggcacatatcaatggcaaagtaggcaccaaccagaaagggaatcgccatcaccatgggcaacggcatccatttcccaaacacgttgggggagaggtctctcaccatgttcaccaccaccgcgaaagcaaagaacccgtaacagagctgcaagcaatgctggggcagtgcggagaaaccttcgacgcctccaaccgccatgtttctgtaaattagcgcatagggggccttgaattccccatgcg

SEQ ID NO: 97346 - DNA, 246 bp, Glycine max
  Clone ID: PAT_MRT3847_58917C.1
cctcagtctagtgatctttattgtggttgcttctttgaaaactggtgcatctatcccaaacttatcaaatctcactttaattgcaaacctcccaacatctccacctgttctaggagttcaacgaaatttatatatgttgatgaagagcttgattattttgctttttaagtacacatcaccggttccaaaatcaaccatgaatgcttgcaaagaggcttgtataggaaactcctcaacttttccttt

SEQ ID NO: 97347 - DNA, 329 bp, Glycine max
  Clone ID: PAT_MRT3847_58918C.1
ggtcggaacctttggctgatgtagtgcttgcttagtgcttgattatgtgcttgcctggccgtgatgatagaaggggaaaccaagtgcgaggctactaacgtcatggaggacggaggtcgaaaaggtcaaataataaaatatgacactggaaatccagccatagataacccgcgcaatcgctcctctccaaaacaccctcctaaagacgagaccaagacgcttaccaaagtaatcaatcgatacgcggcagtacgccacggtactgccccaaagcccaaaaggtctacgctatacctctcagaacaaataccgtactgacgaacagcccc

SEQ ID NO: 97348 - DNA, 529 bp, Glycine max
  Clone ID: PAT_MRT3847_58919C.1
tttaatttaaacattcacgttaaaaattgattgctgtaggtatggaatttaaatttatttgtccaaaaactccaagttagtaaaaaagaaactagtagttaattacatgtaagcacggggtgagtggtgacgatgaaaagttgcaaattgcaatgatccaacagcgtacgtgggtggtcagtggcagagagtgtgcccacgtggcagatccttaacctcacagagcagaaaaaaggtagacagcttcatgtaactgttataccaggtcgtctggctctgcaacaaacaacttcagtccttctctctctttttgttttgtggatcacaccaaaccaaactggtacgcttctctcctttacttctccattaatttccttaaagcttggaaatctaatctatgagtttggagtgtaggcagcagctacacaacacaacactcgtttcctaattccacgccctaatgtctagtcttgctatagcatgattttgtatgttcttaccaactctagcttatcctatatagtcatat

SEQ ID NO: 97349 - DNA, 180 bp, Glycine max
  Clone ID: PAT_MRT3847_5891C.1
ccaacgtgttgttgtttgaaccaaatggggccgtggggcaatcacaactgccaaaaatgttaacatacaaacggatagatggggcctaaaagctaaagctttagtcgaacgtagcacggcttagacagtgattgttttggaggtgagcacctaacacatacacagattgcactgaaattg

SEQ ID NO: 97350 - DNA, 242 bp, Glycine max
  Clone ID: PAT_MRT3847_58920C.1
agccaaagctttcattgactggagggcaaatcaacccttattaaaaccaaaacctgataccttttttacaatttttaatatcacttcactttaagaatacatttatttttgcttttgcaacaaggtttacttcaaacaattttcaccctttaaatgaaaatttaaaaaaataggaaaacaaaacataacttaacttaaattaatacaaaaccattgattgcacccctaaaaatatttgccac

SEQ ID NO: 97351 - DNA, 644 bp, Glycine max
  unsure (1)..(644): unsure at all n locations
  Clone ID: PAT_MRT3847_58921C.1
ccacgcgtccgctttctctttctccttctcgtctctatggaggagaaacgccgcgacgccgctccctccgccgccgattcgccggcatcggagccagcaacgtctcgccgccgcgccggagccaacaagaggaagtccggcaccctcagcgcctccggttcctcctccgcaccctccaaacgcgccgctcgcgacaaggcttcaccgctcttccctcctgccccccacaatggtcccctcaccagggcccgccaaacccccaacaacctctccgcctcctcttccgccgccgcttccgctcccgccgccgtcaaacgctccgaacgcgcccacccttccgctgctgagtccacggcgctcgctgagcagctcaagaaggagagcgagtgggagactctcgaggccgcgattgaagccgaattcgaagctatcagatctcgcggtgccaatgcgcacgtggttcccacccactgcggttgggtntcatggtcatgtattcatccaattgagaagcaaatgttgccttctttctttagtggcaggactggaaatcggacttctgatgtatactgggagataaggaattggataatgaaagaagtttcattcanatcccaaatgtacaaaattgaattggaagatat

SEQ ID NO: 97352 - DNA, 456 bp, Glycine max
  Clone ID: PAT_MRT3847_58922C.1
cttgggggggggggggggggggggggggggggggggggggggggggggggggggggggggggggggggccaagtatggggagtacctaatgggaatgcaaaagcagacaatagcataaaaatagttatcccataaaaaaaaaaagtttcctagggactggccaaacttagaaaacccggggatgccataggacacattaaaaacagcaaaaataaattaaaaagggttataggggccgccaataagggccaggtgcatagtagggcccccatggtgttaaataaccccgttaataaggttgtaaaccccaatacagtaccccaagcggattgcttgaggagctagaaaactacgggggccataattttaaaactttccaatatcgggagttagcccgggaaagcgggatcccaagtgtcccagcaccagctctgatgattgaaaaggaccctacga

SEQ ID NO: 97353 - DNA, 589 bp, Glycine max
  unsure (1)..(589): unsure at all n locations
  Clone ID: PAT_MRT3847_58923C.1
gtacgcctgcggtaccggtccgnattcccggggcgaccccgcgtccggcaccaccacagtttcactcacccaaaattttttttccctaaccccccttttctccttctcgtctcgatggaggagaaacgccgcgacgccgctccctccgccgccgattcgccggcatcagagcccgcaacctctcgccgccgcgccggagccaacaagaggaagtccggcgccctcagcgcctccggttcctcctccgcgccctccaaacgcgcctctcgcgacaaggcctcaccgctccaccctcctcccctccacaatggccccctcaccagggcccgccaaacccccaacaacctcgcctccgcctcctcttccgccggcgcttccgctcccgccgccgtcaaacgctctgaacgcgcccacccttccgccgccgagtccgccgcgctcgctgagcagctcaagaaggagagcgagtgggagactctcgaggccgcgattgaagccgaattcgaagctatcagatctcggggggccaatgctcacggggttcccactcacagcgggtggggtttcatgggcatggattcatccaatt

SEQ ID NO: 97354 - DNA, 465 bp, Glycine max
  Clone ID: PAT_MRT3847_58924C.1
ctactgcattttgagcagcatcgggagaaaatctctcaaaggaccacgagcctgaaatggataacgattatgaaactatttcattcctgatagaggatagcgaaaacaccactgctaaagaaactaggagtggaaaggacatccaaggtataacatgggaaacagaaacatcgaattatagaagtcgtgagacatttagacaacataggtcaaaaggtctcctgaatggacctgaagaacacttatcaattaaacaggccaagcaggaatgtcaatcaacagtacaaggaggggagttttataattcttatcaatacaataattgtttaatgccaacaatacaagattgggcactcgcggattatgctggtaggctttggtccacgtcaaagcatgatttatatctctctgcaggtacccaaatttgtcactggaatgcattaacatccacgaacactgaaatct

SEQ ID NO: 97355 - DNA, 557 bp, Glycine max
  Clone ID: PAT_MRT3847_58925C.1
catgatatctttcatgagaattgatggggctaatatttagtattttcccaaaaaagatattccatgtcaacaaattaggtagccaaactttgaatgcatagcataaaggttggctagttgcacttagttgcatagtttgagcgggcagtgatttaggtagcagttatgcttcccactgtagctgaaagacagtaggattagaggttataaatttataattgctgtgtattgtgaataatgcaggtaaattcttgctaattgctagattccaaactaaaaattgaaatcaatttggacattatagtcttggccaaacatgggaacaataatgttagtaagtacatacctcgagacataaatagattaacagacaataagtgttttactttttatttttttattttattatttgagaagaagatatgagaatgtttaaattctctagtagctttggatctcttctaggtagcacatactaataatgtaactaatggttatttgtgtggttgggagaaaaaatgggaacttttacattaacagatttcccttgtttctga

SEQ ID NO: 97356 - DNA, 141 bp, Glycine max
  Clone ID: PAT_MRT3847_58926C.1
taccctttcatataccaaaggccgtggtcttataccaggtctgatacatcaatctccaatcctgaaacctaattcaatctactacactaatctccactctcatacacttcaccatcatatctaacataaccatcttatatt

SEQ ID NO: 97357 - DNA, 897 bp, Glycine max
  Clone ID: PAT_MRT3847_58927C.1
gttctttttttcttttctctcagttagaaaaatggaataatttaatttgggccttgaggatccagctttaaattgggctcagatccaacgacaaacaatgtaatagatagtactgtacacgtgtcaaacagaggttggaaccacgtatgttagtttgaaaccacacacagaacagttgaagttccctccaagacttgtggagtcgaaacgtttggtagaacaatggcatccacagcgtcgccgatgacggttcaggcgggtcgggttcggaccctgaaagaaggttctcgcggagaatcgggtttgggtccggtcgtgtactggatgttcagagaccaacgtgtgacagacaattgggctctgatccacgctgttgctgaggccaacaaagccaacgttcccgttgccgttgttttcaatctcttccacacctttcttggcgccaaatcccgtcatttagggttcatgctcaggggcttgcgccaattgtgccaccgtatgcaacactctcttcaaatcccctttttcttgttccagggagaggcagaggagacagtgccaaagtttcttagagaatgtggagcttcacttttggtgacggatttctcacctttgcgggaagtacggaggtgtaaagaagagatatgcaagagggtaagcgattcggttgctgtgcatgaagtggatgctcacaacgttgtgcccctttgggttgcctctgataaattggagtacagtgctaggaccatcagggcgaagataaccaaaaggctttctgactatctcgttgatttccctgacattgaagttgagccaccagctgggaagtgggtggctactgagcaaccattccattgactgggatgatctcatgccggtgtgttaaggagaggagca

SEQ ID NO: 97358 - DNA, 301 bp, Glycine max
  Clone ID: PAT_MRT3847_58928C.1
aaagggaaacccaaataataataaattggagggggggtaaacaaaacaattcaaagaaaccgcaagaattatttgggcaacagggccaaaaacaatcctagtttgggattccccctaccaaaatcacagtaactgatgaaaacagccccctttttgtacaacccgtttatttcctgtctaaataaggcttccgggccaaaaaaaagtacattggggggaaaatttttttttttcctccttaaaataacccctttggagccttttttaagaaattttgaacccttaaactaccctttggggc

SEQ ID NO: 97359 - DNA, 564 bp, Glycine max
  unsure (1)..(564): unsure at all n locations
  Clone ID: PAT_MRT3847_58929C.1
ggagttcccggggggaccacgcggccgctgcgttttttctcaaaaccttctgagggggaagagcggaaaacaaagagagagagagagagaaaatgaggaagccatcgaggcgcanatctctccactccgccggcacccggggggcctctcatctcttccgccggggggacgcctccgagccggggccggagcgcaagggggccggtctcggcggggcgggggggatcggggancctctctcccttctcatgaanctcaatcccctcggttcgaggctctccctttacgatatcggcggaactcccggcgtggccggcgagatcaggcacataaacaccagatctgagggggtggggggccaaggggaggagggggggggaaaancgttngggggggccnatggggggataattgctgggggggggcgcanaaaggctgggatgagctgngaggatcttttgaacatgaatgggggggttggggagacgctgggggccggtaggcggagggttgcgccggtgcggctggggggcatgggtggggggtggcgggaactggacgggg

SEQ ID NO: 97360 - DNA, 808 bp, Glycine max
  unsure (1)..(808): unsure at all n locations
  Clone ID: PAT_MRT3847_5892C.1
ccggaatcccgcgtcgacccacgcgtccgccgctaataaactattaagtagtaactgttactatatgcccacgcgtcctgcgcacctcacctccagaactccggcgacttcaatgagcagcggcgaggaaagagaaactgcggccttccgtgctctcgcggatcgctgccggagcctcgaggagaagcagaccaagctcagggaggagttcgatgagctgttgcagaagaataacctcacagtcagggacgataacgatcacgttagcggtaacggtaacaataacgaggtcattgctgattcaacaaccgacggttttctttccggtttcatcttctccggaaatccctacgcaaccgtgttgaaatgcatgggccacgccgttcacgttcttagagttccctcctccgagatcgtatactggaatcactcagcagaaactctgtatggatggaaggactacgaaatcattggccaaagagtagctaaagtcctaattgctgaagaaaattatgcatctcttcaaaaaattctggaagggttggtcacaggcgtaccatggtctgggcagtttcctttcaagaagaggtctggtgaagtatttatggcaatggtaacaaaaactcctctttatgaggatggtgagcttgttggtgttatagctgtttcaagtgacgcagctatattaaacactacaaattcagaaaatcaaagaacttaccaatctgggtacaatggccaacctggagtacagaggttaaacttaaaaagaatcagtggcctncacgaccaatgattgcatcgatgc

SEQ ID NO: 97361 - DNA, 403 bp, Glycine max
  Clone ID: PAT_MRT3847_58930C.1
catcacagcaattcacattataaatgtttgtattaaatgtcaacatatattatctatatgaaaatttaactctaattagagaatcacacccaaattacattaggaacacatactgagtccacactaacacacatcacaagcacaaagttttgggtcagctagccatggaaagcaacaatgtcagcacccatagaggggttgctcacagttggtgcatcatacttgctgaacaacttgtaggatgaaatgagggaaagcaagacatagaaaacaacaacaacaaatgtgatagttgttgatgcagtaaccttatgacaaaatggaccaaaagacctacaagctgagcttcatgctgttgccatgtttcccttttcggccaggtataacacctctgctgatgcag

SEQ ID NO: 97362 - DNA, 285 bp, Glycine max
  Clone ID: PAT_MRT3847_58931C.1
ctcgagccgaaaattttggaattttaaaacagaattttaaacaactaaaaatctgcaattttaatttccttctgaaagatgagaaattagaattctctactaattatacctagaggaacatgtataactagtacaccaattatatcttttcttttttttttcattcattttttttcaccctcataatttgagctttttttttatccaaacacaaaattttgaaaataaaagaatttcaattgaagtatttgaaattcttttattttcaaaattgtgtgttatttt

SEQ ID NO: 97363 - DNA, 169 bp, Glycine max
  Clone ID: PAT_MRT3847_58932C.1
ccggtcgacccacgcgtccgtccacgcgtccgcagagggtgatgttagcagggcgagttgagttcttcgaacacttaagttggagggactgctgaagactcaacccaaccaaccatggctgtttttgattccaacaagttgatggtctaagttgttaaataaacaagtc

SEQ ID NO: 97364 - DNA, 1578 bp, Glycine max
  unsure (1)..(1578): unsure at all n locations
  Clone ID: PAT_MRT3847_58933C.1
tttgggcagctaataaaatgaaaaacaaaaaaaggcggccgcaaaatttttttttttttttttttttttttttttttttttttttttttttttttttttntaaccgcttgaatagggcaatagaccaaagcttgaataaggcaatatatttgatttatggaagatgtcatgtcctattgatgatataacatttacaacaagcttcctgcaatcaaattgtagacttaaagccgagtaaaaaagaaaacaactattcacttaaaacatccatccacggaataaataagcagtgacaccaaaattatattactcacaagcaagtttagtgccaaagctagttaagcaaatggcaaaagcctggaaagcagataggggctgtctataatccatggtaaaagtatcatcccctactttaccaaactggaggagaactgtttcctcatctcctttccctcctggttggctttggtccactgttgcaaccagctgaaagttcttcaccgaggccaccgtcacacggccgtggaaattcaagcaccaacattgcaaatgctcatgccaccttggagctttattcttcaagattgtgtagccagatgcagcttgttctttatcgtgcatcttatggccattgacaggcgtgctatctgaacttccactcgttggtgagacaggagttacaggacacttcaatgagcaaaccattctccttggccctcttgatttcaaaaggttgaacttgtaggagacctgccccacctcaaaattacctgcaggaacttgcgggcttatctgcttgctggcaaaccgacggctggccctgccacttgatggttttgcaccactatggggtggctggctgtcataaattgtgaagttggtgccaagaaaatccgagcttagctttccaacataagcattgcttccttgggataagtcatcagcatcaagtgaaattatatactcagtatgggtaccacacctatatctcctagctgctagcagaaacttccctttatctgtgaatgtgaaatggtgtaagggcaagatataaataaaacgttgaggtcttctggttccgctttataagacattggtggggaacgtcacgtggtcctggctgtttaaggcacgaagggaaagtgattttcccggtatgcgagggcacacgcacgacctcgcgcgtgatgtcacgccacctcttgcagacgcacgcgcaggcgacgacgttttggcggttcggccactgctcctcggcggcgtccacgcgccgcacgatctcgccgaggatctccggcagcatgctagaccacccattattattcccattcgccgcctcctcgacggtgccggcgaccccgccctcgacggcggcgccctccgccggcagcacctctttgaacgatttggagaacttgcgggagcggaagaccttcctcagcgacatggctagctagcagcgacgactatggggccccgagttagggctcataaagaagaagaagaaagaaaatctagagagagaaagagaaaaaaagacagacgaggcgaggggagagaaagggaattccggaccgg

SEQ ID NO: 97365 - DNA, 947 bp, Glycine max
  Clone ID: PAT_MRT3847_58934C.1
gtaagctcggaattcggctcgaggatgtttttagatctaaagaaatcaaactagcattcctcgtcggagctgggctgcaggctttccagcagttcacaggaataaacacagtgatgtactacagccctaccattgtccaaatggctggtttcaactctaatgagtgggctcttcttctgtctctcatagttgccgccatgaatgctactggaacaattcttggcatttacctaattgaccatgccggccgcagaatgttagcactttgtagcttaggaggagtgtttgcatctttgatcgtcttgtctgtctcatttttaaacgaatcatcatcttcgagtggatggcttgcagtgctgggtttagtcatatacattgcatttttctcgccggggatggggcctgtgccatggacggtgaactcagagatatatccggaggaatatagaggaatttgtgggggcatgtcagctactgtgtgttgggtttcaaatctgatcgtgtctcagagctttctttccattgctgaagctatagggataggttccactttcttgattcttgctgctatttcagtgcttgcctttctatttgtgcttttatatgttccagagaccaaaggattgaccttcgatgaagtagaactcatatggaaggagagagcttggggcaacaacactgactcacgaaaccttcttgcagaaaatcaaccttagcccttagtagtctatttgatccagtaccatgtttcgccatttcttaattaactacagcatatttcattccatgtatacacattaattatcccacgattttattgggaataaggtggatgcctgtatgtgttttctagctctcatatatttggtatgactttttgggcttagtttggcatatcttgtgctgttattaagtgttctaataatatataaattgccttttaaaaa

SEQ ID NO: 97366 - DNA, 662 bp, Glycine max
  Clone ID: PAT_MRT3847_58935C.1
aagaaattccctttccaaggcaaagaaaaaaatcgaattcgtcaatagcccaattcttcaattcttcaatcaatcaattttcatttccaattcttttttattctctctgtacagacatagggaaatatacttttcctctgtttgagttgagttttcccttttcctcaatttgggtgcccccctaaaaaaaattctaattctgtttctcttagatttccaaaagggtattagaaaaaccgtgacttcaccatttattattccgtttcgttcgagtctgggattgaaaaatccgaaaatcgaaaaccctaatttgtgatttcgtgacctctttttctttctcatggcggtttctacgatagccttgtacgcgagtccaccaagcagcgtgtgttccacgccgcaccagatcaacgcccacgctagctacgacttcgaattggggtcgcgatcttcttcgccggcggggtcgactgggccgccgtcgacgtcgcacaacgccggtgatgggtggtctctcatgcctgttctcttcgcctgcgccggcggtgaagcacgcgcctccgctgtcgtcgaacttctccggcgaagaagaagagatgaaggaactgagcagttccttctcgtattctcccgagcaaattccgcaggttcttccgtggaaa

SEQ ID NO: 97367 - DNA, 255 bp, Glycine max
  Clone ID: PAT_MRT3847_58936C.1
ggaactttgggctggttgtagtgcttgtaaatcttcattcccaatcgttatatatctctctctcttatttcttaatcgtaacggtgcctttccttactcttgtgtgcctccccctctctttcgtttaaaattatcatcgttactctctcctctctttatcatttcttcctatctctctactctgttgtttaagatacctcctccttaattctcctatattctcctgtctctttataatttttacccccgtactgg

SEQ ID NO: 97368 - DNA, 151 bp, Glycine max
  Clone ID: PAT_MRT3847_58937C.1
ataggaactttgcattaatatttagtagtcgatggaccatcatatctagtcaaggcacgaaatacgatgccaacattcttcttccagaacaatagacaaactaaatatgatggtccatcgactactaaataggaactttgcattaatatta

SEQ ID NO: 97369 - DNA, 343 bp, Glycine max
  Clone ID: PAT_MRT3847_58938C.1
ggaaccctacaaagggaaggtggacgtttaataaaccaaagcgcccatcggccatgaagcctttaaactcgctgcgctaaatatattttgtaatcgggggttccgacaaccccaacactttaaaccccgattggttaaaggcgtttttgccaccgatgatcaagaacccttttttggaaacaacagtgccgaaatgatgggggatacttcaaattttggccaaaaaacaggtttcttttaaaggaagacccgaggctccaaaaatgatcccacctttttttgtacccaccgtcccttggtgaaccatccggaactatttacttttttttttggacatccttgg

SEQ ID NO: 97370 - DNA, 463 bp, Glycine max
  Clone ID: PAT_MRT3847_58939C.1
caaagagtataacacaagtcccaagacaacacgttcaatttaatccctttactccgaacgagaaaatactaagttattatctaaaacaagtgttgaagccaggagaccatattgacactccgttcgtgttttatatcggagtgtaaacctcctacacaactaaaaaagactttattattcgaacaatggtattacattcgtttgaaacttttcttttgggaaattatacagtttttggccacctggacttttgcttgtccaccttccttgacttggggtgccaaagcggggacagaaatgactgtgccggcgggattagaaccattaacagccctggctgactgatcgtgattattacctcatgttgccgtggctgctggcaaagcataactggccggtgcggggtttgggcccccactgatcacaggggggttggtctgatccgcatttcgagcggctggtg

SEQ ID NO: 97371 - DNA, 497 bp, Glycine max
  Clone ID: PAT_MRT3847_5893C.1
gtacacatgggcagtggtgtgccatacgtggaggtgcagaggcaaggaatgacacgcacattagatatgccgttattacgtgcagcacccaaaggagagaaatttcagctaactcgttcttacagtaatgacatagttactggactaaagcctgaagcgactaagggacacactgagaccaagaagagactcgcacaggtagaggcctcatcgccctaccattattgttcattgagttaattcagcgggactatgattatcggatatatagtgccctgtgactgaaaaattgccctgttgttacttacttataccagatccatccttacctgaacgagttgcagttggaggagatgctgagcttggacgggatgttgactctacattctcttggaagtgcaattgcgttgttggcatggacacccctaccaatacctctggaaaaggttatgaggatgttgcgcgccctccggcgggccactgtggggttggccagg

SEQ ID NO: 97372 - DNA, 225 bp, Glycine max
  unsure (1)..(225): unsure at all n locations
  Clone ID: PAT_MRT3847_58940C.1
tgaggttctatggaatctgccttcctaaatcgaccacattgaagaatctgctgtgtactgacgagggagcagacgcatatagcccctactaaaatgagnagatcaaaccaccggattaaccatatcgnntgggcaaccacatatacactcatagacatagccttagaggctcccatacctaacgaatannnnnncatacaattatgcctcgtacttattctaaat

SEQ ID NO: 97373 - DNA, 303 bp, Glycine max
  Clone ID: PAT_MRT3847_58941C.1
aacaactaaatcatatcccataatgcaaggttggctacattcatggatggaatgaaatcattaaagggaaccgacactaaatgtattactatcttttaatcagataaaaaaagttcacctgtcatgctctttgtcagtttgattaatgctaaaaaaaatcggttaatacctaccatttacattttttatcagaatgctgtatacagttcttaacctcgtaaacttgcaggttattagatggtgcatagcagattttcacctttttgtgcttttcaaaagttaaaccatttttctgggaacaca

SEQ ID NO: 97374 - DNA, 460 bp, Glycine max
  unsure (1)..(460): unsure at all n locations
  Clone ID: PAT_MRT3847_58942C.1
gcgaggggcttcttnggcgttgtaattttaaagctgatatgctttacctaaaagtttcactattnantnttggtgagagggcaccgctgggcgttgggcaggttcattntaaanccatcaactattcttntgttngattaaccaaccaatcacttggatataccttctaaagaaatgctccaggaagcaataaattaataccattgcactattatcacattatctcattaccgatactttataaagcaaatatttaatataattatagaaattaaagattgcaccatacatgattattcatgttattaccattattatttatagaaaaatttttattctatggaaagataactttaactccatgcttatctttataacaaatctcctaaagtgaaaaccaaatctaatatttccaaagcttataaaaatgcacgtaataaacaaaatattcattcctttc

SEQ ID NO: 97375 - DNA, 181 bp, Glycine max
  Clone ID: PAT_MRT3847_58943C.1
cccacgcgtccgctcactcttacggacagcctgaaagcattactcacataaacaacaccgggtatcgggttcatcagatccttagactgcatggatgctgcatttactacattttcctacctagtgcacacggtttgttgtgccaatacacaatgtgaggatacttgactggactagcaga

SEQ ID NO: 97376 - DNA, 431 bp, Glycine max
  Clone ID: PAT_MRT3847_58944C.1
gtttcttattctatacttaaagacacccccaaggcgggcgattgtactttcgaacatgggtaaaaccctaatgccacccctgaaatacttttccctccagtcagatctaattcttataatgactaacaaagagtttaaagagcccgcaggtgcgctcccttccggcggtaacaccggtcttggcgagtccaaacctacagcaggggagcatgcccacgccgtgcgatccaggctaatttcggcggcccgtttatgaccttggacataggctccgccgcggagtccacctactcggtgccgagcgacaccgaacccgtcgtgggcgccgggggttacgccaccttcgattacgaggaaccccttcccgacgagctaggaatccaccccggccaaatatggagcaaaatcagatcggttctgaaccccttcca

SEQ ID NO: 97377 - DNA, 270 bp, Glycine max
  unsure (1)..(270): unsure at all n locations
  Clone ID: PAT_MRT3847_58945C.1
gcaaaagagaaagttaaaccaagcaagaaaaacaaaatttattttaagtaaacttaagaaggacaataaaaaagttgtncttgtgggtcatccaatctatgaaacatcactgtccgaaccaaatagtttgacttagcagcactgcacagctagcagtattagaatttattccattcattgtttgttctaagtaatttgctcccataaatattattgcttactatttgcttttactgtgtctaaaaccaaccacaaagaagaatacggata

SEQ ID NO: 97378 - DNA, 563 bp, Glycine max
  Clone ID: PAT_MRT3847_58946C.1
ttttcaaattgcaaattcccttgatgcatcaatacaaagtgttactacaacacaacatggaagttgcacaagtacaaagaatgaattaaatatcaattggatggggaagacaaaaaaaataacatgaactgagtacaaaaatgagagagggacatggccaaaatttcaacagggtggttgtattgccctgttggctcttgcagtagtgacttgtgaacaaagattagaggaatgttaaaagggaaagaaaggaaaaaggcaaaacgtggtgtatgtacatacccaccagtctacctacgataatcttcgtggatgaaactctcgtatggtgttcctgttagtgccttgcttatatcattccagttttcaacttggctagataaggaccctttatgtatcttcacctgacgactctttaaatccatttgaggaacctttagaaaatcctgaacgtcccttaatttagtgcggtttttgacgatgtcttcatagtacaggataatgtgcctggtgctcttgaaatatttttttcccccaaaaaaaaagccctttttttggggggg

SEQ ID NO: 97379 - DNA, 178 bp, Glycine max
  unsure (1)..(178): unsure at all n locations
  Clone ID: PAT_MRT3847_58947C.1
aacatgctcagtaaaaactaccaaagggccaaaaaatcagcgatgtctagcattaggaccggggaaaaggccgaggacattttagaagtggttggggcaattctaaattaacaaanctcgactgtataacattaggatgaatacataggaaaattctatcaataattattcgctaatt

SEQ ID NO: 97380 - DNA, 539 bp, Glycine max
  Clone ID: PAT_MRT3847_58948C.1
ctacactgatattaaaggagtttccttctctacgagacaaccatgtaattactacatatgcaactaaggctattgctgtcagtatcagctcgcctcctagggaacatcgcatatctgtttcaggatcccgaccaaagcagaagacaagatcaggtgccccacagagatcatcttttacaagcagtctaagtaacttacaaaaagaggctcggagagctttttcatgggctccaaaaaatactgtggacaaaaatgctccaaaagatgtttataggaaaagaaaaagttctggattgtctccctctgatagagttgcttgggaagcaatgactggaatacaagaggaccatatttcatctttctcaacagatgggcaagagcggcttccttccgtttcaattgctgaggaatggatgcttacaggtgacccactaaaagatgaaagcattcgatcatctcacagatatgaaagtgcccctgacattacactgttcaaggcactgcttggtctttgttctgatgaatcagtctctgccaaa

SEQ ID NO: 97381 - DNA, 348 bp, Glycine max
  Clone ID: PAT_MRT3847_58949C.1
aagcaattaaagggggcatgcttttaaactagtacgcagtttggttaacccggcatttaaaaaataaactgctgctgatagctaacacgggaaaaggtttgcccctccaacctacccaggtaaagaaaaccaaggttcctaatcgttctattttactagccttaggttcccctcaatatacttggttcacgggcctcaagccccaacgaaaggtcaaatattggcaggcaaaaaaaaaacaatgctcccaacacgggcaaaacattcatcacaatttaggatcatgccttagcaccattagaggctttttctcccaaagggtcatggattgggccaacatcctggtca

SEQ ID NO: 97382 - DNA, 284 bp, Glycine max
  Clone ID: PAT_MRT3847_5894C.1
gccgtagctgcttctctctcagaaaccctaatggtagagcgcgacgggggcaaacgcagtgttgaccgatgaggcttgggtcgcgaatctggtagccaaggactctggaagcgacaggggccgtgcgacggcgtcaaggctctctcacgcgaggatagaggagaggaagatcatcggtgaccaagcttatgcagcctgtcgtacgaaggaataatacctaagcgctggagcagaggctacctccacttgctggccataaaagcgcagcaggtgctcgacactct

SEQ ID NO: 97383 - DNA, 390 bp, Glycine max
  Clone ID: PAT_MRT3847_58950C.1
agacgacagaaggggactttttctttttgctttactatttatatactcgtgggggagggcttcataacatgtgcatcacaaataaatgattttatatacaaacacatacatacacactcacaaggtaattaattttgaacttatttacttgttgataattatcagtttatcacaagtatactgcatataaagtgattattaccttatgatatgaagacatttcaaacaaaataaaagtcatatacactcatgggacatgcattagggaggaaggaggagctttatcaaaattctttcaattttactaaatgatttgataaatctctctctgcatagagggtctatgtcttttataggaaaaaatgtgcaatatagtaatagaaaagaaaa

SEQ ID NO: 97384 - DNA, 141 bp, Glycine max
  Clone ID: PAT_MRT3847_58951C.1
gtaaaccatcttatttgcatcatttatacttgtaattctcaaatactccttcacattgcacagcgtagagcttccttaaggaaccattccttatatattcatacaaatagggaaggacatctaatcgctcattggctgacc

SEQ ID NO: 97385 - DNA, 217 bp, Glycine max
  Clone ID: PAT_MRT3847_58952C.1
ccttgacaggctcatgctcaatatgtaacacggggcgcttgggggatgtgaatatcaaccccggcattgcctcactatttgattcttgatgcgaagaagaaatggggctaacgcgctaatatcgcactgtgcgtacattacgatagcaaaacagacgctggtgacactctggcatatcacaagacggacgatatgtcttattatcattaacaatatg

SEQ ID NO: 97386 - DNA, 621 bp, Glycine max
  Clone ID: PAT_MRT3847_58953C.1
ctccggatatatcaagacatcaagcagcgtatgtgaatgggcatggctaggtttcttaatcgcattcaagtctttgcggcttttttggccaccattgtccttgtaacctcagcttttgaagggaatgaaccgagaccaagatgttggcgcaacagtaaaacgtggccccatgcaagatgtttccattcttcaatttgcagtcatcattgccagacctcagaaaatgcaatctcagggcaatgtgttttcttcttcaagaaatgcaaatgcaaattctgcgaggaacctctctgaatccatccacatataactgctgattacatcttaataagatcgattctctgctgcacgtgtgtttaggggataggatcaacttctaagtaatgtacctagttccatcatcaataaaattcgaccactaatttcattagaacaaatttacagtcacttctagtctccttaaaagtgttcaactatgattactgtatctgtatccgcaatttattaatttgtatgattaattaatatataaaaaaaaaaaaaaaaaaaaaaaaaaaaaaaactcgagggggggcccggtacccaattcgccctatagtgagtcgtattacgcgcgctcac

SEQ ID NO: 97387 - DNA, 211 bp, Glycine max
  Clone ID: PAT_MRT3847_58954C.1
attcggctcggtgtaagtaggcgcagcgcgaggggcggcctcaggaggagaatgatgtctcacggggagttcgatgacccaaggcacggttcgctgggattgcttcccaggaagcgtgctggtcgtcacaggggaagaagtgaaggcattccccaaggatgacccatccaagggacccaagctcactgcagtctgtggttagagggccggt

SEQ ID NO: 97388 - DNA, 1086 bp, Glycine max
  Clone ID: PAT_MRT3847_58955C.1
cttttcttacagtgctgcaccactgcctcctcaacgtcgccgaccaccgttcagtgggttgagttgggttgctgcaattttggttcactaccaaagtaatccaactcctatcggctgaattttcgaccaccgttcagtgagccaactctctttgatagctctagtgatcagcagcaatggcggggaaagtggcaaaggcagcttatgatgcaaagatgctgaagcttctgaaagagtacagtcaggtgctggtggtttcatcagacaatgtgggttccaaccagcttcagggcatacggaggggacttaatgctgattcggtggtggtgatgggaaagaactccatgatgaaacgctctatcatcttggatgctcagaagactggcaacaaggccttccttaaccttgtcccccttcttgtgggaaatgtggcattaattttcaccaaaggtgacttgagggaagttagcgaacagattgccaagtacaaggttgttcaacctattctcatgtgccccaagtacacgtcatatgacacataccagaattgtacttatatgcaatctggacagatacctttgggcctcacgtgttgtaatcagcaatcttcgcaagcttctgagccttttcttgtatgctcaaaattcttgccacaccaacattgtttcttgatgagatcaagacagttcttgatgacgagtatatggtctcctcttctccttttggctggtaacttgtgacgtggatgaagtatgctgatttggatcacatggtttatattactcttttccttgagcactattggctttcaaaatgtaattgtattcttctgtctcacgggatcatggaaaatgaaaatgatttagatcaaggtttctgatacaaggatctttaatttcccaggaattttatcctctttttgaataaggatatggcagcatatgtgttatctgcttgtttattaatttatctcataattactgttttttgtgaagggggctatcagcagcactactttcacatttttcagaaccttttactttattaggattggctcataaattgatgattttattatgttgattc

SEQ ID NO: 97389 - DNA, 554 bp, Glycine max
  Clone ID: PAT_MRT3847_58956C.1
agttcttgaagacatttatgatgaaaagcaattgcaagacattgttaggctaactaactgctttagttctaacagcaaagtcgtcattacaactaaggacaactctttgctacaccgtcatgagattagattgtacgaggtagagaggttcaaaacaaaagaagcttttcaattgcttagtttgaaagcttttaattctaagaatttgaaatctatgtatttgagcattttagaacgagcagaaacttatgcttcagggaatccattcattctagaagtgatgggttcctacttgcgcggaaaaagcgtagaggaatgtgtatctgcattagatcaatatgaaaaaattccaaataaagagaaacaaaggatagttcaaataagctttgatgctttggagaaatgtcatcagaaaatgttgtcttgcattgccttttacctcaatagacaagatttgcaagtgggtgaagaaaaactttataggcaggtttcgtgtcagtccaaaagatgggattaaaagtgttgcttgataaatctcttataaagttaatgag

SEQ ID NO: 97390 - DNA, 365 bp, Glycine max
  Clone ID: PAT_MRT3847_58957C.1
attttggtctggagcagcttcaaatgctgtggtggttgagccggatgcttttaaggaaaatgacgtcatatatagagcccttagctccagaggtcaccatgatgacatgctccaaactgctgaattggtatgcttctgtgtgaacatgacctccatgttattattatcatttttccactaactctccacactaatgtatgtgcagcatgtgactaatgttataggaatccaaaatatattatcaaaatggatgagatatattagatccttataagctatttttaacaaatgattgctttaattaaatttatcaaaatctgaacaggtgcatcaatcttccactgatgctgcatcatctctgctag

SEQ ID NO: 97391 - DNA, 1173 bp, Glycine max
  Clone ID: PAT_MRT3847_58958C.1
cggacaaaaaaaggaaactaataattcactgagtgtctgtctcacgcagcaacattaccatgggaacgccgtacccaactccgatctcaacctccgaaacccgaatcggctggatcggcatcggcgtaatgggcttcgccatggcctctcgcctcctttctgctggctacaccctctctttctacgcccgcaacccttccaaccctaacgccctctctctccaatcccaaggcgccaccctggcccaatccccggcccaactggcccaactctccgacgtcctcttcaccatggtgggccacccctccgacgttcgctccctcctcctcgactcccccgtcctctcctccctccgccccaactccgtcgtcgtcgacaccaccagctcccaccccgacctcgcccgccagatcttctccgcagcacgctccctcgacgcctggtccgtcgacgcccccgtctccggcggcgacatcggcgcgcgcgacggcaagctcgccatcctagccgccggagaaaaagccgtagtcgaatggctgagccctctgttctcgatcctcgggagagccacttacatgggccccgcggggtgcgggcagagctgcaagatcgcgaaccagatcacgattggcgcgaacttgatcgggctgagcgaggggctggtgttcgccaagcgtgcggggctggacctgagggagttcgtggaagccataaaagacggtgctgcgggttcgaaggcgcttgaattgttcggggagaggatgattgagagggattttcgaccagggggttttgcggagtatcaggttaaggatttggggatgggggttgatgttgtggaaggaggagatgatgctcatcttgttgtcttgccaggggcttccttgtctaaacagttgttttctagcatgctggctaatggtcaggggaagcttggcagccaagggattatctctgttattgagaggatcaatgggatcaatcaataaaattcccacttgtattaaatattttctccttggaataaaattatctcttgtgacaaagtggtgtgtgtatgtgtggttgagtttcatttgatggtgggggactgtatttgtatcagaagcaacatgcattttattgaattagaatagtcgcaattaatgcaagcctctgttttcttcagaaaaa

SEQ ID NO: 97392 - DNA, 112 bp, Glycine max
  Clone ID: PAT_MRT3847_58959C.1
acttcaagctgttaaggataatgcgatcatcattattactgatacaggcattgttatgactaggcaagaactagttgattgtttaggaactatcgctcaaagtgtatctgca

SEQ ID NO: 97393 - DNA, 500 bp, Glycine max
  Clone ID: PAT_MRT3847_5895C.1
atggtgaacttacctattggatgtaaggggagttgcaaagaataggttttatgacagtttaaaccctgtaccaaaagagagctaactgaagactaaaactaaggtaataatatactcctaaccgagtgaagaatgactacttgaaacccgggaactatgagtatcgaacacacaagtgggggcctaatcccttgaaagataaacatggagaaaagcctaagaacctgaaaatgttaatggcacggtagtctactatctgcgttatatgcgtgataccttgtcatacgtgaacgcgcctaatttatcatacatgatacactcctatctgctgggtagtctaaatcgagcccaccaacaagacataggtccgccccccattggataggataatagctggcagggcctttgtagcctaatgattttagcattgatcggaaactcattcgacattagggggggatcggagacaccgcttcaacgtgaaaattgatacctcctcc

SEQ ID NO: 97394 - DNA, 702 bp, Glycine max
  Clone ID: PAT_MRT3847_58960C.1
gtgcggcgctcgaggcggccgtctccagatttgtcctagacccaatagcacaacaacctttcaatttggtaagcaaggtgatccatacaagcaccatatatatatatatatacccctcattccactatcaactatgccatagagctagcatcaaacacttgtttgtcatacaagttcttcaagatcattctatagttgtgttgtgtgtgtgaagtaacaaacaaaaaacaaaaaccatgggttttcgtttgcttggtgttagaagagctagacaagcattgtcaattaagggtgcagaggtcccaaaaggatatctagccgtgtatgttggagaagaaaagaagcggttcgtaattcagatagaatgcttgaaccaaccctcatttcaggacttgctaagcaaagcagaagaagaatatgggtaccatcatccaatgggtggccttaccattccttgcagagaagatgtcttcttacatatcatgtcgcttctggcttgaatacttctcaacaaagataccaacatacattagtagtagtatgatatatagtatctagttcaaacaaacaattttgtagagattctttttttttccctttgcattcatgcaaaagtggaagatgtgtaaaggagcaaaagttattggttccattgattgtgttgaggaatttaaatatatgcacacttactgcgtttgagat

SEQ ID NO: 97395 - DNA, 261 bp, Glycine max
  Clone ID: PAT_MRT3847_58961C.1
agccctttggactttggttgttgcaattgtatatcgatcggttgattcatgctaacccatttcgtaagggcacttaaagcattctaagttctctagctagctggccctttggactcttctgctaaaatgatgacctcaagctcttttatctatagctttgagatcaataaaaaaaaattctgacttgctccccccaagctataaattatttggagcttgctattgtttttcagatggtatatatgtaataaattatttgac

SEQ ID NO: 97396 - DNA, 135 bp, Glycine max
  Clone ID: PAT_MRT3847_58962C.1
cgtccaaacggcagtgagtagaggagagaatggggggtccatcgggcatcgtcccgcttgctcgatgacgttatgacggtttgcgtcaagctgcactgtgtcgtcgcctggcactcttgtcatgggcatgactgg

SEQ ID NO: 97397 - DNA, 185 bp, Glycine max
  unsure (1)..(185): unsure at all n locations
  Clone ID: PAT_MRT3847_58963C.1
ccaagactctgaagctcggtattaaacttgagtagtaactcccaggcagagccatatgctgtctcatctagcacaatggctcntggtgttaaaaatgaaaaanatggtttatgatgggttttaacttggatttnagcaattgtgtacaaggtantgtgatttnccaagtataggtgtnattgacg

SEQ ID NO: 97398 - DNA, 522 bp, Glycine max
  Clone ID: PAT_MRT3847_58964C.1
gcccatgttcccacctgcaagctttggaggtattaattatggcccaaggcccagaattgatggctatggatatggctttcaaagtcctcctcctccatgggctgaaggattagtagctgataattttgcatctcgaaaacggagaggagggcctgatggtttgtctgaaggggactggatttgtccaaggtgtgacaatgttaattttgcctttagaaccacttgcaacatcaaacattgtggagccgtcaaacctagctcaaacaaaccaaatacagcagttatccctgaaggtagttggacttgtgaaaaatgcggtaacctcaactatccctttcgaaatgtatgcaaccgcaaagactgtagaaatgagaaaacagtttctgcctagtgacatctctatattgtaaatagaggcttcattgcatttgtctccttttgtaaaggaaagttactcttaaatgataatttttctataatgatagccgggacttttaagggaaaggttttcctacaaaaaaa

SEQ ID NO: 97399 - DNA, 297 bp, Glycine max
  Clone ID: PAT_MRT3847_58965C.1
ggctcgaggactttcgattcattttctattcaagctattggatatgactctgactgtgaggaatctcataccttatgtgcatgggacattaccgtatgagaacctaaaaccgaacccgggtctgaggaacctgttgctgatcgctacctataggagactcatcttgacgaacacagacaaagtccacgcggataacgcgctgagcacgcttggattagaagactgctggggaggactcatatgcttagagaccctggatcctatacacaagagcactgattatgacgatgaagatga

SEQ ID NO: 97400 - DNA, 376 bp, Glycine max
  Clone ID: PAT_MRT3847_58966C.1
ccgttaccaccgtttgccgcgcctaaccaccggcaccagaagccatcccttctagcctgcaacaaactcccaatttcctcgtacttatgggtgtaccaattcttaagggcaagaagatgaccctctgcgctgggcacagactacgagaatcagtgcttttcacactcttagtgtatcagctgaacactcacctataggatataggactgacagtcagatataagctataggagttcctgtctcagttcaacgcttaatgtcaagttcaagctggtgagatcaaggattagtgctcccactctcctatctggaataggactcccagggtcgactctggtatatgagtccttgggttgactctcttattctcactgat

SEQ ID NO: 97401 - DNA, 479 bp, Glycine max
  Clone ID: PAT_MRT3847_58967C.1
caaaacaaacaaacattatcactgggcacgtacaaccccaacaaccaacaaaaaatattccctccttttccaagggcctggaaaaaaaatcaacatttggaaagcccctttttccttcacaaaatggaaagcaaaaaacctttttttttccaacccatcattaaaccaatgttgcatgttaacagcaacggttgaaatcttttcaaaaatcaccccccaagcatttaggaggaacaaatgggcaaaaaaagcatgtttttaatccaaaggctggaaccaaagctaacgaaaaactagggtttttcatcaaccaaggatcaaaatcctcctagaggggactcaggggcttgatcttcccccacccagaaaccatagtcccggaaccgttttatttttttctcaaagccaccgatttagtttttatgaaggaaaccaggcattccttaagttcccttaacccaggcctggtttttgaaaaa

SEQ ID NO: 97402 - DNA, 129 bp, Glycine max
  Clone ID: PAT_MRT3847_58968C.1
ttctttcaattcaattgggtatatgagtttcaggttgggttaagcatttttaacaatggtctttatggattccgccccgcctcctggtttaaaatgggtaggacctttaagggaaggatggtttccccc

SEQ ID NO: 97403 - DNA, 353 bp, Glycine max
  unsure (1)..(353): unsure at all n locations
  Clone ID: PAT_MRT3847_58969C.1
acgaagcncgcaacgcggctcgagaacaattactaatatgaaaatcctacatcacatcaaatttatagttccaaactcgctgctaataaatacggaacgggtcttaattacaaaggccggaggtacactaaaacttggatagaccacaaatacactcgactctgatactcaagacactattcaacacctatcggggattcgaccataccaactataacatgccaccaccccgtcacacagaaattatcattgataacaggcacatcactataccatcacaactgaatggggtcaagcacaaaccattcttctaatgagctgacaaaaaatcttggacacagcaatcacagccc

SEQ ID NO: 97404 - DNA, 252 bp, Glycine max
  Clone ID: PAT_MRT3847_5896C.1
ctttaattggttaatttcaaaccttgtggagtttgattctgtctccgctccatcatcttcgtttctccacattcaaattcagttccccacacactccaattccaaggaaacaaacaaaacaaccccttttccccaaaagaccgtaaaacctatcaaaagtacaaatttgccactgtaccgacccgaaatcaattcgggttcgggttggaccaccgattgacgggtcgatttatgacccgattcttcgtcttc

SEQ ID NO: 97405 - DNA, 732 bp, Glycine max
  unsure (1)..(732): unsure at all n locations
  Clone ID: PAT_MRT3847_58970C.1
ccacgcgtccggttaatatttataagatttaaatttaaaataatacttatttttgttaagactcaatcttttgattaattatttttatactataaatactcctaatttaaataagagagaatatattgataaatagttaaaaaagagagaagtattaattacaagaataagtttgaaaaaaattacaaatttattgttataaattaaattaattattttttttaattttaatgaattaaataattgaatttgatatataagaacagaggaagtagtatttgctgttgctcttaaatattacatctgttcttattcaattcatactctttaaattttttagttaatttaattattataagcaaattttaactattagataatttaagaaagttagtataagcaaattttaactatttttgttttatttaatgaagttaattaatttttttaaatgtgaaattaaattttgttgtttataaatgagagcgaagagagtaggatttcatttagagaaaaaataaagatatatattaagattaagacattttagttaagttttaattttttttacccattaaaaaactcttttgattattcgataaataaatttattttaataacttttaatgctttntgaagtaatatttttttaaacattagcttataattnttaactntntatatttttttctccttttatcattaatatatttggcaaattttttatttatc

SEQ ID NO: 97406 - DNA, 524 bp, Glycine max
  Clone ID: PAT_MRT3847_58971C.1
gccccgtcttataccgtgctgtgcgcacttagacagagaaagccaatctttattccttccctcgcgtaaatgatagcaggtggcgaccctgtactaactacaagaaagcggagcgcagtgcatataaaacatggcagcgaggccttaactggttgcaagcatgagacgggctaatctggctattgtaagcagcatactacatgagcttccatctgtatatcaaatggggtccaagcctgcttagcactgaagtagaatgaatggctatccacgccccctttatatatgctccggtgccttatgggtgagacaccaaccacaacaggagctgccgtacacagaataattgatcttgagtgacagttggggcctgtaccggccctaacaagtctaagatgaaatgcttcataccttccagggttcattccacagcacaatcactcaagaaaggcttaatgcagaatgatcgatggttctccatactagcctggcatgttcaatctgggcccaaaagcagaccggtg

SEQ ID NO: 97407 - DNA, 1290 bp, Glycine max
  unsure (1)..(1290): unsure at all n locations
  Clone ID: PAT_MRT3847_58972C.1
ggctcgagcccatgtcaagaagttaatggtagcaaagcagcaatgttgttcattggcctctatctggtggctctgggggttggaggaatcaaagggtcactgccagcacatggtggtgagcaatttgatgaaaccaccccatctgggaggaagcagagatcaaccttcttcaactacttcgtcttctgcctatcatgcggtgcccttattgcagttacttttgtggtgtggattgaagacaacaaagggtggcaatggggttttgcaatatctactattagcatatttgtgtctatcccagtattcttggccggttcaccaacctacaagaacaagatcccttcaggaagcccacttacaaccattttaaaggttcttattgctgctttactgaatagctgcacctacaaaaacactagcagtgcagttgtgaatatgacttcaagcccttctaatccacactcaggtagaacagaatcacaacaagaaactgttaaagcaagcacaacaactgaaaccccaacaagcaacctcaagtttctcaacaaagcagttacaaacaagccaaggtattcatcactagaatgcactgtacaacaagtagaagatgtcaaggtagtattgaaaatgctacccatatttgcttgcaccatcatcctcaactgttgcctagctcaattgtccacattctctgttgaacaagcagccacaatggacaccaagcttggttccctaaaggttccaccgtcttcgctaccggttttcccggtggtattcatcatgatcctagcaccaatctatgaccacatcatcatcccctacacaaggaaagcaaccaagtcagaaatgggaatcacacacctccaaaggattggttttggattggtactctccatagttgccatggcagtggctgctattgttgaaatcaaaaggaaaagagtggcaactcagtcagggctacttgatgatccaaccaaaccacttcctatcacattcttgtggattgcttttcagtacttgttccttggatctgctgatcttttccccctttgcttcattaattangtagtgacctgtccctctatatttgtacttagaggcccaatacaagtagtgtaggaagttcaacccacttagcacacacatgagccaatagaacttttgtaggtgatagcggctaaagttgtcaccgcatagccatggattattgggggcgccatcttcagtgacactgcttcttttagacacaatcactgaacttaggtatgtccctattgccaaagaagc

SEQ ID NO: 97408 - DNA, 176 bp, Glycine max
  unsure (1)..(176): unsure at all n locations
  Clone ID: PAT_MRT3847_58973C.1
aaagntccattctttcagcaggttttnatgactcttgagatnaaagttcatccttttcttcctccgctnatgcttgnngntgccagancnggttcatcattgcanaatatttgaatttgactgctaaggaaagcccccatttttctgagttgnaaagtggctnatatttttgagng

SEQ ID NO: 97409 - DNA, 1401 bp, Glycine max
  Clone ID: PAT_MRT3847_58974C.1
cccccgttgtcttttttttcttttccccccttcgccctgccccgtggtctggctgggtggagttgcggctgtgggcatctggttagttcttcgccatatctgttcctcgaggtaaaattaaagaagtcaaattaaattacggagaactctcaaataatatatgcacacacttgtgcacaattaatgagatcatttcacgcaaattacaattgacacatgaataactgctggccattaataaggtcaacaaaaaagtgcaatggttaaatcctaattatacctaattaaattaaatttaatagtccataacttgattcatgaagagaatttatgctgctcatgtattttggctaaatttgatagtcttaccatctgcatggtataaatgataagctggtagaacccaattgttttcgtgacatgtattgtctagttcctgtcctcctgatgctaataaggctccaaattcaagcaccttgttcatatcaaagcttcttaagaagactggtcaagtgttgagggtgtgattttgctatctgacgagcagcagtcaaccttgttgcttgggttgacccagtctctaggagagtgagcaaacgctgaagcctggttgggccattgcaaatcattccaagtacttttttgctccctttgcctaaaatttcaataggacacaacattcttggttgtgatgttgctggatagagttgctagtgtgatcaacgagaaaaatcgaaaccaaatttgttcatcaggtaagcacatgccaagggtatcaaacaacggtgcaaaaggcaattttacatgctggccactgtgtgcattaccctcttaatctacacaatccaattcacaatcaattgcacgctctaaggccctgcagtaagggttgtcagaaaaatatgtattatcttttggtgaagaatctgaagaggcagatacttgattctttaggacagagtagccctcactcacaagacatttatgataatgaatgagaacaagaagcacttgaagactgctatctgctattggatttcttgaaccttcactgcttgaactgatcaaataactgaatggcaataacacaatatttgcagctgcagaaccgactctctttagcacactattctgacttccatcataaaagatggaataagatgctctattaaatggaacacgaggacgggtaatgtaatttagaagcaggttgcacacaactgaagtaaccagatggctatcctgagccatcgctgcatcaagaaatgggttcacatcattcggtccaggagatggcccacaaagaagctgagttgagattgcaataatcataaaattaagcagctccagatgtaggaaatatgtgttggggctcacataaaaaaaaaaaataaagttgag

SEQ ID NO: 97410 - DNA, 178 bp, Glycine max
  Clone ID: PAT_MRT3847_58975C.1
ttgtagcggacgccaggtcaaccctttagactttaaatcgcaggctctctcaaaggttgcgactgagggcgctacggctccttctccacactatattcgattcaggcgacagttcacagactgacgcactatgctgcaagataatccacagacattggacgctatactacacgagctt

SEQ ID NO: 97411 - DNA, 490 bp, Glycine max
  Clone ID: PAT_MRT3847_58976C.1
gcagtacaacaaaggactcacaaggcttggagaccacctacaaataattgctcatcattgaaaaagattacaaacaatatgactagcataagtcacacaaattacagatgcaagactaactgctgacctattataagaatccttaatggaacatattgtacatagcacacaaatcactactaccaattcaaatcttaggtggtctgcacattcgacgcacaccattatattctaatccaagcagacctgacattatctcacctgtaaaaagaataatcgccttgtggctttactctatctgtgactcaaccaagcctgctcaggacgatataatcgcaaattgagcacaatagatgtctcctagcacaacatgaaatgtagtctttaacaggtgctcatcaccacgtggaaccaatcatcataaactgtgatgtatgtccatatggaatgataccagtggaggacggcgaaaagttcactgtgattacaa

SEQ ID NO: 97412 - DNA, 593 bp, Glycine max
  Clone ID: PAT_MRT3847_58977C.1
gtatgccttggtgcttgtcaagctcaaggctgagcgccaaagaggaataaccatcgatattgttctgtggaactttgtaaccaccaagttctactgcacagacattgatgcccgcggacatggagactctatcacgaacatgattactggcacctcccaggctgatgtgcgctgtccttatcattgactccaccactggtggttatgaagctggtatttttaacgatggacagactctggagcatgctcttcttgctttcacccttggggtgaagcatatgatctgctgctgtgccaagatggatgccactaccgcgaagtcctctataggcgtaggaatgatgaaattgtgaaggaagtctctatctacttgaagaaggttgggtacaacccagacgacaatgcatatgagcccatctatggtttcgagggtgacaacatgacagacaggatcacctgccttgactggtgcaagggaccaactctccttgaggctgttgaccagatcagagagccccagaggccatcaaaccagccactcaggctctcattgcatgatgattacaaaatagggggtattggtaccgagccac

SEQ ID NO: 97413 - DNA, 458 bp, Glycine max
  Clone ID: PAT_MRT3847_58978C.1
aaaaaggaaaagttttaacatatatggacagatgagttgacataatttattgtcagtttaattgacataatttacaaggttggtgtaggtgaaaaggaaatacatggaagtatcgtctacatacaagctatctgcaaactaattggggttaaataacaaaaatccttcttaatatgacatgattttctatgctaactttccttaatccaattctaaacaaatatcgtatgaatgactatgtatgtatatataagacttggttgatgtcatattttaatgagtcatttccctgaggagtctttcttaaggtctcagcatgtggctttgagttagagccaattaaaatgtttccattccaattcccacaacggttcttgaagttggaacccattattattattattattattattcacatcccactttgtgctacttgatttttcaacttttaacatttg

SEQ ID NO: 97414 - DNA, 366 bp, Glycine max
  Clone ID: PAT_MRT3847_58979C.1
gtactcatcatatgattgtccttttgctgaggaaggtgaagttcattttattttatttttataaaaaaaaaaaaaaaagcggggggcactaattgcatcccgcttcatgggccccttcaaatgattaccaaggttttccaaaaaaataggcaccagaaattcctgttttaaaataattttttggcaaagaaaccttaaaaacggggtattcagttacgggcaaaagggaggtccaccccaaatccccttttgaagaagttccaagcttcccccccgttggagggatgttgtttaaccttttttgttcccacccacccctgctgcaaggattggttgcggcgacattttttattgaaaaaatgcccc

SEQ ID NO: 97415 - DNA, 264 bp, Glycine max
  Clone ID: PAT_MRT3847_5897C.1
ccttctcgttcggccactctttctaccacgcttgcggtcattggtgggtttggccaaaatgccgtgtggccataccctcttgaacgatcatctgaatcagctgaaagaacgtatatttgtatgcactcaagccacaggatagctcacagcatacttgctgcgatctgtgatttaacacaatgctggtgccacacacgaaccaagccacacctctgatcaatgcagtgagggctgtgaaggagcaggttattgctgatcatgcta

SEQ ID NO: 97416 - DNA, 846 bp, Glycine max
  Clone ID: PAT_MRT3847_58980C.1
atggttggtaagatccttgctaagctgtgtacattgcccgggtttgggttcaagctgcagtttgacaagcagatccacatcgaatacatcatcttggtcacccagacttgcttcgtaaacggtcagggttcatattggagacccttcatccacgcgaatgacttgactgctaccaccaggttcacaatctctcccgtcaaggttgggaatttcatcttcagatatggtgcgaagacattggcttcaataaagtatgtctatggagctgccttgatcaatgaagaccttggacaccatgcaattggcgatcacgatgaagaagactatggggttgttttggttgatagggttgatgcccttgaagtctctgtcgatgaatgttatgggagggagacttcttgggaatggtttgtcaacacaattgatgttgatatcttggataacatggagatgacactgttgggattggcaagactatcctccattggaaaatttgcctgcaatggtgttgattacacctcaaatttgttgggcgagctcattttcttgttcttgcagagggttaagattctggatctagacaacaattcatccaaacctgtccatgatctttcagaggtgtcaaagttgtcgatggaccttggagggagtcctccataccatgtcaatgctgctcctttgaggaatgttgggaaaacccgacaaaagattgcgtcatcattgggcaggtcagcctccatgactctgcttgtgtacattcatgcattgtgcagagagagtgcttgtcaccctggaggcgtctcacccgagcctccatctggtcgtggtcagcctttagctttatga

SEQ ID NO: 97417 - DNA, 1176 bp, Glycine max
  Clone ID: PAT_MRT3847_58981C.1
gattcattgtacttgtactagcagcagcaatttgtttcgtgaacacttgcagcttcggtttcttaattcatcttcgctagggtttttgaagttgacgatggcttcccttcctcatttcgacgacgactttgattttggaggcggttttagcggaacgcaatcaggtaataagaggccatctcccgactatgacgaggatgaatatgaaaatgatccttttggacacaagaaggccaaatcaaaagctgaagaagcggcttctggtgtgaccacaggaatgattttgtctcttcgtgaaagtcttcagaactgtaaggacatgcttgctacatgccaaaatgaacttgaggctgcaaaatctgagattcagaagtggcattcttcatttcaaaatgaaccttttatatctgctgggaccactccagcaccgaaatcgttgattaattatcttcaagctctgaaatcatctgaagagtctttaagagagcagcttgaaaaggcaaagaaaaaggaagctgcattcattgtcacatttgcaaaacgagaacaagagatagcagagttgaagtctgctgtgcgagacctgaaagtgcaactcaagccagcatcaatgcagtctaggaggttgttactagatccagctgttcatgaagagttcacacgtttaaagaacttagttgaggaaaaggataaaaaagtaaaggagttgcaagataacattgctgctgtaagttttactccccaaagcaagatggggaagatgctgatggctaaatgtagaaccctgcaagaggaaaatgaggagattggaaatcaagcttttgaggggaagatgcatgaattagggatgaaacttgcattgcagaagtcccaaaattcccaacttagaagtcaatttgaagggttgcagaagcacatggaaggactgacaaatgatgtggagagatccaatgaaatggtgttcacttctttctccttttctattttttttgttatttaaagatttctgtgcatgttctgttataaaaatgcctcatgggtcattagaaacagatggtgatttttttttttgtttgcggatcctgcaactcaggtgaaaacatttaaggaactcgactattgtgttgggaaaaaggctgactaaaaaaaaagactgctgatatgccttttaatggg

SEQ ID NO: 97418 - DNA, 458 bp, Glycine max
  Clone ID: PAT_MRT3847_58982C.1
gaataacaccaaaaaccaattctatcccacagaatcatggtaatgtgtttgtttggcattttaccttcaccatgaataaaaaagaaattgactcagctaattcaaacacactataaatcaacaatcaaattgggcctgtacctaccaaaataactcaacacgaaaacataaaaactagaacaatttaattcatcaactagcaaattaatgcacaaatgaagcataaacaatcaaatagaattcgtaacaacccatgcaaggagactggctacattaaaacaggctaatttgataggaaatgagctcaagcaaaaataatcccgttttccttaatagtatcaagaacgatccctagtctgccttcaatcctttcatcctttctaggttcataggctactgcatatacatcagcttccattgatcgttgagcaataaggtttccaacaactctacaagcg

SEQ ID NO: 97419 - DNA, 1287 bp, Glycine max
  Clone ID: PAT_MRT3847_58983C.1
cttgtactagcagcagcaatttgtttcgtgaacacttgcagcttcggtttcttaaggcatcttcgctagggttttggaagttgacgatggcttcccctcctcatttcgacgacgactttgattttggaggcggttttagcggaacgcaatcaggtaataagaggccatctcccgactatgacgaggatgaatatgaaaatgatccttttggacacaagaaggccaaatcaaaagctacgctgcgagaagacgacagaaggggaatgatcttgtcacttcgtgagagtctccagaactgtaaggaaacacttgcgacataccaaaatgaacttgaggctgcaaaatctgagattcagagttggcattctacacttaaaaatgagccgtccaaatctgctgggatcactccagagcccaagatgttgattaattatcttcagaccttgaaattctctgaagagtctttaagagagcagcttgaaaaggcaaagaaaaaggaagctgcgttcattgtaacatttgcaaaacgagaacaagagatagcagagttgaagtctgctgtgcgagatctgaaagtgcaactcaagccaccatcaatgcagtctaggaggttgttactagatccagctgttcatgaagagttcacacgtttaaagaacttagttgaggaaaaggataaaaaagtaaaggagttgcaagataacattgctgctgtaagttttactccccaaagcaagatggggaagatgctgatggctaaatgtagaaccctgcaagaggaaaatgaggagattggaaatcaagcttctgaggggaagatgcatgaattagggatgaaacttgcattgcagaagtcccaaaattcacaacttagaagtcaatttgaagggttgcagaagcacatggaaggactgacaaatgatgtggagagatccaatgaaatggttcttatgttccaagagaaattagaagatagggatcgggagatccaaagactaaaacatgagcttcaacagaaaaacttggaggatcaaagactaaaacataagcttcaacagaagaacttggaggatggaaatgccaataatgagacgatagccggggaggctgctaactaatttgaaattaattttttgttttgtcttgtagtaaacaatttattcatttttttccctctttttaatgtcttttactgttgtatattatattaattgtttttgcgaaactgtggatatttatgaggaacgattatgcttctgcagtatagtccagatggagctacttttc

SEQ ID NO: 97420 - DNA, 313 bp, Glycine max
  Clone ID: PAT_MRT3847_58984C.1
ggcgtcctcattttatactacttttaatacctgcctaatctcttgggtctttctatcatgagcgctgatcagaataaacattgatgaattctatagggcatgtagctagattatccataaaatcccatgttcacagcggttcttgttttacttgaactatccaacacctgaaacataacccaagccgaagagactactgctgcctttagaaacgcccggagtcggtcagtttaaatcaagagttgttcatatagcatcgtcataagaacctccctatctcttacatgaacgagacctttgtgtaggatacaca

SEQ ID NO: 97421 - DNA, 1858 bp, Glycine max
  Clone ID: PAT_MRT3847_58985C.1
tgccgtgctgacctaaagcataaagggtaggtcgtagtggaaccatgaagctgcaccagaaatcacgtagtggctgcatctccgttcaccactgatcgcttacgagctcgaaaaggttaatgaaggagcacgtcattgcgcttctactactcttccactttcacagataaccctattgcataatcgcgctccttcctctctagggtttcttcaacttcatggcttcccctactcatttcgacgatgacttcgatttcggaggcggatttggcggaaggcattcaggtaataagaggtcgtctcccgattacgacgacgaggattatgacaacgatccttttgcaccgaagaaggctataacaaaagctgaagaagcttctggtgtaacaacaggaatgatcttgtcacttcgtgagagtctccagaactgtaaggatacacttgcaacatgccaaaatgaacttgaggctgcaaaatcagagattcagagttggcattctacacttaaaaatcagccatccatacttgccgggatcactccagagcccaagatgttgattaattatctgcaggccttgaaatcctctgaagagtctttaagagagcagcttgaaaaggcaaagaaaaaggaagctgcattcattgtaacatttgcaaaacgagaacaagagatagcagagttgaagtctgcggtgcgagatctgaaagtgcaactcaagccaccatcaatgcaggctgcaaaggaggtagttgttactagatgccagctttcatgaagagttcacacgtttaaagaacttagttgaggaaaaggataaaaaagtaaaggagttgcaagataacattgctgctgtaagttttactccccaaagcaagatggggaagatgctgatggctaaatgtagaaccctgcaagaggaaaatgaagagattggaaatcaagcgtctgaggggaagatgccatgaattagggatgaaacttgcattgcagaagtcccaaaattcacaacttagaaatcaatttgaagggttgcagaagcacatggaaggactgacaaatgatgtggaaagatccaatgaaatggttcttatgttacaagagaaattagaagaaaaggatcgggagaggggaagatgcaagaatgagggataaaacttgaactgcaggattcacaaatataacaacatataaatcaatataaatggttgcataagcatgtggatgatctgacaattgatggggaaagatctaattaattggtacttatgttttaagattattttgtagagaaggatcggcagatacagagactaaaacatgagattaaacagaagaacttggaggatcaaagactaaaacatgagcttcaacagaaaaacttggaggatcaaagactaaaacatgaacttcaacagaagaacttggaggatggaaatgacaataatgccggggaggctgctaactaatttgatatatatatatatatatatatatatatatatatatatatatttactgctgtacattatattaattttttttgcgaaaactgtggatatttatgaggaatgattatgcttctgctttgaatggaattatgggccttgtcgtggaggacgagaaaacagatccagcatttaataggaattatgatgaaacgataactcctgaagccgctaagtagtataactttagacttgagaagtttgagtaaaatagtcaaatttgtccatgaaaagaatgacggggatgttttgatctctaaaaggaaaatgatcatttcaatcttcatccctcaagcttgtaaacatagagcactttagtcctttcatccaataaatgagttttggggggtcg

SEQ ID NO: 97422 - DNA, 1772 bp, Glycine max
  Clone ID: PAT_MRT3847_58986C.1
aattcggcaccagaaaaatttcctactttggttttataattttatgaattgtaaaagccaaatgcaccatcttaaaaaaaaacaaatatatatttaaaaaaaaagaaaaaaatgcatgccatcatcatcaaccattcctggtcctgatcctaaatagggttagggttagggtttatgcaatcgaattcctgagacggtgcatttgtacgtaatcgatggcgaatcgcacggatcctgcagctaagagcataaggggcacgaaccctcagaacctggtggagaagattctccgatcgaagatataccagaacacctactggaaggagcaatgtttcgggttaacggcggagacgttggtggacaaggccatggagctcgaccacctcggcggcacctacggcggaaaccgcaaacccacgccgttcatgtgcctcgtcatgaagatgctccagattcagcccgagaaagaaatcgtcattgagttcataaaaaacgaggattacaagtacgttaggattctcggtgctttttacttgcgtatcactggttctgacattgacgtctaccgctacctcgaacctttatacaatgactatcgcaaacttagacgaaagctcgctgatggacagtttacattgacgcacgtggatgaggttatagatgaacttctcacaaaggattattcttgtgatattgctctgccacgcgttaagaaaaggtggactcttgaatctttgggttcgttagaacctagaagaagtgcacttgaagaagattttgaggaggaagaagagaaagaggataatgagcagcctgttgatgagattgaagataaggcctatgagaaggaccattatcgtgggagaagccctactagggaaagagacagggatagaaggcacgatagtcatagacacagggaccgtgattatgacagagactatgatagggattacgatcgagagcggggacgtggccgagacagggacagagatagggaaagggaaagggacagggacagggaccgatatcgtctaagggaagaaaaagattatggtcgtgatagagagggtagggagcgggagagaagagagaaggatcgtgaccgtggaaggcgaaggagtcactcaaggagtcgaagtagaagtagggatcgcagggaacatgatggtggggactacagaaagagacatgctcggagtagtgtaagtcctagaagacatggagatggacttgaggatggtgagccaaagaagaagaagaagaaagaaaagaaagaaaagaaggatgatgggactgaccaccctgatccagagattgcagaagcgaacaaactacgagcagccctgggtttgaaaccactgagggtctgatctggcagtgtggtatgagtttggtctgggtttgaaaccactaaaggatccaaagtggtaaataccatgttaccttgtggcacttgatgctgcttgctttttctgtacatccctgattagcagttatcaagtcaaaaggataagttgtcatgtacgtgtacttgtgttgctgcaccagctcaaactcgtttgtccatagccatattttgattgtctttattttaaagagaccatattgagagcttctgatatgaaattttaactacagaaagtttcagcagccttgtcttagtcaaatttatggtttgaatattcaaagaatactactagcattcgtttgtggaatttgggtaaaatatattgctcaattgaaagaattttaatttcgggcaagatttg

SEQ ID NO: 97423 - DNA, 199 bp, Glycine max
  Clone ID: PAT_MRT3847_58987C.1
ctctgctgccgctcgcaagaatctaactaagattgcctgtaatatgcatcatacagagctcatggagtggcagggcaatccccacactggttgtaggcacacagtcacagtcaatctccagaggtgggtggttgaactcactagatctccaaaaacactttactctaatgagacctactatcttgatgatgatattact

SEQ ID NO: 97424 - DNA, 429 bp, Glycine max
  Clone ID: PAT_MRT3847_58988C.1
cgttccaggaaggtttcccgtcatcactgtatgacgtcctccttctttgggggggggggggggagacccaacaaaagtaaagtaacataggggagggaaaagcgaattagataagagtagcagttgacttgcgtaaaaataaaaggaagaataaggaggaatgaaaagtgcgtgtgtgggacccaacgaagacgaatccaacaatacacgtagcagtcaatgacgtcgagtccacaaaaaatgttatcatcacaacttgtcaaattaacggcatcaacgtggggttcgtatagcgtgcgggtttaaggcgtccacaggtccgtgtaccgttaggccattatagtatcgcgggtacaagtggggttttggttgttttcatcaattgcggtttttataaatgttgctctttgggcaacagttgaccagttg

SEQ ID NO: 97425 - DNA, 538 bp, Glycine max
  Clone ID: PAT_MRT3847_58989C.1
ggtgtctccatgttggatctctctcatttcttcttcaacttagtgttctccttcaacactctaactctaagtcacttttgtcttctccttcactctcttcaactcaaacctcacatgggttatggtgttgtgttgttattagcttgactcactcccaacgtctcttttctctttgttttgattgcaatattgtaacgctcgcattccatttattgcttcctttgacttggcttccttcctttgcaagagtttttttttttccttctcttctctctctttccttctttggtctttgtatgttatgttatatatatgtaggcgttgttgcctcatgggacatttctattcttaatatctgaataaacaggcacatacccatgtctcaaaatcctcacttttcttcactttcccttctaaatcaatctgtggtccttgtctctttcttggcatgtttgtgtgttgattattctctatgaagactgatatatctacctacttctcatgatgtgaagctttttggtatttgtgttgggggggg

SEQ ID NO: 97426 - DNA, 264 bp, Glycine max
  Clone ID: PAT_MRT3847_5898C.1
gggggtggcttattatatataaggacgactgcaacaattttataaaagaacatgctttaaattggacacacatatacactgccatgaataaaactttgcacgcaatagaaaatcttccgccaccaacaatgttggtttgctctacagagcacttagcggggggaatagcgaggttttgttgcatgagttgacacaaggtggtttataagcgtattaggcgccataggtgggtggtgttaatgaggatcattttgtgggggtatg

SEQ ID NO: 97427 - DNA, 340 bp, Glycine max
  Clone ID: PAT_MRT3847_58990C.1
ccccttccactctttacttggggcagttttattaacacaccattgattttatttcaactttatttggaatacggttgtatcgctgactcgaaatttttctgaacacaaatattcatgcttgttcaacctatatttcttttcatcatcaacctatttggaccaaatggttaaatttccctgcaaaaaggtcttggcataataacggattttttcctcacgtgaggttcttcaatattaaaccatccaaatcttcttcatttttaatcaagtttagtcactgtgaaaccctatattgtacctttctctacgccctatatctgaggccactaaatctttcttt

SEQ ID NO: 97428 - DNA, 144 bp, Glycine max
  unsure (1)..(144): unsure at all n locations
  Clone ID: PAT_MRT3847_58991C.1
gnggnagcnaganagaagccgctgcttcattntaagagggttccattcatgctngatttagnttcattacctggggtttatatgttnatnnttcctnttaactttggngtatagagaggcggggcatagcnttcttggatatnc

SEQ ID NO: 97429 - DNA, 371 bp, Glycine max
  Clone ID: PAT_MRT3847_58992C.1
aagctcggaatccagctcgagtactctatccctagacaaggagtttcatttttgcagcaggctgtctcagaaaagaaggcacgctgaatatttgccccatacgggccagcaatgccaggggtcccccaacggtagccactgcacagaaatgcccctcaattgatgcggccgttgatgacatctctaacgccaatacttgcgacatggaacagtgaccacatgcctatttatgatccaagccataatcacaagccgaagcaaagtcttggcaagaaccttctgtttatcactgctgctgacaaacatgtctctgaggtcttcctagtgagcgtctccgtcatacacccccacaaaaactcgcaaacttggtg

SEQ ID NO: 97430 - DNA, 736 bp, Glycine max
  Clone ID: PAT_MRT3847_58993C.1
gctgtctcccctgacgccgtcgctctccttcgcttcctttccccatcccccaactcatcggttccttctcgtcatgaccgcctctcaactcatctccgttagtcccgacgaactccgcttccactttgagttggagaagcaaacattttgcgatcttaaggtcctcaataactccgagaactatgttgctttcaaggtcaaaaccacttctccaaagaaatactttgtgcgacctaacaccgctgttgtacagccctgggactcttgtatcatcagagtcaccctccaagcccaacgggaatagcctcgacacacaacacaaaacacaaagcattggtattcgttgagttggagaagcaaacatattgcgatcttaaagttctgaataacacagagaactacgttgcctttaaggtcaaaaccacttcaccaaagaagtactttgtacgacctaataccggtgttgtacatccatgggacctatgtatcatcagagtcaccctccaggctcaacaagaataccctccagacatgcaatgcaaagacaagtttctcttgcagagtacaatagtgaatccaaacactgatgttgacgatcttccgccagatacttttaataaggatggcgaaaagtcgatagaggatatgaaactaagagtggtatatatctctcctatgtcaccccaaggaagcacagaagatgacacagtgaagaattcaactcaaaaacttgatg

SEQ ID NO: 97431 - DNA, 430 bp, Glycine max
  unsure (1)..(430): unsure at all n locations
  Clone ID: PAT_MRT3847_58994C.1
gacccacgccgccgaaccaacccgagaccacgaagacccacnnngagagcagggaggangaaagagaaacccanagagagcccgnagaaaaggagggaccccagggcggggaggggaaggacgcagaagggggggaaaaggggncngagccgcgcacagaagaaggngcccgcacccgggagggagacgccgagcngaagggcgaggcgggcanngagggacccaaagaggagggaaaaggcgcgaagccggcaggaggagaagcggccgaggcggcgggcgagggaccncaagccgnaagaaccggagaagggaagagcgagaaggagacggcagaggaggaaggaaacgacgcgaccagaggaaacagcggaggagaagaacaacagaaaggacaggaaggggaaaaaggcagcaagaaaaagaaaaa

SEQ ID NO: 97432 - DNA, 369 bp, Glycine max
  Clone ID: PAT_MRT3847_58995C.1
ccgccggccccccacaccacggggggcatcttttaaaaagaatggccgtttcaccaccaccccacccgagcatagtcgaggggccagccaagcaagccctcaaagacaaccggaacaaccaagggacaagcagaacaataagaaacaaccaaactcatacaccacagagctaaagcaattccaatctacctaaacccacgaatccctacctcggacagtcaccgccactataatggacatgagtgctgaagggcccgcagagggcgccatggcggacgagggagggccaccacctcccccaccaggtcatgaccaagaaagaccccgacggggggggcatgaaaaagaggcgaaaccgcaactccaaat

SEQ ID NO: 97433 - DNA, 460 bp, Glycine max
  Clone ID: PAT_MRT3847_58996C.1
gatttatctaaaaagatagacgccagattgagacaaagaatagatcctcaatacaatggggctcaggctcagatggaaacaaacaagtaaaaatcgtctctggaagaagaggaaactccaaaaggatccatggcggatcataaaaccccgcaagctaaaaaagcactacccaaaaacacagaaggaggaaccaaactgcgaagagaacaatgggcaaatttattgacagagggacaaactagagcaagtgcagattcgcaagaaaaacaaccggaaaaaggaaagaataaaacggcggccacaaaagggaccacaggaaaaccaggaataaaatcggacagagcgaggaaaggacccaaaagggggcgaaccagacagaaaagaacaccatcagctctaaagactgagaagtacggaaaacagcttgaacaaaagcaagacaaatgcgatcaacccaaaa

SEQ ID NO: 97434 - DNA, 200 bp, Glycine max
  Clone ID: PAT_MRT3847_58997C.1
gggaaagaaaaaaacattagggggatttacaaaattcaaaatcccacagggcgaggaaaatgttataaccggggctacaaaaatccctacgctagaatctactccccaaaaaaaagaggggtgcttttaaccgttgaaaaaaaaagcttaaaaaaaaacagggtctgataggaaggattaacccctttaagaacccccaa

SEQ ID NO: 97435 - DNA, 286 bp, Glycine max
  Clone ID: PAT_MRT3847_58998C.1
catgggcggaaacccctataatgccttaaatgccaagacaacatgatgaattctcttactggacttgtcaacgctccactcaacctactgaagctgtatctatgtggcgggatcctgacgcgacatattaattaacaactgctaggactcactttttttggtgaaatgttaagggacttctctttctaatgcaatcgattataaggttgatatgttcagcaagcacttctttggcctacaaagaaatcacttcattgtctccctaggatgaccactaacttttatc

SEQ ID NO: 97436 - DNA, 282 bp, Glycine max
  Clone ID: PAT_MRT3847_58999C.1
ttttggctaaaccaaaggcaccggaggcttctccttagaaccctaaactgacgccatccacccttgatttgatgacatcgtcatggcttttcttactccttggcgtacattccaacaggggcgacaaatatcactttcttgagataccacacaaatgcatgagtcagttgccataaaaaactcgttgaacatattgcccgacagtctcaaagttgacatacgacttggagccaaacataatgttcttttgaatatgacgaagctatctgggcaaacaaaagg

SEQ ID NO: 97437 - DNA, 277 bp, Glycine max
  Clone ID: PAT_MRT3847_5899C.1
agcacttgcaaactagtcttgttttcggaacatcatcacttacattacactggtggtaatggcagctgcactacaagcagcagctactttcatgcaacccaccaagttgagcaggagcaacactttgcagcaaaagtctactcagtccatttccaaggcttttggttgggaactgttggagctaaaaaggtcacatgctcccttcaggctgatcttaaggacttggctcacaactgtgttgatgcaaccaagattgcaggattcgcccttggcacct

SEQ ID NO: 97438 - DNA, 461 bp, Glycine max
  Clone ID: PAT_MRT3847_589C.1
tacggctgcgagaagacgacagaagggttacccaatctctttctcgtcctttaaagaagcatgcaatgtccaaagaatatgtccttctgagaatgatctaagccatcataacttaattttaatactgtatgaatttccatactcgaaatcttttggagttttctcaattcactctcccatgcctctttactttttcgacgaagacttgcacccataacttttaaagccaaaggaatacctttgcaataggaaagtactctttctgataggtcttcatacccctctttaggttgtttttctccaaaaacagtcaaacaaaaaagctgaacagagtgatgagaactcaattccttgacttgataaatttcgtcattggggccaagtatttccctatttctagttgtaacaatgactctactttctggttccaagaaatcataatctacttttaatttttctag

SEQ ID NO: 97439 - DNA, 386 bp, Glycine max
  Clone ID: PAT_MRT3847_59000C.1
ggttatgttctggtacttgtggttcgtccttttttgcaggttagggcgaatttgaggtaaagcatcaatcttcaactcttaccttttatatagtatgtttttatcttctatctccttccctttctttctgctattcaaatattttttatataataacttaactaagatttttgttgtgtacatgtattgattgatatatagcattgcttgattaagttcttgattattattagcattaatatcggtattgttattatgaaattattattattattattgaccccttcttttaccccttttcacgtcgctgcctggagtggatgtgaagcaatcgtgaacatgtccatacactcaacaaagaaaatagaaaagacaatgctcagtac

SEQ ID NO: 97440 - DNA, 667 bp, Glycine max
  Clone ID: PAT_MRT3847_59001C.1
gggaagtgtgagtcagacatggcccgaggtggataaccccgagcgtatcccccgctatccaggtggtctgaacttgcagcacagcatggaatactggctcacccttgatcttctgtcatcaaaagttggccagccttgcactgcaattagagtgcaggattcaagtcaagcagatgttatttttgtgccatttttctcatcactgagttacaataggcattccaagcttaatggacaggagaaagttagccttaacaaaagaaggcaagacagattggtacagttcttaatgggccggaaagaatggaaactttcaggagggaaggatcccctaatgggagcccaccaacttaacagcttgttggatgcaagaagaaaattgggtgctgctatgcttgtttgcgctgattttggaagtcctcgggtttaattagttgatatcaggaaagatataatagctccattttgtcccctagtaatttccttcccttgagccccatcaagttcatctgaaaaatggaagcccccaccccagtttcttttgtttgcccctagcagggttttcctttttttcatggggttcttttttcttttttttttttttttgcggaataacccctcttgttggtttttttttaaagtcaaatcctccctccttttttgtccc

SEQ ID NO: 97441 - DNA, 444 bp, Glycine max
  unsure (1)..(444): unsure at all n locations
  Clone ID: PAT_MRT3847_59002C.1
tttttgataagaaatgatccaactcataatatcaaacgaattttcgggagacaagagacgctacacctcatctatattttttgggggttacataagaaagctcgctgtgccaataattaaataaaaaacatatacggtatgacttgcgttggcagcccaacaaagaaaaaagatgctttatcatatttaagctgagaaataatgtgaaccaaaaatgaatacaacgacttttgttncatgaatggaggccatcaaacctagttgccccttttgagactctacagttatacttcactctgatgggtctgcacagtcattgctaatactttacgctgtaaccgctcaaccgggtgtcacttaccagataaaaaattgttttttcatgtaaaatgttttgaaaatgctttcacagcttaaatcccagtaacctcctctgagagcaat

SEQ ID NO: 97442 - DNA, 462 bp, Glycine max
  Clone ID: PAT_MRT3847_59003C.1
ttagagaaggacccttttgagtgtccctcacaagcttgaaacttgacctgtttcttccttggtggggttacaggttttgtccttggttccaattcctgagcctcatgttgttgttgttgttcttgcatcaaacacttcatgtgcaaccttgtttctctcagttcagcatatgcagtgtactttggtcctctctccaagatgaagctatctgcggaggtgagcctcaaaggaaaagggtggtctgaattggaattctggttgaggatcagtgatatggggtcaagggcatgcaagagaggctcaagagtggggtttagttgatgggtctgtggcagtgacatgttactgtttgtgtttgtgtcagtcatgattgattgatggtaagaaaaatattggatgaatgtgaaggtgttggcactgtctttttttctcttttgtatctatggctgattgagttatcaa

SEQ ID NO: 97443 - DNA, 573 bp, Glycine max
  Clone ID: PAT_MRT3847_59004C.1
tttgccgtgctacatgtgagcagtcctcctgcttgggggggggggggggggcaaaaagcctgccgtgtaaagtagaagtaaaggcttagaataagcaaaataattaacggaaaaatgcgaacgtaacatgcgagtttacattagagagaatagaaggcagaagttggagccatagtaaatacaaaagttttgcaaaatcaccgtgtggcacgggtatataaaccagatttgagaaaaattgagagagacgttgagatgctaggactgataacagaaagaaatgttatagagctgggaactaccggccggggtggctgcgccaggttagtattaatagtatcagtataaggtggcgactgggagggatagaaaaacccagagcaaccgcggtacaacatgttgcttagccaacctaccgtcgtcaactgttaaaccggtagacccgggttactactagttgcacagctagtggtatgcactaaacatcttaagctactagtactttagctggtagtaacaaaacaaccccgtgtaaacaatggtactgcccaggtaagcgtgctaactgttgta

SEQ ID NO: 97444 - DNA, 457 bp, Glycine max
  unsure (1)..(457): unsure at all n locations
  Clone ID: PAT_MRT3847_59005C.1
tccaggaaggtttcccgtcatcactgtatgacgtcctccttctttggggggggggggggggggaatagaaggcagaagttggagccatagctaaatacaaaagttttgcaaaatcaccgtgtggcacgggtatataaaccagatttgagaaaaattgagagagacgttgagatgctaggantgataacagaaagaaatgttatagagctgacacggtggaccaggttagtattaatagtatcagtataaggtggcgagtgggagggatagaaaaacccagaggaaccgcgggtacaacatgttgcttagccaacatacagtcgtcaagtgttaaaccggtagacccgggttagtagtagttgcacacgtagtggtatgcgagtaaacatgttaagcgtagtagtagtttacgtggtagtaacaaaacaaccccgtgtaaacaatggtactgcccagg

SEQ ID NO: 97445 - DNA, 342 bp, Glycine max
  Clone ID: PAT_MRT3847_59006C.1
agcacggaaggcggggcgagccaaaggagaagagacgaaagcaacgcatttagtttcaaccgagacgggccaaccaaagggggaggcacaaaagaaaccagacaccgcatccacgggagagcacgacaacaagaaggagacacagcacaatcaaggaagaaaaacgcacccaaaaaaaacagaacaaggaccaaagctccgcatccaagcgcaacaaacgaaaccaacccagaaggcgaccgccaacggcaaacgatcccggaacagagggcaaacccgcgccggccagagagacgaacacgaaggccaaacccaacaaagaagacagggaagacaaaggga

SEQ ID NO: 97446 - DNA, 265 bp, Glycine max
  Clone ID: PAT_MRT3847_59007C.1
tttcggaattttaacgggttccacctaatgccagaattgcgagagtcttgactacaaatgatgactgattgggacgcgcaaatcatgatggatacaccacttgctttggtgaaagtcaataatataccactcccatgatgcccgcaatggatgaaattttttatacggacgcgcaatatatggctggggaatggtattattggaaccatgaggaatatcattgtgaataaatttctgtaagtgcaacaatcgacggtgtaaagga

SEQ ID NO: 97447 - DNA, 355 bp, Glycine max
  Clone ID: PAT_MRT3847_59008C.1
cacattgtctttttgggtttttttttttattcctattaatattattatataaagaaaggctataatcactagaatttctatatatttatacttagcatataaaaattctagggattattggttagccaatctttttcataatttaaatctccctttttttattcaaagaatttatggctttgccttcttatttttaggcaaagaaaaaaaattttggaattgaaataactcacttaaaacgccctttaaaagattacccgggcccattgaaataaataagcccttatggaataaatttttaactgtttgtgaacctttagggactgccttattcaatgtgttggtaattactttt

SEQ ID NO: 97448 - DNA, 359 bp, Glycine max
  Clone ID: PAT_MRT3847_59009C.1
caggtcattgacatctacctaaagaaaaaattgattggtcaagcccatgaagagaacaccaagactggcgtttacacagagattagacaagaccattttttttagaaaccatacacctgctagcaattttaggagccaagggactcacttacacaatgtaaaaaggccaatataccaaaccggacccccaaggcccaccgtccatacctataactggaaacacaaaggggaataaaacatgtgtaccagctttaataaccatatgaaaatggcatcattcacagtgaacgagatatcaacatacgcatttcaaccttccttatgagtgcaatcgcccatctaattcgctgaagcagaca

SEQ ID NO: 97449 - DNA, 319 bp, Glycine max
  Clone ID: PAT_MRT3847_5900C.1
gacatgaggagagtaagaaagtgggggtgtgatgcctgggagaggggggggggtcaaacaaaatgaaacaaatgcggcatcgtgtgtacatgcaaaagctgatgaacataaggctatatctaaatcagaaacaaaaccttgatgggtggagcatgaaggaggtgatatggaagatggcgacgataatgagaatgaagatgaactgcataacaattgtgatgtggaggaaatgatacttgaaatggaggtatgtggaatggatgaagagacatatgctaggagagaatcactgcgaaatcaactggatgaatggaagagg

SEQ ID NO: 97450 - DNA, 563 bp, Glycine max
  Clone ID: PAT_MRT3847_59010C.1
ggcgaggttagctgaaaaaaatagaatttaaaattccatctatctcaagacagtgaatttggaaaattctcactctcgacggaggcggatcttcgtgctctcgacgcggagcctcgctcactcactctcgaatgcgaagcctcactcttgaacttctctctctgctgtataaacattctagttatggaagattctgatcaaccagccaaatctgctgaaaaccagcaaactgaacaagtgtgtagttttttcagaaagccagttaataaaaagaatataaggaaacgaactattgttaatgaagataatgaggaggactcaaacaatgaaacttctctgttgcatattcagaagaagacgttaaagcctgataataagttgtacttttccactggttcttcaaaaagctctgcatctgctgaacccagtgaagaaccaggaaaaccagtctttcagttcgagtcttcaaaagagattcaagttcagcatgatagcaaagcaactgcaacactagagaccgggactgagttttcaaaagatgctcgtgccttccgtgaaagagc

SEQ ID NO: 97451 - DNA, 1154 bp, Glycine max
  unsure (1)..(1154): unsure at all n locations
  Clone ID: PAT_MRT3847_59011C.1
cttgtttggtgtgagacttagagtaattgagttggtcctcttccactatntgagttgttttctttctcagtgccattccgtcactctcttcattaataaattctactatatatatgaagaaaggggccactgctgctgattgagtgtcctccttggttttgcttcaattatggctttctcttctttcttttcccattctccattggcattgaagattgatcgcttggggcagactataaaaccttgtggtacagttgagaaggggcaaaagttttctttccctatcagaagtaatggtggtgagcttgaactttgttaccagagtcaacttaatcagagaagtagagtcaacctaatcagagattggagtttcataggaggatcaagaattgttgttaaaccaaatttcgtgagattggttccttttcgaaaagccagtcgtgtctatgcttcatggttgtcaggatcacaacttgctagcagcgcctttacactgggaacaacagcagtgctaccattttacacactcatggttctagctccaaattctgagctaactaggaagtctatggaaagtagtgtaccatatgtagtgcttggcattctatatgcatatttgttgtaccactcttggacccctgagacagttggacttatttttgcaagtaaatacttgctaccagagctgactagtatagggaaaatgttctccagtgagatgactttagcatcagcttggattcaccttttggttatggatctctttgctgcaaggcatgtttttcttgatggattagagaatcagatagagactcggcattcagtttctctgtgcttgttcttttgccctattggggttcttagtcatgccatcaccaaagaaatgactaaaagtgccagaaaaaacaagcacagcttatagagggcacctacttgctttcccacataaccaaaaaagaaatttaattgaagtttaagagtttcagaaattcatgttcaagtttttaaattaagttacttgtaattttgtttggaattgttttcccctcaatcaaaatactattagtattttgttccatctcaagtgtataaattattttgacttgatgttcattacatttttacttcaattgcaaagaaagctttccattttc

SEQ ID NO: 97452 - DNA, 556 bp, Glycine max
  unsure (1)..(556): unsure at all n locations
  Clone ID: PAT_MRT3847_59012C.1
ccccacaccagataagagcactcatccctgaagacatccatccaattcgagatgctcactgcagcatcaacccggcagacgacagtggcgatggccaatggccgtcgtcaggttgcttcagttccatggcctggtggaggcagcggccatcgatatcgggccatccacttacctacgagtgttcggccacctgaacaagtatcatcacacatactacaagcagctcagaagtacttttctgcaccacgccgaattatatctaggttcatcgaacaccttactgcacctggatggggacaggttccttcacggacgatgtctaaagaactctatcactatcacggttcggccagacaaggtctctcactacctgctcgagttgcaatctcttcttcaaaggcgacggcagttcgtccgtctggcttgttcttccccaaggttccccagatgaacgcgatgaaaacgacatcgacgactnttgttggtctcggaaccgctcgtaatttctgcgcccgtgcgcgacctgtattccagcattgggcgggcgtagtggaga

SEQ ID NO: 97453 - DNA, 1848 bp, Glycine max
  Clone ID: PAT_MRT3847_59013C.1
cgacgtctggggggcggggtgaccaaagtcttcgtcgggcctccgctccggccgctatttactactgggggatttaagaaggaattttaggtagctgaaaaaaaatagaatttcaaattccatctatctcaagacagggaatttggaaaattctcactctcgacggaggcggatcttcgtgctctcgacgcggagcctcgctcactcactctcgaatgcgaagccggccgtcactgttaaagtgaaaatcacgacactcaagtggaagagggaggtcggcgacggctgctacttcaatcggcgccgctaccgaggtctccgtcgcggcggaaaggggcatctccgctccactacggcggctattgactactatggttaattgcattaattgtacataaatagacctctaaatcaaagttatggaagattctgatcaacctgccaaatctgctgaaaaccagcaaactgaacaagtgtgtagttttttcagaaagccggttaataaaaagaatttaaggaagcgaactattgaaattgaagataatgaggaggactcaaacaatgaaacttctctgttgcatattcagaagaaaaccttaaaggctgacaataagttgtacttttccaccggctcttcaaaaagctctgcatctgctgaaccaagtgaagaatctggaaaaacagtctttcaatttgagtcttcaaaagagattcaagttcaacatgatagcaaagcaacagcaattctagagaccgagactgagttttcaaaagatgctcgtgccatccgcgaaagagctcttaagcaagcagaggagagtctgaaagggaaaagtgcaagctctgaggataaaaaattatataagggaatgaacagttacaaagactacaaggctggctttcgtagggagcaaacaattgctagtgaaaaagctggagggtcacatggtcctcttagggcttcagctcatattagagtttcagcaaggtttgattatcagcctgacatatgtaaggattataaggaaactggttactgtggatatggtgattcatgtaagtttatgcatgatcgaggggattacaagtctgggtggcagatggagaaggaatgggaagaagctgagaaagcaaggaaaatgagattggctgcaggagaggatgcagatgaggaggagggtgctaatttgactgatgaagatgatgaggattcgctaccatttgcctgtttcatttgtagaaactcttttgtggatcctgtagtaaccaagtgcaagcactacttctgcgagcattgtgcattgaagcatcattcaaagaataagaagtgttttgtctgcaaccagccaacacttggcatttttaatgttgctcatgagatacgcaggaagatggccgaggataaatcataaaaatgtctctgtaggatacatggatctctttacttcaaggaagttatcttttctccctcattttagtttcatgtttaagtttgatgctatgtaatgagttgaaaacataccataggtctgcacagtggaattaggtctcattcgttttgttgtatttctttgacatatagatcccagaatatctaatggtgagagacatttatggatttacccatttgtatatagcatgtcagttggccatactatggttctttttgcagtagtttgttaccaaattaattttgaatacagcgacctttacttcctccagaatatctaatggtgagagacatttatgatatacccgtttgtatatagggtcatactgtggttctttttacagtagtttgttaccaaataaattttgaatagagcgacctttacttaaaaaaaaaaa

SEQ ID NO: 97454 - DNA, 376 bp, Glycine max
  Clone ID: PAT_MRT3847_59014C.1
cttaatatattttgtaaatttggggagaatggtattttaccatttcgggtaccccaaaatgaacaatacaccgcctgcgtggtcgccattatacatggcgcacctcccaacccagaaaacatcaaatctcgcggcaaaagagaaactcaagttacaatttgctcaaaaccaaccaaccaacttgagggaaaaaatacaaccttgcacgatcaaaaaggcatttttataacaagcccccgcttacaaaaggaaagttgttctgtgggtgacgaacaggagaggaggcaggaaatgctccaaatactgaaaaaacaagggagcagctgggttcataacgtaaactgatgctgttgtgggagcaaaaacttatgcagaa

SEQ ID NO: 97455 - DNA, 489 bp, Glycine max
  Clone ID: PAT_MRT3847_59015C.1
gttggctatgggttggatcatgctaatcctccttatacgcttatttacatgaagcttgtccctctactggtgaatcaattagggtcaaggacccattatgggataaatgtgagctcaggagcgatgaataaatcctttcatgactcctcattactcccgagctcacatttatttcaaaatgagtctaactggatcctaccaaatcaacttataagatgaggattatcttcacttatatattctactttgactatattactaggcgaggtaagatctccaatgcagccaagaattaaacatcttaaatgagaagtttgcatagcttacacatgtgtagaagattcgataacatgtgatactataggtccaaccattatagttacatagattgtggtactattcggtgcttgttacggtacaggtttggtacatgtacgcgaccttgaaaagatttggtgcgggggaatatgcatgtcggtacgttattta

SEQ ID NO: 97456 - DNA, 315 bp, Glycine max
  Clone ID: PAT_MRT3847_59016C.1
gtcctcgtgggttctcaaggataagatacaaataatcaccgttctttattctgggatagttgggtcaagtgtgtgctatgtgggcatgtcatggtgcgtaaagaagaggggtccggtctttactgctgcattcagccctcttgttcagataatgtcgggcatgattgatatccccttcttgcacgagcagcttcatcttggaagtgtggtgggatccatgttggtgatgatcgggttgtacattcttctgtggggcaaaagcaaggatatgatgcagaataatggcgccactaagttcgcccaagaagttgaaga

SEQ ID NO: 97457 - DNA, 102 bp, Glycine max
  Clone ID: PAT_MRT3847_59017C.1
cgcatacggtagatatctacgcacccgttgacgaggcaggagcacattaatgaccgccatgttcgaggagttcgtcatcagcgtacacccggggattcccga

SEQ ID NO: 97458 - DNA, 263 bp, Glycine max
  Clone ID: PAT_MRT3847_59018C.1
gaagcgggaaaacattcaaccagtttggcaatcacgggggccgttgaatgtcggacctggttctggaaaaacatcctaggaatttgaggcatagatatctttactcacataggatctgaggatggcgacacactgctttcttctgtaactacaaaatatcaggcgtacttgaggactgctgatgtcactggatatgttgagttgaccgtaaatgttaaaatgatacatgcctggatacaatgttactgccatgtttgaattga

SEQ ID NO: 97459 - DNA, 518 bp, Glycine max
  Clone ID: PAT_MRT3847_59019C.1
ggttatttaacacaaagatcctggtataatgttttctgatgctcttggaataattagtttttattacaatttggcttgcacttaattcctcctagatcttgttttattgaccagttgaaaatgtgttccacttcagtgtcctttaaatgcaattttattactgttataaaacatgtctgcaaacttcctgatcccaattgacattttggcagaattagatttgatattgtcatattgataatgagatggaagaggagcaaaattgttggacatgattcccaccttatggcactgattgtttttctcttcttttttctttctcagggtatttgaaaagtcactgcagtatgtgaagcgcttcagccgctataaaaatcccgatgctgttagacaagttcgagagtatcctcctaaactaaattgaataacccggttgtcatttctctttggccatacatttactttcgggtaaataatggtgaattttgatgtaaaagtcctgttcttatagaaaattt

SEQ ID NO: 97460 - DNA, 332 bp, Glycine max
  Clone ID: PAT_MRT3847_5901C.1
acgacaggcgacagaagagacagatggggctagcggcagataaacgggagttgcaagcgggtaagaaggaaatgtcttggcgaatgatctgatcccaaactgataccacggtgaaccgtaccgatgccggcgcgattgcttgattgaccggactaaaatccatggctggattgcgcacgaggtagaccaacactgacattaccttcattgctagcaactgtggaagaactcagtgcatgcaagtgtagtcaccaatcggctagaagaagtctgagacatctttctacttgccagacctcgatgatgcccaattggcaaaagaagtcgaatac

SEQ ID NO: 97461 - DNA, 203 bp, Glycine max
  Clone ID: PAT_MRT3847_59020C.1
ctcaggatctctggaatctatgcgcaagactgtacacagatggaccggtgaattacaggaacctagcgacgacatggggttgatggctacacatgcatgagatccgcattatctatgctcagcattcacacgtttaccggatgcggatcatatggaacacagaatggctggattgaagacgatttgctcacacaagggacgaa

SEQ ID NO: 97462 - DNA, 744 bp, Glycine max
  Clone ID: PAT_MRT3847_59021C.1
cggatccgggcggagagtgcaatacttatagtctccctgtcctgaaacgcagagcattcaacatctcgcaaaactattcaaaaccagacacacacacaaacaaacgctgaatctctcgtcgttctttttatttgcggtttcttcttcttctcacgttctacctaacattttctaaaacatgtctggggaagaggaagaaaacgccgcagagctcaaaattggagacgagtttttgaaggcaaagtgcttaatgaactgtgaagtttcattgattcttgagcacaagtatgagcagcttcaacagacatccgatgatcccatgaatcaagtttctcaggtatttgaaaagtcactgcagtatgtgaagcgtttcagccgctataaaaatcctgatgctgttagacaagttcgagaaattctcgcaagatatcaattggctgagtttgagttgtgtgtccttggaaacctttgcccggaaactgtggaggaagctattgccatggttccatctatcaagtcaagaggacgggctcaggatgatgaagccatcgagaaaatgttaaatgacctgtcattgattaagaaatttgaataaatacgcagagtgtgtgatatagtgttgttggtaccgtataacatatcacttgactgcaagcatacattcatgtggtttgtattacagaaaacccttggtaattatatttagtagtttattttgtgacagttagccataaggattttgac

SEQ ID NO: 97463 - DNA, 760 bp, Glycine max
  unsure (1)..(760): unsure at all n locations
  Clone ID: PAT_MRT3847_59022C.1
ccacgcgtccgcccacgcgtccgtacggctgcngagagacgacagaagggggagagcagatagatactcgagcgcaacgagaagacggagaactgcgtagcgacccatcagagaagatcgcgatcttctgaaacatgtctggggaagaggaagaaaacgccgcagagctcaaaattggagacgagtttttgaaggcaaagtgcttaatgaactgtgaagttgcattgattcttgagcacaagtatgagcagcttcaacagacatccgatgatcccatgaatcaagtttctcaggtatttgaaaagtcactgcagtatgtgaagcgcttcagccgctataaaaatcccgatgctgttagacaagttcgagaaattctcgccagatatgaattggctgagtttgagttgtgtgtccttggcaacctttgcccagaaactgtggaggaagctattgctatggttccatctatcaagtcaagaggacgggctcaggatgatgaagcaatcgagaaaatgttaaatgacctgtcgttgattaagaaatttgaataaatacgtcaaagtgtgtgatataactgacatatcacttaactgcaagcaaacattcttgtggtttgtattacaaaaacgcttggtaattatatttagttcattttgtgactgttatcgagtaggattttgacacatgcgaactggtgtatgaaagtgcttttgacctgttatgatgattatgcgaatgtgattattgtcttactataacc

SEQ ID NO: 97464 - DNA, 134 bp, Glycine max
  Clone ID: PAT_MRT3847_59023C.1
ctctttagagcatcaatcaataataatagtccaaaatcctcatttctctatcattcaatttttacccacacagagtttcttaccagtggtggaagaatattacacaattctttcctatcaagaaaaaccctaaa

SEQ ID NO: 97465 - DNA, 453 bp, Glycine max
  Clone ID: PAT_MRT3847_59024C.1
acgaggaaggaatatcttatatatgtatgtttttttttttaatttcaatttttttgagtgatacatttgggttgggatatggcttagatactttaaataggactaaaactacataaacactatcttttcctctgtatccttaaagctatactaaatagtaagcaattttatagctcgagagtgattagtagaggaagagggtcactcttctggttaatcaccatgaaaaacattgattatttgtcattaagccctctgacaaccctcagaggtgcaaatccctttatatcctaatccaaatcctaattaaagacatttattagccttgtaaatcactgagacacaagtaaacattcaaaacgacattgctacagagcatatgcaatcaagtttgtcaaatccaacagtctactcaaactcattgagtttctgtcataagagtattcctgatat

SEQ ID NO: 97466 - DNA, 1195 bp, Glycine max
  unsure (1)..(1195): unsure at all n locations
  Clone ID: PAT_MRT3847_59025C.1
cgtgtttttaacacaaagatcctggtctaatgttttctgatgctctaggaataattagttgttattacaattgaggctagcacttaattcctcctagatcttgttttattgaccagttgaaaatgtgttccacttcagtgtcctttaaatgcaattttcttcctctttataaaacatagtctgcaaacttcnctgatcccatttgacattttaggcagacttagatttgatattgtcatattgataatgagatggaagaaggagcaaattggtggacatgattcccaccttatggcactgattagttttctattctcgtttcttgtccgggagaacgcaataaaacctgtcctcctccaacgcagcattttaaaaccagacactaaacacacaaacgctgaatctctcgttcgattcttggcattccacttctcgccctcgtcgttctttttgcgttttgtttttcttcttcttcatcttcttcctcatcttctcaaatattacctaagatgttgtggaacatgtccggggaagaggaagaaaacgccgcagagctcaaaattggagacgagtttttgaaggcaaagtgcttaatgaactgtgaagtttcattgattcttgagcacaagtatgagcagcttcaacagacatcagatgatcccatgaatcaaatttctcaggtatttgaaaagtcactgcagtatgtgaaaccgtttcagtcgctataaaaatcctgatgctgtcagacaagttcgagaaattctcgcaagatatcaattggctgagtttgagttgtgtgtccttggcaacctttgcccagaaactgtggaggaagctattgctatggttccatctatcaagtcaagaggacgagctcaggatgatgaagcaatcgagaaaatgttaaatgacctgtcgttgattaagaaatttgaataaatacgtcaaaatttgtgatgtaatgttggtaccgtataacaacatatcacgtgactgcaagcaaacattcttgtggtttgtattacagaaacccatggtaattatatttagtttattttgtgactgttattaataaggattttgacacatggtgctggtgtatgaaagtgcctttaacctgttatgataattatgcgaatgttgtgattattgtcttgctacaaaggaaaaactttgctcacactcaagacaacac

SEQ ID NO: 97467 - DNA, 726 bp, Glycine max
  Clone ID: PAT_MRT3847_59026C.1
cttttatatagtagcccccccctccgcacgcataaatcccccttaccttgttctcattttctgaataataattcaattactcctaaattaaacaagatttcaattctagttcgttcatagggatttcccaatccctattccatggacgtcgaaaacgaggaagctccactccaacaacactctgattcgcaatgccacaccgacctgccaaatctcccctacgccgccgccggacaccttgaagaggccgtggcggtgtccgacgagggcgccgaaacgctagtgactgacgtagcgggtgacgagatgattgaggagaaggggagtgaaggaattgatgtggatgacgtggctttggagacggtgaaggtggaagaggaaccgaatttggcaattgatgcggaagacgacgaaattggggacggaaacacaaacgaagacgctttgatggaagaagagcaacatcaacaaggagaggaggaggaggaggaagagcagcaacaaggagagggggaggaagaagaagacaacaagtagacgaggaggaagaaggagaacagcaacaagtagatgaggaggaagaaggaggacagcaacaaggagacgaggaggaagaaagaggacagcaacaaggagacgaggaagaagaagaagagcgacaaggagaagaagaagatggtgatggtggaatggcaatggcagaagaacagaggaaaagagtgctgc

SEQ ID NO: 97468 - DNA, 430 bp, Glycine max
  Clone ID: PAT_MRT3847_59027C.1
aaaaaaccccctccagaaatttaataagggccctaaaaaaaaaataaagtaaccaagccccacaaaaatttttgcctccaaacaaaaaaaaaaaacccccaagggggtggaataaagaaaatttggggccccctgggacatttgggacctatgggggatgggggccctcccacccaggagtaacaagttttaaagggggcaaaaaaaacaattttttggggaaaaatttttcccagggggggaaacggaaaattaaggattcgggggggggaaaaaaaaacccttttgggccaccccctttttgcccctttgtattaaccccatagggcccaagcggagggggggaatcccccccaacaaaaaaaaaaccaggggggtccaaagaatttacaaattgggggccccctccaccaaaggggcgggttaaaaa

SEQ ID NO: 97469 - DNA, 596 bp, Glycine max
  Clone ID: PAT_MRT3847_59028C.1
gaataataattcaattactcctaaattaaacaagatttcaattctagttcgttcatagggatttcccaatccctattccatggacgtcgaaaacgaggaagctccactccaacaacactctgattcacaatgccacaccgacctgccaaatctcccctacgcctctgccgttgaccttgaagaggcggcggcaacgacgacggaggctgtggcggttgaacccgatgcgctggcggtgtccgacgatggcgccgaaacgcaagtgacggacgtagcgggtgacgagatgattgaggagaaggcgaacgaaggaattgatgtggatgacgtggctttggagacggatatggtggaagaggaaccgaatttggcaattgatgccgaagacgacgaaattgaggacaggaacacaaatgaagacgctttgatggaagacgaacaacaacaagaaggagaggacgtagagcaagaaggagagggggaggaagaagaacaacaacaagtagatgaggaggaagaaggagaacagcaacaagaagatgaggaagaagaaggagaagaagaagaagcagcagcagcagcagcagcagaagaag

SEQ ID NO: 97470 - DNA, 156 bp, Glycine max
  unsure (1)..(156): unsure at all n locations
  Clone ID: PAT_MRT3847_59029C.1
gtcaagttcttgcnatcaangngatttttgagaagaacccacaccaagcttaagaactcacgggntatggtngcggtatcagagtaggnctggntaccacaacatgtncncggngtancgcgataccactctaaaacggttcagttgaggcaatgt

SEQ ID NO: 97471 - DNA, 937 bp, Glycine max
  Clone ID: PAT_MRT3847_5902C.1
tcgaaactttttagaaaaataacatataaaacacacaacggaactttggaaccatgtgaacacacccaccctttattttcgcattcgaagttgcgctagcacattcgttgtggaattcgaagaccacacccccttttctttcctttacctgttattgacacgtatttgaaagtctgctgctatgtgtggaatttttatcttcctaggagcttataaataagccagggaaagccactaagatattcccatcttcatttcttcatttatttatattgcgtgcttttatagtcagaacttcaattatattcagcaacaaataacataccatacaagaacgacaaactgaagtgtgtgtagctctatgggattatcactttccttactccaatctgcgtgggaagaaattgttagacattttcccttttctgatttgcctctcagcatcagctttgcttccaaagatggaactttgattttaagggcatcaagcttcaagagaagagaatcagaaagtgctattactgttttgtcaaacgggtccagaagttcgaaccggttgagggataacagaccccaacatgtgatccttgaaagaaacttttcgtttgttcaagatgaggagaacaacaaaatgggttgggatactcttgcaagcaaaggtggtgaattgaaacataaaccagtgcctgtgctttctctgcctcaagcagcgattttctctcactctagacctgcctctgagcttgatgctgcagcaacaaagcttcaaaaagtttacaagagttaccgtactcgaagaaaccttgcagattgtgcagaggttgtggaagagctatggtggaaggcattagactttgcagctctcaaacggagttctgtgtcattctttgatgttgaagaaccagaaaccgccgcgttacggtgggcaagggctagg

SEQ ID NO: 97472 - DNA, 566 bp, Glycine max
  Clone ID: PAT_MRT3847_59030C.1
gatgtagatgaatttaacattgtattatggtttttgcgtgcgagcttattggtgtcgtatattgatcttaataggtaattctagaagggatttggttgtctataattctcggacagaccaaaattagcatttagtaaacccaaacccagaatctgaaagtctttctatcaatttagttactagtttggagtgagaagagattatattaccaagggttttataataatcaacattctaagtatttgtcaaattggcaactatgtaggcaaatgtttgtgcaatccaaaaattttagaaattctgtgtacatttggtttaggaatactggagaaatggttttattacatttttactttcttatggcattgatttatgcttatctctgttttaatttgtaattattttgtttttttttaaatagtttcaacatcattcatttactaagttatacaagggagccatgatagaaaagcataatttcctttcaacaatgactactaacaacactaccaaggaaaggagtgaacaagaacaagcgtcccttctgtcgtcttctcgcagccgta

SEQ ID NO: 97473 - DNA, 277 bp, Glycine max
  Clone ID: PAT_MRT3847_59031C.1
cacgggacatttcgttgggtatatttattatgattacagtttacaatataataacgatacgtacatcattgaattacaacaaacacaaaaaacaatagcaaattctaccccccatgttaagactcttgtgccaaaatattggaaacgagaactcatctgtggtgtgcaaactccccagtgagtgagaaaagactagtcgatttctccttgtgaacaattaataagcccgcaaccatgattagaggaaccccgccataaaagaaacgcccacagattg

SEQ ID NO: 97474 - DNA, 468 bp, Glycine max
  Clone ID: PAT_MRT3847_59032C.1
gaggggggtgggagtgttaaatgcaaggatttgactgtgtgtctgtgtctaatgatgaccaaaaacaaacagtattttggcaacaacactaatcagtaatattgattagggttgtaattttaagcaaaaatctgaagtataatttgtgatattaagtcatgaaaactgaatacttgttctcttcatgcagggctaaatttttatttgctcacctaaattcataagtgtagaagcaaagcttccaagattattttgaagatgccaaagattattaaagatccattcaaacaagattaaagaatcaagaagattcaagtgaagactcaagatatgcaagaaccacaagaaaagaatcaaggtaagttaaaaagaatttttcaaagaaaaaattgaacaacacaaaattgtccaagagaatttttcaagaaatatcctttaccaaagtttttacccaaaacattttataac

SEQ ID NO: 97475 - DNA, 332 bp, Glycine max
  Clone ID: PAT_MRT3847_59033C.1
atccccaggaagcttgaatttaactatgtaataatgcattgaattagacatttaatgtattttagcccttaacatgtgttcattctacatttgtgatgaatattattgtagaatgaacacatgttaaaggccaaaatactattcatcacaaatgtagattttaagagtaggtaagtaattatatgtactaagaaaggaaaagtgtccaagcacttggaattcatagtcctacttacaaaatgccatcagtaagtttcactggtttactcccaagggtggtatcaaaatcttagaatagagtagaatagaccaatcgaattcacttttaaagt

SEQ ID NO: 97476 - DNA, 406 bp, Glycine max
  Clone ID: PAT_MRT3847_59034C.1
tttcgaaaaaaaatccgctgccttcggcctggatcacatcactttatacaaaaaatacattaggccccccattgttaaatgggcgcacaacacatacatgagaaatctagaatcaatgcactcgttgcttacaggcctaataagtcacctagtcaattgtcaaaaaactgccttattaagaatggacctgttcctattcatcgaatttattctcttgcctctcacattatacccccactcaaaacgtcgtctccctttggaaacattggagaacattctccatcagccatgacttcgctgcttaaggaggttcctgctgacctatggaaaaatgcccccatggttaatgtcagcaggttccacctcgcagtcccaatcaaactgtccaggtgaaataccatgcggc

SEQ ID NO: 97477 - DNA, 416 bp, Glycine max
  Clone ID: PAT_MRT3847_59035C.1
attcaacagccgaaaccctcgtcgccggaaccctagacgccggaatctccgccagagccgccaccggagcctttgtcgcaaaaatcttattagtcgagagtaatgggagcaaaggaggtggagcgggtggacggccggacaccaaaccagctgcggccactcgcctgctcacggaacttactcaaccgcgcccacggctctgcgcaatggtcacaagggaatacgattgtattggctgctgtttatggaccaaaagctggaacaagaaagggtgagaaccctgagaaagcctctattgaggttatttggaaaccaaaatccggacagattggaaaaccggaaaaggagtatgagatgatcctcaagagaactctgcaaagtatctgtctattaactattcacccaaatacaacgac

SEQ ID NO: 97478 - DNA, 558 bp, Glycine max
  Clone ID: PAT_MRT3847_59036C.1
cagtgagcctttgttgttagttagttagattttgttactgctagtgtaaaggttcagaggtctatatatacctctcattgtaaccaactcagattaacttttcagtctagtaataatatcagtcttttctctcaactttctcatcttctcaaacactttatcactcagttttatcaaatactcagcagctaacagagttataactgtacaagcagaactgtaggttactctattaattgacttcatatcatagcctctatgactaagtggtcaagagttatacctttacagctcctacttttctagaatctagatataagttaaatttcaatacaaggaaggcagggttgtgccttgttcacacttcaaggcccaaagaagaacaattgtttgagaaggcctattagatataaaaagcattcacgaggcctttgccaaagtgggtaagctttcgggatagttggtcattgacaaagactataaaattagaaagaaaaaaatgaatttctcggctaaacaagcataaattgtatgcatgtgtagagcacccaacctcta

SEQ ID NO: 97479 - DNA, 389 bp, Glycine max
  Clone ID: PAT_MRT3847_59037C.1
gttcgttgctattgattgattgatcactgttgtttgagtagtgttatactctacaccatccagttgtatcaatcatgtctgtcaccatccgtactcgcaaagtcctcaccaacagactcctcaaccgcaaacagatgatcatcgatgttctccatccaaatcgtgccaacgtctcaaagaaggaattgaccgatttgattgcttaagagttccaggctaaggactcaaaggctgtcttcgtcttcggtatgcgcactgctttcggtggtcaaaagtcaactggttttgctctcatctatgattcattggaggatgctcttgattcagaaccaaagtaccgattggtgcgacctggttagaaggtccaaaaggatgtctcacgtaagcaa

SEQ ID NO: 97480 - DNA, 407 bp, Glycine max
  unsure (1)..(407): unsure at all n locations
  Clone ID: PAT_MRT3847_59038C.1
attattctcatattcattcggagattatgggttgcactcacaaaggtaatcagnagcacacctgncgtgcgaggagccataatgttgggttgttgacattggatataggacaaaatgccattctcatgaatactggtgcgcgagcaatgtgcatggcatggtcttacattgatcattttgtggacggtttgaagcgcactggtttgcgtacttacggttgggtagctccaccgttcaaaggatccttgaaccttatgtctctgatcataggaactggttcggttttgggtttggctcctgctacttgaatacactttccttatatttgttgtcactgttgagaattattttaaggagggtttttctctatttattttttcgtggaggtatacttttatcgatctttt

SEQ ID NO: 97481 - DNA, 1177 bp, Glycine max
  Clone ID: PAT_MRT3847_59039C.1
taaatctgaatcgctgaagaggttactgctgctgccaaagaaaaccaattgcctgaacatcctcaaagcagtctaacatctgatgatccaagtaaagaatctgtggcacaatctgatgggattattggaatacaaagcactgagacagacaatgccccaagactggaagagggacatcatacatccacatctacacagaccagtgcagttccagatgaaaatgggatgaaaaatattcaacctgagcaactggaaatacaagaaacagagagaagagagagtgcattaggcaaagatatagagcaactacctaccctccttgaggagtatcagttaaggaataaatctgaaaaaagccctgcaacttatatatctagtcatggctttactgagaatagccattttcctgaaggaaaagaggaaaagtatgaaaagaagttgaaagatgctgctgccagagaacttatgcttgctgaggaggctgcaatgttggatagggagctaaagagagagagagcaaaagcatcgcgtcctatcaattcacttcaagaaaagatggaagagaaactgaagacagaactagaacaaaaggagattgaaactgatttgaagtttaaacaagctcaggaattagcaaaggcagagttaaatgcagccatagcaaatgagaaggcagctcaaattgaaaaaatggctgaagcaaatgttaatataaatgccttatgcatggcattttatgctcgatctgaagaagctcgtcaaagtcatgctacacaaaattttgctttgagagcacttgcattggaagatgcactatctaaaggacttccaattgagacagaaatagcatctttgcagtcttatcttggaagcacagataaagattcagttttggatttggtgctagcatcccttcctgaagaaacacgaagcaacggcacagacacacaactgcagttaaagcagaagtttgatgccttaaaaggtagtgtaagacacttcagcttcttcccaccgggagggggagggatgttggcacattctttggcacatgtagcatcctggttgaaggttaaggaagacaatcaatctggtgatgggatcgaatctgtgatcaataaaggttgaagtttatttggcagaagggaaacttgctgaagcagcagcttgtctagaa

SEQ ID NO: 97482 - DNA, 445 bp, Glycine max
  Clone ID: PAT_MRT3847_5903C.1
gacatataaaaattagaatggtgattcctaaaagagaaaatcatacttacgtacagggggagacacgatggggatgaacttgaaaagagcacaatgctatgcataagaactgtgacaacaccctattaaatgtgagacaactagataacatccaataccaaaacttaagggtacctaggaaaagggtgcgcacataagtgtggacgttgattcgtgaatgaaaggtgcatgggaagggaagaaaaccacacaccacacaccatacattatcattaaatagggcttctggagggaattgctgtaaaaggaagggctgctccagtggaaggaaggagcgaagtgtacgggatctggtttggtccataacagtgcctaacgcggggactcggggttccccctggcaggttcatctcaaattgcttgggcttggttccaaacttcttaa

SEQ ID NO: 97483 - DNA, 2276 bp, Glycine max
  Clone ID: PAT_MRT3847_59040C.1
aaatgttgtgtgaattcaagcgtccggcgaaattaaagtcgtaaccgtagttgttgtatcagtatcaggggtttgggaaatacatctttccctccgcactcccactggatcctcactctcaatctcaacacaccctcttcccactgccatgttccgcaggtccattttgctaatatcatctcgcccaactcttagaaggaatcccagacgttttgtataccagcatacctttacatctatctttacaaaagaatttctcaactgtgtcaaaaccaggggtttcctcagcttctgggtctccgggcaagccacctgagtctaatggcactctatcaaagtttttcattggaagtgtagctttaggtgctgcttttctggcagcttatcagactcattatttggatcaatatcttaagaaggagcattatagtgttctgcaggaacctcatgtcaatgcaactattgaagacttgaagagtgtacaacattcaacggaccagttaatttcacctagtgagaaatttaaccacaaaaatcccactgtagagattacagagcagaagattgatgcccatttttcacatccagaaattgtagtagaagaccaagtggataaaccaattcctgtgcaagacaaatctgatattgctgaagatgttactgccgctgccaaagaaaaccaattgcctgaatatcctgaaagcagtctaacatccgatgatccaagtaaagaatctgtgacacagtctgatgggattattggtatacaaagcactgagacagtcaatgcaagaatggaagagggatatcatcatgcatccacatctacacagaccagtccagatgaaaatgggatgaaaaatattcaaccagagcaactggaaatacaagaaatggggagaagagagagtgcattaggcaaagatatagagcaacaacctaccctcctagaggagtatcacttgaggaataaatcagaaagaagccctgcaacttatatatctagtcatgactttactgagaatagccattttcctgaaggaaaagaggcacttaatggtgctatggaggagttaaaagatggttacatttctgagaatgggaaactggttcttgatttcttgcaagccatccatgctgcagagaaaaggcaggctgacttagatgcacatgcttttaacgaagagaagaaagtgttaaaggaaaaatatgaaaagaagttgaaagatgcagctgccagagaacttatgctcgctgaggaggctgcaatgttggacagggagctaaaaagagagagagcaaaagcatcccttgctatcaagtcacttcaagaaaagatggaagagaaactgaagacagaactagaacaaaaggagattgaaactgatttgaagtttaaacaaactcaggaattagcaaaggcagagttaaatgcagccatagcaaatgagaaggcagctcaaattgaaaaaatggctgaagcaaatgttaatagagcacttgcattggaagatgcactatctaaaggacttccaattgagacagaaatagcatctttgcagtcttatcttggaagcacagataaagattcaattttggatttggtgctagcatcccttcccgaagaaacacgaagcaacggcacagacacacaactgcagttaaagcagaagtttgatgccttaaaaggtagtgtaagacacttcagcttcttcccaccaggagggggaggtatgttggcacattctttggcacatctagcatcctggttgaaggttagggaagacgatcaatcaggtgatgggatcgaatctgtgatcaataaagttgaagtttatttggcagaaggaaaacttgctgaagcagcagattgtctagaagaaagtgtgagaggcacacaagctgcagaaattgttgcaggttgggtgagacaagcaagaaacagggctatttctgagcaagctgtgctgcttcttcaatcctatgccaattcccttagccttacatgattctcaaattttgaatatttacaaaatcatgttgattcaatacaaaaggttgcagagattatctttggcagattatgccaacgggaattgttgacctacgaggaaaataattaacgtttttgtttcatagcagcggaaattagtagattctgtgatttctatgcaactccaatggctttggagttttgactgaagtgatatcaggctctgtataattttgtcttttgttttacctgaataacagaaatgttgcattgcaagatattg

SEQ ID NO: 97484 - DNA, 2309 bp, Glycine max
  Clone ID: PAT_MRT3847_59041C.1
atgcttaggacaaatagtgcaacatccttgattctcgaatatttgaagcagggagagttgtatcccagtggagatctttcactctcaatctcaacttccacaacacaccttcttcccattgccatgttccgcaggtcgattttgcaaatatcatctcgcccaactcttaaaagaaaccccagacgttttgtataccagcagatacctttacatctatcttcacaaaagaatttctcaactgtgtcgaaaccagggggtgcctcagcttctgggtctccgggcaagccacctgagtctaatggcaccctatccaagtttttcattggaagtgtagctttaggtgctgcttttctggcagcttatcaaactcattatttggatcaatatcttaagaaggagcattatagtgttctgcaggaacctcatgtcaatgcaactattgaagacttgaagagtgtacaacattcaacggaccagttaatttcacctagtgagaaatttaaccacaaaaatcccactgtagagattacagagcagaagattgatgcccatttttcacatccagaaattgtagtagaagaccaagtggataaatcaaatcctgtgcaagacaaatctgatattgctgaagatgttactgccgctgccaaagaaaaccaattgcctgaatatcctgaaagcagtctaacatccgatgattcaagtaaagaatctgtgacacagtctgatgcgattattgttgtacaacgcgcagagagggtcaatggaagaatggatgatgaataacatgatgtgttcctatctcaatccaatgccattgatgttaatttgacaaaagacacacattctgaacaattagaaaaacaagaagaatgtatgagagggacgagattagctgaagctgttgaacattacgggagtcatgcacctaagaggaatattactaaccaatctgtgccactgcttcaaacctatgtcgattctcttaactttatccagattctctaattttgaagatttaaaaaatcatgtagatgcaatagaaaaggtttcagagatgatttttctgagaatatggaaactggaattgttgacttatgagaaaactaataaacgttattgtttaagagcagcggaaaatagtaaaatctgtgaaatgaatgcaactccaatggctttggagttttgactgaagtgatatcaggctctgctgccagagaacttatgctcgctgaggaggctgcaatgttggacagggagctaaaaagagagagagcaaaagcatcccttgctatcaagtcacttcaagaaaagatggaagagaaactgaagacagaactagaacaaaaggagattgaaactgatttgaagtttaaacaaactcaggaattagcaaaggcagagttaaatgcagccatagcaaatgagaaggcagctcaaattgaaaaaatggctgaagcaaatgttaatataaatgccttatgcatggcattttatgctcgatctgaagaagctcgtcaaagtcatgctacacaaaattttgctttgagagcacttgcattggaagatgcactatctaaaggacttccaattgagacagaaatagcatctttgcagtcttatcttggaagcacagataaagattcagttttggatttgatttgatgccttaaaaggtagtgtaagacacttcagcttcttcccaccgggagggggaggtatgttggcacattctttggcacatgtagcatcctggttgaaggttagggaagacaatcaatctggtgatgggatcgaatctgtgatcaataaagttgaagtttatttggcagaaggaaaacttgctgaagcagcagcttgtctagaagaaagtgtgagaggcacacaagctgcagaaattgttgcaggttgggtgaggcaagcaagaaacagggctatttctgagcaagcagtgctgcttcttcaatcctatgccaattcccttagccttacatgattctcaaattttgaatatttacaaaatcatgttgattcaatacaaaaggttgcagagattatctttggcagattatgccaacgggaattgttgacctacgaggaaaataattaacgtttttgtttcatagcagcggaaattagtagattctgtgatttctatgcaactccaatggctttggagttttgactgaagtgatatcaggctctgtataattttgtcttttgttttacctgaataacagaaatgttgcattgcaagatattgaaatttcaaaaatatacctcaggcgaccaggacaaggttgggcgtc

SEQ ID NO: 97485 - DNA, 152 bp, Glycine max
  unsure (1)..(152): unsure at all n locations
  Clone ID: PAT_MRT3847_59042C.1
gctaggnagactngatttccagtctgagccatggcctagcatttcngacagtgtccaaagatctnattcganaaatgcttgctcggaatccaaanccaagggttacagctcaccaagtactctgttcaancttggattgttgctgacaanat

SEQ ID NO: 97486 - DNA, 388 bp, Glycine max
  Clone ID: PAT_MRT3847_59043C.1
gttagagagagagagaaacaagtcagcacccgggtgtagcctctcttctattcttagatcgccgataccctttttgctttctcaaccgagagagatagacagaatctttcgtagttcggtcgcgtgtgttgagttgacagtcaccaatggcatcaccatctgctaggacacgttcccattacgattacctgatcaagcttctatcttataggcgatagacagtgtgtgaacgagctgactgcttatgcgatgtcctgaggggtccttcacaaccggatgttatcaccaccattggcattgagattacgatgacatccattgaacttgatggcaaacgcataaagctacaaatctgtgatacagcttgccatgaaccgatttctactat

SEQ ID NO: 97487 - DNA, 1151 bp, Glycine max
  Clone ID: PAT_MRT3847_59044C.1
cggctgcgagaagacgacagaaggggctacatatatatattatagagattttatacattctaaattttgtgagtgtggacatactctgagcgtgagaaagagaaggggaagaaagagagagagtgatgggaaggggaagagtggagttgaagagaattgagaacaagatcaacaggcaagtgacctttgcaaaacgaaggaacgggcttttgaagaaagcttatgagctttccgttctttgtgatgccgaggttgctctcatcatcttctccaatagaggaaagcagtacgagttttgcagcggttcaagcatgctcaaaacgctggagaggtaccagaaatgcaactatggagcgcctgaggacaatgtggcaacaaaggaagccttggagttaagcagtcaacaagaatacttgaggctgaaagcacgttatgaagctctacaacgttctcaaaggaaccttatgggagaagatcttggccctctaagcagcaaagagcttgaatcacttgaaaggcagctagattcgtctttgaagcaaatcagatcaataaggacccaattcatgctggatcagctttcctgatctacaacgtaaggaacactttctaggtgagtcaaacagagatctcagacaaaggttggaagagtttcaaataaatccactccaactgaatcccagtgctgaagatatgagggtatggacgccatacagatatcatcctgatccagtatcagtggtgacagaaggcccaagcatgaataattacatggcaggatggttaccatgaaagagtgtcaaatgtggagcataattaaagatcctgccgtttaatttcaaatttatttgaagttaaggaaaacggaaatttgtaatagcacgtaatggacttacactagactctaccttctaattaagctaggaacaatataagcagtgattttgtgtgtgagctttcataaacagtacctagctagcctcttccttgttccaataatcacttcttccttttcctaattaataaaactatcgtatgcaccctttgccaccctttgccttttaaaaaaaaaaaaataaaaaaaaaaaaaaaaaaaaaataaaaaaaaaaaaaaaaaaaaaaaaaaaaaaaaagtaaaaaaaaaaaaaaaa

SEQ ID NO: 97488 - DNA, 666 bp, Glycine max
  unsure (1)..(666): unsure at all n locations
  Clone ID: PAT_MRT3847_59045C.1
ctttgtttttttttttttttttttttttttttttttgggttttttttttttttttttttttttttttttttttttttttttttttttttttttttttttttttttttttttttttttttgggaaaaaaaaatttttttttttttttttaaaccaaaaaggaatgccgggaataaaatttgttggggtggaaagctttttaaaaagggggaaaaaaaaaatttttattttatggaagggggtttttacaaaaaaaaatccaaaatttttttttaaaaaaaaaaaaaataaattatttgaactaaaaaaaaatttaaaaaaaacccatttttggttaaaaaatttatttttttttaaaaacaaggggggggaaaaatatgcacgtttttggagcccattttaaatttaaagggccgggtttttttaaaaagtcacttccaaaaagaaaagttttttttccaaaaaaaaaaaaaaaaggttttttaaaattttaaggtaaaaaaaaaattttttttttaacggggcccaatttggggaatttaaaattggggtgggggcgggttttncttttaattttttaaaaaaagggtgggaaccaaccctttcttttcataaaaaagttgttaaaaaaaatttggccttagcgtttaaaaccggttttttttttt

SEQ ID NO: 97489 - DNA, 383 bp, Glycine max
  Clone ID: PAT_MRT3847_59046C.1
aaacgctggagaggtaccagaaatgcaactatggagcgcctgaggacaatgtggcaacaaaggaagccttggagttaagcagtcaacaagaatacttgaggctgaaagcacgttatgaagctctacaacgttctcaaaggaaccttatgggagaagatcttggccctctaagcagcaaagagcttgaatcacttgaaaggcagctagattcgtctttgaagcaaatcagatcaataaggacccaattcatgctggatcagctttctgatctacaacgtaaggtatgaggtcaattatcctttttctttaattaatttgtcaatgtttaactgctattcttcttcttccgcatatttcccttgctcaccggttcaattatgcat

SEQ ID NO: 97490 - DNA, 610 bp, Glycine max
  Clone ID: PAT_MRT3847_59047C.1
ctcgagccgaatcggctcgagaatcgtgtttctcactaccagaaaccctaagcctcaatccaaaccccactctcttctttttcacttaggttttctccactctctccgaccacttccactgcctcaaccctcgtcgactccctcaacaactctaagggcctccgatccttcctcacgtgcccctctccacacactccctctcacgcgtcgtcgtcgaaatcgggtacgaaatccaagcctggatcgaccgcgaaactctccaccgcctctctgcctcgctacgaaatcctaacattaataacaatgatttggtcgcgctgctgactcagtttcatgaccgagtctcgcagggcttcaatcgtgagttgcaggacctggttctcaaattaaagctcttctccttgctggaatcagttctttttgactcaaaatgtccgaaccgggttcgcgaataggctggtctggtagtggcggcgttaatccgattcaataaagaagtgttcgtgagagaaagccttttgcgagctgcgtggcagggtttgtgttgcagttggaagttggtggaaggtttcggcaaagggagaagagggcttttaaaccccagattttg

SEQ ID NO: 97491 - DNA, 1244 bp, Glycine max
  Clone ID: PAT_MRT3847_59048C.1
accattgtgaggatgtgacaccatctgtcgtggctgcatacggctgcgagaagacgacagaaggggacgcagcgagcgagccacgaaaatattcatcacacagggttttggtttattattccaatttttggttttcccttttgttggatattagagtgtgtaagaaagagaagagagagaaatgggaaggggaagagtggagttgaagagaattgagaacaagatcaacaggcaagtgacctttgcaaaacgaaggaacgggcttttgaagaaagcttacgagctttccgttctttgtgatgccgaggttgctctcatcatcttctccaatagaggaaaactgtacgagttctgcagcagttcaagcatgctcaaaacgctagagaggtaccagaaatgtaactatggtgcgcctgaggctaatgtgtcaacacaggaagccttggagttaagcagtcaacaagagtacttgaggctgaaagcacgttatgaagctctacaacgttctcaaaggaaccttatgggagaagatcttggccctctaagcagcaaagagcttgaatcacttgaaaggcagctagattcgtctttgaagcaaatcagatcaataaggacccaattcatgctggatcagctttctgatctacaacgtaaggaacactttctaggtgagtcaaacagagatctcagacaaaggttggaagagtttcaaataaatccactccaactgaatcccagtgctgaagatatggggtatggacgccatccaggtcagccccaaggccatgctctctttcaaccattggagtgtgagccaaccttgcaaattggatatcatcctgatccagtatcagtggtgacagaaggcccaagcatgaataattacatggcaggatggttaccatgaaagagtgtcaaatgtggagcataattaaagatcctgccgtttaatttcaaatttatttgaagttaaggaaaacggaaatttgtaatagcacgtaatggacttacactagactctaccttctaattaagctaggaacaatataagcagtgattttgtgtgtgagctttcataaacagtacctagctagcctcttccttgtttcaataatcacttcttccttttcctaattaataaaactatcgtatgcaccctttgcctttacattaccttgtattacctaccaatgacctcacatgtttgcttttgtcactctataaaattagtgtttaattttctc

SEQ ID NO: 97492 - DNA, 1114 bp, Glycine max
  Clone ID: PAT_MRT3847_59049C.1
ggagaagatcttggtcctttaagcagcaaagagctcgagtctcttgaaaggcagctagattcgtccttgaagcaaataagatcaaccagggtactcaagtttccaacttttcttttccaatttccatatgaaattgtagatctaggaacatattaagagcccaatcttgaaatatccctatgtctatatggtcaagcccattttgagagagttatttaagtcatgctctgagtaatgtaagaaatggaaatacaagtattggggcacattattaccattaaaattgaaagggtaaagtaactaacaaggaaattgctgttttttaatttctctattgattaatgaagagaaactcttggttacataattctaaatatagatatatcaatctcaaaatgtgtaatttctaagtacaaatgtagtatatgtatttaattttgttaagtttgtttccttaatttacagacccagttcatgttggatcagctctctgatcttcaacgtaaggtatgtatgaaaacaattttagtttcctttgccaccgtttaccatctcatgccatacctccgtttgttctccaattgatacatgtcactggtgtaggaacacttgctaagtgaggctaacaggtctctcagacaaagggtaagttagaaacttagaattcatcaacctatatatgtaaatatacatcatcccacaaagtatatagcatataattaatacattttaaaatagaattaggaatcatgcaagaccaaaacattgctataagatacaactgatattgtgatatcgaaaattgatgggtataaatgactttatctgatttgtagcagttggaagggtatcaaataaatccactccaactgaatcccggagttgaagagatgggatatggcaggcatccagctcaaactcatggtgaagccctctttcaacaaatggagtgtgagccaacgttacaaattgggtatcagcctgatccagtatcagtggtgacagcaggcccaagcatgagcaattacatggcaggatggttaccatagtttgcgtttcctgcataagatccactgcaccagcacatttgccgttccaattttatttgaaaacg

SEQ ID NO: 97493 - DNA, 229 bp, Glycine max
  Clone ID: PAT_MRT3847_5904C.1
catattaaaactcaacctaactaccattctgtccatcaatctacaaactctcatcctgattttatatttaccccacaccaatataatgcctaatttgctcttgctatttacccaactgaaccctattatctttcttaaacaaatgacataacaattctctttactactataaaaaaccatacaacaacttctgctacatactccaaaacatattctttaataataaaac

SEQ ID NO: 97494 - DNA, 344 bp, Glycine max
  Clone ID: PAT_MRT3847_59050C.1
aaaaaaaaaaaaaaaaaaaaaaaaaaaaaaaaaaaaaaaaagaaaaaaaaaaaaaaaaaaaaaaaaaaaaaaaaaaaaaaaaaaaaaaaaaaaaaaaaaaaaaaaaaaaaaaaaaaaaaaaaaaaaaaaaaaaaaaaaaataaaaaaaaaaataaaaaataatgggtcagccttgatatgaaaacctactaccctgtaaaaaaacaaacaacagttccagggtgttgaacatgattgaatataggggagatctctaaagattgtgaagaaaacagcgatagcatttttacaggtgaaaaagatgctcccgaaaaatttaaccaagattagttacctggaagatt

SEQ ID NO: 97495 - DNA, 127 bp, Glycine max
  Clone ID: PAT_MRT3847_59051C.1
attgactcttgcgaaaaacgactcaatatactgtcaaaccaatatagacattggagcgtcttgaatgttgtttctgggacattggatcggaaatgtaataagctctacgaacagacagtctggacat

SEQ ID NO: 97496 - DNA, 254 bp, Glycine max
  Clone ID: PAT_MRT3847_59052C.1
gttactaaagctggttgatctacgttcatcttaatgagttacttatcacttaaacacagaacaattaacatgtttgttgtaattgttggatggatggcttgattgaagttgggacattggtgttatagatttgtgatttagataatgaatcacttaataaatttaaaagtaaattacataatagtgttgttatgttggaaaacacaaaacaattctactttaattatgattagaaagcccaatcaatattctaa

SEQ ID NO: 97497 - DNA, 1099 bp, Glycine max
  Clone ID: PAT_MRT3847_59053C.1
gacgcagcgagcgagccacgaaaatattcatcacacagggttttggtttattattccaatttttggttttcccttttgttggatattagagtgtgtaagaaagagaagagagagaaatgggaaggggaagagtggagttgaagagaattgagaacaagatcaacaggcaagtgacctttgcaaaacgaaggaacgggcttttgaagaaagcttacgagctttccgttctttgtgatgccgaggttgctctcatcatcttctccaatagaggaaaactgtacgagttctgcagcagttcaagcatgctcaaaacgctagagaggtaccagaaatgtaactatggtgcgcctgaggctaatgtgtctacacgggaagccttggtaatggagttaagcagtcaacaggagtacttgaagctgaaggcacgttatgaggccctacaacggtcccagaggaaccttatgggagaagatcttggtcctttaagcagcaaagagctcgagtctcttgaaaggcagctagattcgtccttgaagcaaataagatcaaccaggacccagttcatgttggatcagctctctgatcttcaacgtaaggaacacttgctaagtgaggctaacaggtctctcagacaaaggttggaagggtatcaaataaatccactccaactgaatcccggagttgaagagatgggatatggcaggcatccagctcaaactcatggtgaagccctctttcaacaaatggagtgtgagccaacgttacaaattgggtatcagcctgatccagtatcagtggtgacagcaggcccaagcatgagcaattacatggcaggatggttaccatagtttgcgtttcctgcataagatccactgcaccagcacatttgccgttccaattttatttgaaaacgaaaaaaaaaccaccaaaaaagaaggaagaaaatggctttggatgtaatgaagctgtaagtgtctagtctaccgtgtatgaagtaggaacaaagttaagcagtgttgtttgtgtgtgctctttcataaaactgcacttctttgcttcggttactgtttcttcccttttaataagggtattgataggc

SEQ ID NO: 97498 - DNA, 314 bp, Glycine max
  Clone ID: PAT_MRT3847_59054C.1
gacaatcatctcagcggctggggggattcttaccctacacaattcaacgattactccactaattcgtacccctccctcttcaacaacatggggccacattgttcaacccgtgctagaaatataattaactttacttgcaccctgaacaagagacattccagccaacaccagtgagattcatattactttgttcccacacatctcacaagaacatggttcagcatgaggaacgtgacgcggatgtctatctttcttgtgtgccctgaactgcttcacaccatgcttaattgccggccataaaacttccatccact

SEQ ID NO: 97499 - DNA, 670 bp, Glycine max
  Clone ID: PAT_MRT3847_59055C.1
aaattgaattcctggatttttttttcaattggatccttccatctaattttagttatgataaaataatcacatatatttatgtgggtttggactttaactcaaccctacaaaatcaacttgtaagataagaattgttcttcacttatataatttatctcgatactatccttatttgatgttggactttaatatgcctcatttttctcatgattacctgtcatgtgagactttcaacacactcctctatctaggtgtagaaagtcccacatggcgaggaaccatgagaaaaatgaagcatgttgaggtcctacatcgaataaagataatgtcgagataaactatataaattaggaacaatcttcatcttataagagagttttgtaggattgagttaaattcaaacccactttctaaatcctgcaccacactcatattctgttaatttctattttttttctaactattttagttatataatgttagtttccatttttttaattctattttagttatatgatatcattataataattctagttgatttctaaaaatgtcttaacaagttgagtgttctccctcgcaccgaaagcaataattttgttttaggtactatacataactcacttcttgtaaacttgtgaatactttgggcatatattcttgttacttt

SEQ ID NO: 97500 - DNA, 894 bp, Glycine max
  Clone ID: PAT_MRT3847_59056C.1
cccggctcgacccagcgtccgtacggctgcgagaagacgacagaagggggccggcatgcagccatcacagtcacaggcccagcaacaacagccgtcagcaactggaggattttacaggccaccagacatagggttttatgggcaaagccattcatcaacacaaccagcaccagtacctaggcagtgagcgttattcaaacgtcaaaaatcaacagctaagattgctgccatctttgtatcaagttcatttaggaaacttctgtacaccaaggggaggctatgtagtaatgtaaatcagtagaaaattaaatgtggcaagaattctgtcatgaccatagtcgactgtgatcttcatgacaactgtgatcattagctgacaactgtgatcttcatgaccataatcgactactgtttaaatctgagtagtaggttttgtcatcattagctgacaactgtgatcttcatggccatagtcgactacagtttaaaacctgatgggccccttgcaaattgttttgaaacactcggtactcttgtcatgcatggtgtatcatgtgtgtggaccacctctgttttcatgaagctgcatatttgcatgaacattggtggctggggttagtcacctcttctatgaattcctaggaggcttgccattgctttccattctcctagaatacttctattttgggaggtaagaggttaatgtagtgcagtatcagatgacaagatatgttggcattttttgttgggattttgcatgataacatgggcagtccatcaacgtggaatgccctggtatggtctgcacgggtccttcccaatacaagatgtctttaggccctgttcccaaaaaaaaaaaaaaaaaaaaaaaaaaaaagcggccgctttagagga

SEQ ID NO: 97501 - DNA, 703 bp, Glycine max
  Clone ID: PAT_MRT3847_59057C.1
ccacgcgtccgcgctaactagacagaggtgcacagcaactgcaacttccaaccttgtcaaggcacttcatcaatcaccaaatcaaacatttcgagcaaaaatagttttttcttcttccaacccaaacaaacacaactcaatctaccttgtactcgtgactcaactcttcatctaacactagctgagttcttagcttattgaagaaaatttgtgtcgacccaatttttgtttccttgcattttcaccacataacgagagaagagaagctgaggtgatggtgatgaagcagagagatgaagagctctctttgttcctcgagctgaggaggagggagaaagagaatgagaaaaacaaccttgttctgcttcaaaactctgaggaatttcatttgtccaatttggaatccaatgatgggggctccatgatttccaagatggtgtcttcggtgccaccaaggaagaatggagttgaagagtttttgaattcagagattgacaagtctgactatgaatggcttcttgcaccaccagatgcacctctttttcctactttagagaaagagtcacaaatatcagtcaagagtgaacataatttctcgtaatgctcgctctatggctttacaaggttctggtagcaaatatagtaggagaccttgcttatctgggggtccaagctcacaagcatcatgcatcaatgccaggac

SEQ ID NO: 97502 - DNA, 234 bp, Glycine max
  Clone ID: PAT_MRT3847_59058C.1
cccaggcgtcagtagacgagtgagcggaggcgtgagcgggagcaagattaggacttaaggggggtgtcaacgttcaaaacgtcatgagcgtgttgctttccgtgcttgaaggacgtcctagtgatggcattagggttgatcttgtcattaactcatttgtagtgagatttattcaagcaggaattgaggcaagcatcattattcttatatggggaactcgtttgaaattgaata

SEQ ID NO: 97503 - DNA, 370 bp, Glycine max
  Clone ID: PAT_MRT3847_59059C.1
ggctcgaggagaaaaaaacttttggttttgaaccgtgggacacccagacttatacatgtgcggtggcaatgtcaaaaaagccaaagatgtgatcgcgagaagaatccttatgaagcataacggagatcgcaaggggagccagccggagtgtaaacaagagggctatgcctctatagcgacaggggtgcatgcagacattcatatgcaccaaatgagaagcgacccgccatgaacatgctgtagccaaacacaccaaatcctatctacctgtccgaacctctaattttaaaaagccaaagagtccacattgagacacaacaaccatatattgtcatgggtacacgcacctatccacatatatctaacacca

SEQ ID NO: 97504 - DNA, 402 bp, Glycine max
  Clone ID: PAT_MRT3847_5905C.1
acggtgctcactccgttcactatctctctcctttgcgcttgctttctgaactgtcgatttgcgttgcattcagctcattttcggatatgagttcattgtcagattagctgatttagtttcctctggactaaagtgttgagaacatgcgtgaactttgcctgattttgatttacattgctactgtttatgcctttctgcatgtttcgatgcctacaactgaatctatactgtttcttttaacaggtttgcatgcatgtgttcgttttggactttatgttcgtttgcatgcatgtgttcaaaaacatttacctttgtgtctatctgttatgtgtattgttttggactcttcattgtccttcatgtttaaagctttgcctttgtagttggttttctatgagtata

SEQ ID NO: 97505 - DNA, 3398 bp, Glycine max
  Clone ID: PAT_MRT3847_59060C.1
cttctctctctctctgtcattggtttttctctggttgacatcatcgtcatctccttcttcttcctcatccaattggcccccaacactggtggggggtactttgaaaagtttcaatggcgaacaggaacttggaaaagatggcatcgatcgatgctcagcttcggctgttggttccggccaaagtgagtgaggatgacaaactggttgagtatgatgctttgcttttggatcggttccttgatattcttcaggatttacatggggaggatctgaaagaaacggttcaagaggtgtatgagctttctgctgagtatgaaggtaagcatgacccaaagaaactagaggaacttggaaatctgataactagtttggatgctggagattccattgtggttgccaagtccttttcccacatgcttaacttggccaacttagccgaagaggtccaaattgcccacagtcgaaggaacaagttgaagaaaggtgattttgctgatgaaaacaatgccaccactgaatcagacattgaagaaactctaaagaaacttgtggtggatatgaagaagtctcctcaggaagtttttgatgcacttaaaaaccagactgttgatctggttcttactgctcatcctactcaatctgtccgtaggtctttgcttcaaaaacatggaaggataagaaataatttaactcagttgtatgccaaagacatcactcctgatgataagcaggaacttgacgaggctctacagagggagatccaagctgcattccgtactgatgaaatcaggaggacccctccaaccccacaagatgagatgagagcagggatgagctacttccatgaaacaatttggaagggtgtacccacatttctacgtcgtgttgatacagctttgaagaatatagggatcaacgaacgtgtcccttataatgctcctctcattcaattttcttcttggatgggtggagatcgtgatggcaatccaagagtaactcctgaagtgaccagagatgtttgcttattggctagaatgatggctgctaacttgtactactcccagatagaggatcttatgtttgagctgtcaatgtggcgctgcaatgacgagctacgtgtccgtgcagatgaacttaacaggtcttccaagaaaaattcagtcgcaaaacactacatagaattttggaaagccattcctccaaatgaaccatatcgtgtgctactgggtgaagtaaggaataggctttaccagactcgtgaacgctcacgccatttgctagctcacggatactctgacattccagaggaagagacttttaccaatgttgaggagttcttggaaccccttgaactctgttacagatcactctgtgcttgtggcgatcgtgcaattgccgatggaagccttctagatttcttgagacaagtctctactttcggactctccctagtgaggcttgacataaggcaagagtcagaccgccacacagacgtcttagacgccatcaccaaacatttagaaataggctcataccaggaatggtcggaggaaaaacggcagcaatggcttttatctgagttgagtggcaaacggcccctattcggccctgatcttccccaaaccgaagaaatcagagacgtgttggagacattccatgtcatagcagagcttccactagacaactttggagcatacatcatctcaatggcaactgcaccttctgatgtgcttgcagttgagcttctgcagcgcgaatgccatgtcaagcatccactaagagttgtgccattgtttgagaagctagctgatctagaagcagcaccggccgcgttggcgcgattgttctctgtagactggtacagaaacaggatcaatgggaagcaggaagtgatgataggctattctgattctggcaaagatgctggaaggttttcagctgcatggcagctgtataaggctcaggaggagcttataatggtggctaagcagtatggtgtgaagctgacaatgttccatggtcgtggagggacagttggaagaggaggtggtccaactcaccttgctattctgtctcagcctcctgaaaccattcatggatcgctgcgcgtgactgtccaaggtgaagttattgagcaatcgtttggagagcagcacttgtgcttcagaacgcttcaaaggttcactgcagctactctagaacatggaatgcaccctccaatttctcctaaaccggaatggagggctttgatggatgagatggctgtcattgccactgaggagtaccggtccattgtgttcaaagaaccacgatttgttgagtatttccgcctggccacacctgagttggagtacgggaggatgaacattggaagtcgaccagcaaagaggaggccaagtggaggtattgagacactccgtgccataccttggatctttgcctggacacaaacaaggttccatcttccagtgtggctaggctttggtgcagcattcaaacatgttattgagaaggatgttaggaatattcatgtgctgcaggagatgtacaatcaatggcctttctttagggtcactattgatttagtggaaatggtgtttgccaaaggagacccagggatagctgctctttatgataggctccttgtttcagaggatctgtggtcatttggggagcagttgaggaccatgtacgaagaaaccaaggaactcctccttcaggtggctggccatagggatcttcttgaaggagatccatacttgaagcaaagactgcgcttgcgtgattcttatattactaccctaaacgtgtgccaagcctacacgttgaaacgtatccgtgatccaaactataatgtgaagctgcgccctcacatctccaaagagtctatagagataagtaaacctgctgatgaacttataacacttaacccaacaagtgaatatgcacctggtttggaagacaccctcattctcaccatgaagggtattgctgctggcttgcaaaacactggctaaatctgagtttttgtcttctctttggttccacttttattttctgtttcctttatcagaaataacgagtttagctgcatgcaccaaagggtgtttttccctcccctgtacccatgtttccattataagatattacagagagatagctgccgcaaaatgagacaatgcaagtatgcaactgattcttatgttccaatacgaaattatgctgatttatagacttatttgtatcacctatttcaagcaactctttggtacactaacatttttacgtgaggtggttaagatgccaaatactatgatgtatttgttgtcattaggctgaaagtccagcaagacttttaattatgatacaaggaatattttaacatttttttgtggtaa

SEQ ID NO: 97506 - DNA, 387 bp, Glycine max
  Clone ID: PAT_MRT3847_59061C.1
gcacgaggtaccacgggtgcaccacggggtgcaatgcgatactgctatggtgggcattatcatatgcaactactctggtcttatgtgaacaattagtatttaaaattctttggaaattaattatggaattcttaagaatatcttaaaacttgaaaagtttggttggttcttaatgcatattccttggaatgtgagatgattcttggaatgcccttactatgtaaaaacattattcttttaaatggagttgatagaaaaacagaacaaaaaaatgcaagatgattattttgcccatactatttcgaattcactctgcttctttctttctacctatctatcatttagaaatggaaattgagtttaaactatgagagaaatatgggggga

SEQ ID NO: 97507 - DNA, 321 bp, Glycine max
  Clone ID: PAT_MRT3847_59062C.1
agatagtactagatagaattgaaataagaatccccagaaatgtaattcctcgccgcctttctagagcagccgggggaactatactacatcattaaaaccaccatactccaaacttttacaataactctaatttcatgagcaattcactcattacctacattctaaaacaaaaatcaatattatccactaaataaaaaaaaacattaaacttctaacatctttacttaacaacaacaaatgattcttttctaatctactaaagacataactacatatccatgacactcctttaactataataagaattaactttcataatat

SEQ ID NO: 97508 - DNA, 829 bp, Glycine max
  Clone ID: PAT_MRT3847_59063C.1
ggaaaaggaaagaatgtttacaaagcttggtggattgagtttagagccaaaatccgtgcctcctccaaagcgaacagggtggattggaagaggaaattgtcacatggaaaaggccaccatagatctgaagcgcgatggaaaggatctgagcggtcgcgttcatcaactcccctgctgcgtcaagcacgacggtcccgcctccgtttcccactatttcaaacccaaacacaaaggtgttggggaagacgagggtttaccgttacaagaggctcattttagaggcaggttactccaaggaacaacactccctcttccgcacggttactctggttttgtcttgagtaagagttcgcctcccacctccgacgaaaactctcactcttgggacaccaaagcaacgtttcaggacatcacgtattggaaccatgactactccccttcccagaatgatgaattattccgagcttttcattggcttactgtcgcaaaagctctgcataatcccgtgacacctgaggagttagcttcgtcttctgttacactctagagatgggactactctgcagttgaaatgctgtatctgtgaaatttacagttatcttttttgctgtaatatttatgtttttgttgtacgctgtttccaacagttcctatggactttacttctctctcttttcctccccagtgtgatctagttgctttctgtgtagtgggataaggtctggtgtagtctcttctaatttgagtaaaaatgtcaagtctgacacatcatggctttggtctttggaagaattatcaatgaggattcaccattgaagttttttacaca

SEQ ID NO: 97509 - DNA, 188 bp, Glycine max
  Clone ID: PAT_MRT3847_59064C.1
tttttattaagagctacgtacgttcagaagacggaacacgggattcagcgaaggcatggggctgggatgatgatgaataaaatggactttcattacctacatagaatgaaggggatggctttgggactcaggctgatgcaatggagatgacacagattgtcaatggctggtactacctttgaaggaaa

SEQ ID NO: 97510 - DNA, 245 bp, Glycine max
  Clone ID: PAT_MRT3847_59065C.1
acggccttttttttttttttttctttgttcaggactgaccctaaccattaaataattgccactgcaacaatcggaaaaccaggcaaaggagtagaagaaaacagtgaacaacccttgccagttagatgcaccaaccaacagggcaccaaccatagtaccaatcaaaaggcaaaaagagagagagaccaactcctactaagaacagcatagacgtccctttcgatccaaggggagaaaacatgcag

SEQ ID NO: 97511 - DNA, 369 bp, Glycine max
  unsure (1)..(369): unsure at all n locations
  Clone ID: PAT_MRT3847_59066C.1
cgcacaatgtcacaatngttgtctctaaacagatagctaagcgttgttgtgtattcatacgatatgagggctccatacactgatactattaacaacctaacctttcatccaaaacaggtaatcgaagggcgagatggaggacgtgacgccatgaacatactgtgatccagggattaacggaaaagaatcaggacggattgtgatggatctatctggaaaagcagatccaaaagactgcagaaagcttaagagctctctgcactgtgaaaaagtggactgtttaaacaaacaagcctgtacatgtcacagggtgcgcattccatataataattcctagttttatgctccaaggaggtgattatacacatg

SEQ ID NO: 97512 - DNA, 620 bp, Glycine max
  Clone ID: PAT_MRT3847_59067C.1
gtcgcacaggactaacagcagttttcataggattcttcttctttctgtcactattcttcactccactcttggctagtgttcctccttgggctataggaccctcacttgtgatggttggggtgatgatgatgaaggtggtgaaggacatagattggaccaacacaaaggatgcagtgactgcttttgccaccatgctcctcatgcctctcacttactccattgcaaatggtatcattggtggggttgggctctacattgctcttagcctctatgactatgctgcaagcattgtaaattggtcgaggaagatgaggagaatggtggccaaggaacaaaaccaagtttctgttgactcagcagtggaaatgatatgagatgctataattttggttatcaaaagtggacttatggtctttagttttagaagtttttgtttatagattttagttggtaatatataggtcgatcctagtctagagtcagaagatgaaatgcattcacagtgtcatcctacatactattttagcatagtagtagcttcatgagtgggaacttgacgcttgtgagggttgtttgcatttattttaagttggagagtaaaatttgtgggttcaaaacat

SEQ ID NO: 97513 - DNA, 469 bp, Glycine max
  Clone ID: PAT_MRT3847_59068C.1
tggtaccacaacaactctctatcactcacaacactttcacaaacactttctgaaaaacaattcgtttcttttccctaccatggccagatcacaacagcgataccgaggcgtccgacaaaggcattggggctcttgggtctccgaaattcgacaccccatattgaaaactaggatatggctagggacttttgaaactgctgaggatgcagctagagcctatgatgaagcagcaaggctaatgtgtggcacaagggcaagaacaaacttcccttacaaccccaatgcgtctcaatcttcatcttccaagcttctctcagcaactttaactgcaaaactgcataggtgctacatgggctctttgcaaatgacaaggcccttatcacagccagagactcagagagtgggggcttcaccaaatgtgatcaccttctcggggagcaacttctccctgaagaggaaccaaactgag

SEQ ID NO: 97514 - DNA, 157 bp, Glycine max
  unsure (1)..(157): unsure at all n locations
  Clone ID: PAT_MRT3847_59069C.1
ggtcataagagcatgctctaacaagctgactggagaatctttggcctgcaaatctattgctaaagatagaagataggttagtttcttcagatgattggcagagtgttaggcgggagattgagatttngtcgttgttatctgggctcccagntgttgt

SEQ ID NO: 97515 - DNA, 345 bp, Glycine max
  Clone ID: PAT_MRT3847_5906C.1
ggggctgaacttggttttcatttccctaatattttctcccggataaaataattgccccagagccccggcatccattttatggaccattacctaattcgggaattattacttttggttgttaccattacttaccaagttttttaaaagggtttaaccaagtaagttttcaaaccttcctaccattccaggtttttggccttcttaaccttgacaaattaggattgaggattcatttgacttaaatggatcctattcctacctatgaccacctttattacatttggaaccaaggctatccaaaaactagaccttgctgttgctacatggttaggttatcttcctaaa

SEQ ID NO: 97516 - DNA, 311 bp, Glycine max
  Clone ID: PAT_MRT3847_59070C.1
atgaatgtgcatcatgatagaaactcaaatggacattttatacgaacgcgactcaatccaaaagctggctaggttatcaatctaaccgagagtgcataaacaactgacactgatttgttagcacttgcattaaatgagtaaagagccatgacatcttgcttatagatagagctatagatgtcgttgccaagtcgagtgttcgtcgggctagatcttgatacaaacaccatgcattgtgaatactaatggtcgcatcgaccaaacttactagcgctaatagcagtactgtctaggtcatgtatcatatcgag

SEQ ID NO: 97517 - DNA, 476 bp, Glycine max
  Clone ID: PAT_MRT3847_59071C.1
ggcatgatctattgctcttgcattgaaactaaaagcaaattgtttagggaactacatcccaaaatggaataagcgctgatatataagatttaagattcggatttggggctctcgtctataattggcaaagagaccccctcacggtatcctcaactcaaatttcgtctttctcaaaaaagcaactctttgtatcagtcaaaaatttgcagtattattttccagacaaagcacaaagcagctctcaggctgcaattggtggcgcccgcggagtttatatgtcgaggagcaatctccgtgggtcttcaaccacgtccttgatgcggcgcaggaagtaaacagtttctttgccgtcgatcagcctgtggtcatatgtcagcgcaaggtacattattggcctcgcgagaatgttgccgtccacgaccacagggcgttgtacaatggagtgctttccaagaatagcagactgtggggggttg

SEQ ID NO: 97518 - DNA, 289 bp, Glycine max
  unsure (1)..(289): unsure at all n locations
  Clone ID: PAT_MRT3847_59072C.1
cgcangcacgcgtacgtaagctcggaattcggctcgagctntgnnnaggaaacntcattnccancangnacttctccggcaantancanntgcngagccaagnnnactttgnncccttcatgaanncgnnnggtctncntgaggnnntcatccagaangggaangncntcaaggggnngtcaganntcgtgnatgangnnnngagngtcaaactctgcatcacctatgggtccanggtgnnccataatgagttcaccttggggccngnntgcnaatggagactnttttt

SEQ ID NO: 97519 - DNA, 855 bp, Glycine max
  Clone ID: PAT_MRT3847_59073C.1
cggccctcacttgcctccatatatagctaccctggctcctcaacaactcaattcctaacttgcctccatagcaatctttgcttaattcttctgttcaattaccacattcattatagctctctcattcacaaactttcaatttctgcttccaaatctgaattcaacccatttggcattattgttacatataattaattaaggaagatcgaatggagagggtgacaaagatggtatcagagaggccagtggtgatcttcagcaagagctcgtgctgcatgagccacaccatcaagaccctcttctgtgactttggggtgaatccagcggttcatgagctcgatgagatcccaagaggcagagacattgagcaagctctttccaggctaggttgtagtccctctgtgcctgctgtcttcattgcaggtgacctcattggtggagccaatgaagtcatgagccttcaccttaatcgctccttgattccaatgcttaagaaagcaggtgctctttgggtttaattggtcaacaatatattaacatataattcatcttgaccctactcgatcaccagccacacatatatatatatatgtgcaggctctctaattaattaataatatatgtatgtaatgatgcaattatatacgtaggggcatggtatatatatatgtaatgaggaaactatatatatatgtgtgtatgtatccacgtacggtattattagtatagagtttatggcactagctatatataataataaggctagcttaacttatcgaggtgtagtttagccttttttgatgaggcgttaaatgtaatgttatcttttttatatatatagttgtaatagataaa

SEQ ID NO: 97520 - DNA, 358 bp, Glycine max
  Clone ID: PAT_MRT3847_59074C.1
tgcaggagggaatgtccggtgcatcggaaactgtatgagggcaagcaccatggtgctgaagagtagacgatgtttggaaactactctcggtgtgagagcgctgcgtccaacattggcatgtcttccaacatcactgttactgtgacacacacatctactgagatgctttgaccaaatacatcatgttattgatgaggcacggtgagagaaccgcctttacaaccagacgatgttatggaggaaagactctggtctatctgatagttgatacatgcatactgatatggtgagagggtactatgatgctagggacaacgccaaactgggtttgcccatggccatcagcagcaccatgctt

SEQ ID NO: 97521 - DNA, 333 bp, Glycine max
  Clone ID: PAT_MRT3847_59075C.1
ttagcaaccatgtcgtgtagaaaggtgagggagccaaaggaggaaaatgtttctcttgggccagccgttatagtcggtgaacatgttatgggcgtggctcgcatcttagcctgcttcagcgacaccttcatgcatgatactgatttgcactgggagggaaacccttgtactcatcactggtgggatgaaagcataaggctgacagagaggaataatctgcataggcagctatggttgcagcacaagaggtggctgccagatgttaggaactgagcataactgttcttgatttgaagcccaatgccactggtagaaacaagaccaaaacacctg

SEQ ID NO: 97522 - DNA, 1682 bp, Glycine max
  Clone ID: PAT_MRT3847_59076C.1
attcactccacacaccaaaaagtgtagtatgatgagcaacaaattattctacgcaaaccttgtgctcgctttctacctctcatgtcactatgctctagctcagactgaaaatttccctttgccactcaaagctgtgaatcttggaaattggctcgttattgaagggtggatgaaaccttctctctttgatggaataacttaacaaagatcttttggatggaactcaagtgcaattcatgtctaccaagttacaaaagtatctctgtgcagaacatggaggaggaagtgctgttgttgccaaccgcaccaaagcttctggttgggaaactttcaggttgtggaggatcaatgaatccaccttcaattttagagtttctaataagcaatttataagattgacaaatcgagatggaggaagcaatttagtggctgattcagattcacctagcgacttggaaacatttgagattctgaggaatgatgatgaccctaacatggttcgcattagagcaccaaatggccagtttttacaggccatatctgagaatgaggtgcttgcaaattatgaaggatccagttgggatgatagtgatccttcaatcttcaaaatgaatgttttgagtggcagcattataagaggtgaataccaaattacaaatggatatagcccagataaagctaccaaaatcatgagggatcactggaacacgtatatcattgaagatgatttcaagttcatgtcagaaaatggcttaaatgctgtgagaattcccgtggggtggtggacaacccaagacccaacaccaccaaagccatttgttgggggatccttggaagtgctggacaatgccttcacatgggcagaaaagtatggaatcaaggtaattgtggacctgcatgctgctccaggctcacaaaatggaagacctcacagtgcctcaagagatggatatctagaatgggatgattcatacatatctgacactgtggcagccatagactttctagctgaaagatatgctaacagttcgggtctagttgcaatagagctaatgaatgagcctcagggagttaatttggaaagccttaaaagctattatcaaagcaggttatgagctgtgaggaaacacacttctagtgcctatgtgataatgtctaaccctcttgatagagattcaaaagtgcttttgtcctttgctggagctttcagcggagtggtcattgatgtgcactactacaatctcttttcggataggttctccaacatgaatgtgcagcagaacatcgattttattaaaaagcaaagagtctcagatcttagctctctcaccacatctaatggacccctcatttttgttggggaatggagtagtgattggaaagttcagagtgcatcaaagattgaccaacaaaaatttacgcaagtccaagtggatgtatactctcgtgccaaatttggatgggcttattgggcctacaaatgtgactctaacttctggagcatcaagtggatgattgaaaacaattatattaagctttaattagtattttactattttagatgtctattcaaattggaagtgtaatttacaaaaataaagatagcctactactgttttacaaaaacatataaagttcgttctacactgcatttccaaaattcactgttcctattggtaatt

SEQ ID NO: 97523 - DNA, 712 bp, Glycine max
  Clone ID: PAT_MRT3847_59077C.1
aaggtattctaacagatcgggtctagttgcaatagaactaatgaatgagcctcaaggcgtaaatttggaaagccttaaaagctattatcaagcaggttatgatgctgtgaggaaacacacttctagtgcctatgtgatcatgtctaaccctcttgatagagattcaaaagtgcttttgtcctttgctggagctttcagtagagtggtcattgatgtgcactactacaatctcttttcggataggttctccaacatgaatgtgcagcagaacattgattttatcaaaaaccaaagggcctcagatcttagcactctcaccacatctaatggacccctcatttttgttggggaatggagtagtgattggaaagtacagagtgcatcaaagaaagatcaccaaaaatttacgcaagtccaagtggatgtatactctcgtgccaaatttggatgggcttattgggcctacatatgtgactctaacttctggagcatcaagtggatgattgaaaacaattatattaagctttaattagtaatgccctgtgctctaaaaagggtgttgggtattttactattttagatgtctattcaaatttgaagtgtaatttacaaataaaaataaagatagcctattactgttacacaaaaaacatatgaagttcgtttgtacactgcctttataaaattcactgttcctattggtaattaaaaa

SEQ ID NO: 97524 - DNA, 710 bp, Glycine max
  Clone ID: PAT_MRT3847_59078C.1
aaattaattaaaatcccttgaaatcatgataattgtgaattttctacttcagcaaataaaaacacaaaaagactatgacttgactagaatcaaaatagtcttcctgatgcaggtggtcaagatagtaaaaatatttcaaactctagaaaaacaaaaactaaagattcctagcataatgataatacattcattaacaataaatgtgaatgattctttaattctttcaataaaaagaataaaaattcagacaacaagccaatcacaatagctcattcccaaagactaacccaactcatgcgtgggaccacaaccttaggtacacccaatcctatgatcccttacgcaccattgtctgctggtcacactacaatgatgccacatgaacggcgcaatttagcattccacacccacataggcagcgcgtcgataaacctccggcaaatccacccctctcccccactcttcggcgacgcaatcataaacaaaaacaaacccttctttaactcctctcacttcattcaaactttgaattaaaatcaccttatccccaattcccacacaactaaacctaattctactgtccactctaacttgcgccgggagcgggggcctctttattctacaccattctccaaacacattgttattgaaattatcattaccattataattgttgtgatttttttcgcgggcgtgaaaactccaaaatg

SEQ ID NO: 97525 - DNA, 293 bp, Glycine max
  unsure (1)..(293): unsure at all n locations
  Clone ID: PAT_MRT3847_59079C.1
tgccggtagcctttgagntcagncangtttatgacacgacccagctcgaattctctcgagggaagagtatcttgctcctgatgcttgctacgactcaggtgcaaggctgctggggtggtcacaatcatcattgtctgagcccctataaagtgacagggatcagggagagcctgcttgtttttcagttccttcaggggcagctttaccattgggaaccatggaattggagctagagaagagcactgcgactgtagcattcaagtctatcctggacaagatagaaacaggcaagc

SEQ ID NO: 97526 - DNA, 310 bp, Glycine max
  Clone ID: PAT_MRT3847_5907C.1
aaaaaaacataccctttaaaaaattattaaccaaacaaaaaagagggggaaattagaaagacgacgggggatacaaaagaaacgggcgaagcatagcaccctgtaacagaaaaaaaaaaggaaccaaagaaggaaaaaagaaattcaaaaatagacgggggacacccaggaaggaagacaccagccgcccgcagggaaaaaaaaaaaaggggaacaaaagctaaacccaaactgccaaagaaaaggagaaacacccgcaaagaattaaaggaccggaacctagaaggggaaaaaaaaaggggaacaaaag

SEQ ID NO: 97527 - DNA, 410 bp, Glycine max
  Clone ID: PAT_MRT3847_59080C.1
cccattcgtttcgtaggctgaacacaggccaataagatgtaggaccactcgtgaaatttataacttaggggtcggtttctcagagctatgtttaatttcaggcacttgatggcacgctatctgattacgactgcacgcgtgctaatgaggcataggatttcgcgggctgagattcggatctgatttttctcgtccaatctcttcttatcactgcgccggaaccacgatctacgtgcagggataccaacaccactagcaccgccactgccaaccgccagcctcagtatttcctgtctcgacacaacactctgactgaaaaaacactttgatctgcgagagccatggacagttaggcaggaaatcgcacagttgactcttatgtcagagcgcggccaccatattacataagg

SEQ ID NO: 97528 - DNA, 454 bp, Glycine max
  Clone ID: PAT_MRT3847_59081C.1
tccggcacacagctattcctcttaaggttgctactgagtttccgcactgcataccttaagtcttccgaattccaagatagtttgtacatggctaaagaaaaggctcacgatcaacattgtggcggatgttcatcgtggaccctgaggaggcaaccaccattaacgagctgaagaagcctgttgcggagaaagaatctccagggcatgccatcatgacggcatgcacgtacggtctcggaggggaaccaaaacattatgttaactaaataatctggaaccctaatgcatcagagacatcatcaatgtgtactctacgctagctttgctatggttacgatctttgagatgagaggcttgatgaacagaaccattctgatgaattgctttccttgaaagataatgcgtgcttcttatcttctgcctacattgttaatactcatccttgagtttctcg

SEQ ID NO: 97529 - DNA, 409 bp, Glycine max
  Clone ID: PAT_MRT3847_59082C.1
aacacccccagaaatttgacacactttaaaattctcagcgcatacgtgtggggataaagtgtggtgaatcagacacacgaaagagaagatttgtaaaatatatgggggggtgagggggcacacttggagagtttatttcaatcaacatttatcccgggtgtgtggtggggccacccctaatacgtggtgaccccagaagaagaacatcttctatgaaattgcgcaaaaaatttagcgccgcaggggaatcggggaactacaattttcacaattttcaccaagagaagctctctttttttataaagaaaatagcccagctcttcttgactggaataagaagggggcacgcaaccaaataatgtgtgtgtggagaaatatttgaccacgcgggttatgaaaaaagaagtgc

SEQ ID NO: 97530 - DNA, 146 bp, Glycine max
  Clone ID: PAT_MRT3847_59083C.1
tgaagagaaggctcccaagggatgaatctgtttggctgtgttatgcgtctcagcactgtcactgaatcgttgtattgcggaggataatggacctgatatgaacatctacaaggaatcatgccctcaggctgaagacatcatcaaag

SEQ ID NO: 97531 - DNA, 446 bp, Glycine max
  Clone ID: PAT_MRT3847_59084C.1
cccggggaccaaaattttttggggaaaagcaattaacaaggtacttccataagaacatggcctcggcacaatttccacaaacacctttggggggcaggaaatcttaaccccaaaatctgttagaaaacttgacccccattttaaccccaaacatatccccaaaaaccgtaaacccccttcggcatcaactgcataattaaaagttgaaaaccgggccaacaagctacccccttttttaaggggacgagcaaaagggccaatattgcaattattctttcccccctttgacccccgtttaaaggctaaatttcgggaaccttgggggttgggctcatattccaacccatccgggttaaaacatttttaaaaaaacggggttaaagttttcttttttgaagggcttttcaccgggaaaccaattgaaacccccaaggcgtttccagggc

SEQ ID NO: 97532 - DNA, 947 bp, Glycine max
  Clone ID: PAT_MRT3847_59085C.1
cccacgcgtccgagtttccggcgactccggccaccgttggatttcaattggttctagcttttggcgtcgggtttgggaattaactccgtccgacaccgttcacggcgactccgggcaccgttgggtttcaactgcttcttgtttttgaaccggtgcagtagagagaggcatgggtgacaaagaggaagagtcggcaatgccaagggacgcaaagattgtgaagtctttgctgaaatcaatgggcgtggaggactacgaacctcgcgtcattcacaagtttcttgagctttggtatcgctacgtcgtcgatgtcttaaccgacgcacaagtctattcagagcatgctggaaaacctgcaattgactgtgacgacgttaagcttgcgattcagtccaaggtcaacttcagcttctcgcaaccaccccctcgtgaggtgcttctggagttggctcaaaaccgcaacaagataccgttgccaaagactatagcaggacctggtatcccacttccacctgatcaggacacattaatcagtcctaactaccagtttgcaattcctaacaaaaggcctgccgaacctttagaagaaacagaggatgaagaagctaccattcccaatccctctcaggaacaaaggtagacatgcagccgaatccccatcagagagtgtcatttcccctgcccaaacgccaaaaggattaatttgaagtcccatccgtcactaatgttttagtgtagctcttgtttaattgttgtacaacagtgttagctactaaaatctatataaaccgtagcacgcttgatttattgtgtaaaatccactaggaaatggtttccaaacgtcactcattgtctatatcagattatgtcttattatctgtggttggtttcgagacttgcaaattctgttagaaattcaattttaagtttataaaaaaaaaaaaaaa

SEQ ID NO: 97533 - DNA, 155 bp, Glycine max
  Clone ID: PAT_MRT3847_59086C.1
gtgtggctacgagaatctatggccgatgacatatactgcctgtgcgaaaatgataagaaaaaacacacctatataagcaaaattcagaagaggataatttttccatggagcagaccctttaggcacttactcaggcgtaactaaggaaatttttt

SEQ ID NO: 97534 - DNA, 1250 bp, Glycine max
  Clone ID: PAT_MRT3847_59087C.1
tcccaatccaatttcaatatgatacggattcccactaccgggtaaacatgcttaattctgaaggagaacttaaaataagttttggctataaatgcaatagagatagaggtattccttgtgaagttgtcagtggctgcaaaatccttcctggagtatgtagaacaagcagtttctcctgcttgtcaggtgcagccttaagtgcaaatgctacattagcaaacacaaacatctgcaatggtaagataggagaagaaatccttccaagttgggactctcctacttcatttcgaaaggtaacctcttcgccaagtctttcaaagttggacatactatcatcctcccccccgaatagtttgtcttaccttagctgcagtccttctactgtaagtgatatccttgaatatgactcttgcacattaaaatccatgagtgatccttccagaagtgaaggttttcttaatgctaaggaagttcaggtagcaggaggagctgctggtgaagatagagttcaagcagtttgttctgaagaaaatgggtggctattctgtgcaatatatgacggctttaatggaagagatgcagctgactttctggctggtaccctgtatgaaaccatcatatcttactttaataagttaatttgggaattggagccgggttccatcaaagcttatgataaaggatgcttgggtggatccctgcaatataagttggatgatagtcttatttatcacgagaatcaatctctgtcgagatttaagggaataaacaattctaatcatggttgttttgcaaagtgtaatccttctactaagtcagaagtatcatgtgattcattttcacatggggtacttgatatccttcaacgtgccattagtcaggctgagaatgatttcttgtacatggttgagcaggaaatggaggaacgtcctgatttagtttctattggatcttgtgttttacttgtgcttcttcacggtaatgatttgtatacacttaatctaggtgacagcagagcagtattggcaacatgcggtacagctgatcggatggataagagtgagagactcaaggctatacagcttacagataatcatactgttgataataaagttgaaagagctagacttctggctgatcatcctgatgatcccaagattgttatagcaggaaaggtgaaaggtaaattgaaagttactcgcgcttatggagttggctacttgaaaaaggttagttagtattctcttaca

SEQ ID NO: 97535 - DNA, 315 bp, Glycine max
  Clone ID: PAT_MRT3847_59088C.1
gcgacatcatattcgtactgtttagtggatcgccactcagcaagagcggggacgctcgagttcaactcacctcaacccggtgactcagtcgttgcaccgttgttgaagaatcataatgcgaacactttatactacctggagctcaccggagttagcgtcagcggagaaatctggaccgtcccgtcggagacttttgacgttgattaatcctgcgcaccatgtgtgattgcggattctggaaccttgatgacttgatagcggactcacgcctacaactcaccgcgcgacgctcttaagaggaagacttagatcctg

SEQ ID NO: 97536 - DNA, 574 bp, Glycine max
  Clone ID: PAT_MRT3847_59089C.1
cggctcgagacaggttcggataaactgaaccgtgtcagtgtgtcatcatcgactgctccaaatggccgaggtaattttgaatctaatcgtggaatccatgatgcctgatgggtaggaatcattgcagccaaaagacatcataccagttcctggtttccttgattgtcttagaagaacaaacagccttgcatatcttttggtggtgagttaggtctttcttgaatgtacccatgaaatcaggctatcaacacggtggagttgatattactcacactaaggcctttctaacatcactgtcagctatggtggctgagaccacaactttccccatagatttgatcaagaccaggctccaactccatggcgagtcactttcctcgagtcaccccactagtgcatttcgagtaggcttgggcattattcgtgaacaaggtgcccttggcctttacagtggcctgtcaccagcaattattagacacatgttctactcgcctattcgaattgttgggtatgagaacctgagaaatgttgtttctgttgataatgcttcgttctctatcgttggcaaggctgt

SEQ ID NO: 97537 - DNA, 665 bp, Glycine max
  Clone ID: PAT_MRT3847_5908C.1
tcgcccacgcgtccgttcactcaattcgcgtccggtcctccgtcccgtttcgttcaccgcttctttctttctttctttcatttctttgatttttgcacagaaagagagaaacgagaaacctaatcgaatttccctctttttttttgtttgcgtgctgtgaaaatattaatttgaatttgaggagcggaggatccgagttagggtttccaatcgcaattttttgaaccgaatcggaatgctggttcgggacgcggtttcgaggcaattttagcttcgatctcaggggaattgctcgaatcttagggttaagaaatggacgttgattcctcgatggtgccggagcccgatcacgatccgccggtgcagaaccatgccgagagagaccagctaggagactcaccgtcgccgtcgttgtcggaggggggcggatctctggctcagtcgccgcctcaacaacagcagcagcagcagcaacagccgccgccggccacggcggctcaggtgcaccagcccaattctctggttggtccgaggctcgcgccgacatactcagtggtaaatgcgattttggagaagaaggaggacgggcccgggccgcggtgcggccacacgttgacggccgtggcggcggtcggagaggaggggacgtcggggtacattggtcc

SEQ ID NO: 97538 - DNA, 253 bp, Glycine max
  Clone ID: PAT_MRT3847_59090C.1
gtcagattacttgtcagggcatctgacacaacctaaaatagaggaaagtgatcttcagtattctaagaagaggacctcactggggagaattccaagtaatgtgaagaaaatgataagtgcctttgaaggtggattggatcaggataagagacctcagattaaaccacctccaacaaaacaacaagaaagttcaattgaaagaagagattcttccaagactcagcatttggagcaagataagtcaaagaacata

SEQ ID NO: 97539 - DNA, 1391 bp, Glycine max
  Clone ID: PAT_MRT3847_59091C.1
taaaaaatcaactaccttagaaaaggagtgaaaggaagaaaagagaaacaagaatggaagtgacacaagtactgcacatgaatggaggctcgggagaaacaagctatgcaaacaattccttagttcagcaaaaggtgatttttttgacaaagggtatgagagaggaagccataagcagcctctaccgcagcatgctcccaagaagccttgcagttgcggacttgggttgctcttctggaccaaacactttcttcgtgatatctgaagctataaaatcggtggagaagctttgtcgagaactgaatcatcagtcaccagaataccagatctacatgaacgatcttcccgggaatgatttcaacaacatcttcaagtcccttgacagcttcaaagagaaactgtgtaatgaaataatagaagctgggcatggaattggttcatgttttttcaatggggttccaggttctttttatggcaggatctttccaaccaaaagtctgcattttgttcattcctcgtacagccttatgtggctatccaaggttcctgatggtgtagagaacaataagggcaacatttacatggccagcacaagttccttaaatgtccttaaggcttattacgagcaatatcaaaaggatttctcgttgtttttgaagtgtcgagcggaagaaatcgtggaagggggtcgtatggttctgacatttttgggaagaagaagcgacgatcgatctagcaaagagtgttgctatatatgggaacttttggctatggctcttaatgatatggtctcgaagggaatcataaaagaagagcaaatggatactttcaacatccctcaatacacgccatccccatctgaagtgaaatttgaggttcaaaaggaaggttcatttagcattactagtctggaggtaacggtagtaccttggaatgcctacgataacgggaatgcttttgattctgaatgtggtttgtctaaatcactcagtaatggagggtacaacgttacaaagtgcatgagggccgtagcagaacctttgttggttagtcactttggagaagcaatcattgaagaggtttttagccggtatcaacaaatcttaactgaacgaatgtctaaggagaaaaccgaatttgttaacgtgaccatatcaatgattagaagagcatgaataagaagttgcatatgtttgcatatttatgtggtttctcattaaagcctaccccaaaaaactttcttcatcgtggttgttgtgtgtttaattgtaggaagtattcgtgtgtggtatctcctgtaacaaaactaaaagtattcatgcatgtgtggtttctcattaaaactgggaagtattctgttactataaactaatatctattgattatgttgt

SEQ ID NO: 97540 - DNA, 426 bp, Glycine max
  Clone ID: PAT_MRT3847_59092C.1
ggtataactgagttttatgtgtaaaacatttatactttgaactaataatgctaatataaaaattgttaatataagaatcaacaaaatcatcaactaactgataattacaattgtcgcctgataatttataaactaactgataaaaatcaagaaatttatctacttaactgataattacttctataacataccatgtgttaggactttgcattggggaaaaaatcgataacttaactcttctcactagattcttagcaagacttaaacacaaaaatagattcttaacaccctagccttggtcaactgataaagacatactctaagaatttctatggcaagcaatgtgggacttgaatttttcaaatggctagcaaaataatacaacacgagtcaccaatgtactgccaacaaatatcaaaatcaact

SEQ ID NO: 97541 - DNA, 185 bp, Glycine max
  Clone ID: PAT_MRT3847_59093C.1
attcagcattaaaataaaattcgacgtattccccttgaatcaatcgtgaatgtttcaaacaatgtatattgttatgaaaataggaacagtggaatcacagagtgtggggtagtcgcgtttggtgtccagctatgtgggtgcaagtacacatggcctgaactctgccatgatgagatacatgtaat

SEQ ID NO: 97542 - DNA, 320 bp, Glycine max
  unsure (1)..(320): unsure at all n locations
  Clone ID: PAT_MRT3847_59094C.1
gcgggcgaccagcggccggcggcggcaagaagacgacaggaagggcacagaagggggacgagaaaggggggaaggaaagggcgccnnggcaacagcagggccacaaaggggacgagcaagaagcnaaggaaaacaacaagggcaccagaagggcagaagngagcaaagccaagaagcgagggggggagccagccgcaaaagcgagaacaacgganccgccaccaaaaaaggaacacccaggagggaagacaaaaagagagcaccagagggcanncggaagaaaaaggganagggaggaccacagaaaanggaaaggcaca

SEQ ID NO: 97543 - DNA, 635 bp, Glycine max
  Clone ID: PAT_MRT3847_59095C.1
cataaattcataattaatattataaaacacttgaattgaacaaatcatttgagttacctaactacaatagagttagctgtcacataaacaggacaacagttgaaacataactaaataacatgatagaaagattaaagaacatttttgtaattaactcttaatacatatgaatctttcaaggtaatgaaggtatgcttgctggtccaattaagtggctctgacaaggggtgagtgaggcattggtgaatggggtgacatcatgtgaggtgacataagattctcatcaaatcttctagagttggagaagctgagtctaaggttacttttccaacgtttgagttcctttggtggcttccctgtctctttgccaacaaaagccctgattctcatgagtgcaacatccacagtttcatcatccatgtttgcaaagcacaccctataccaaccaggctcaggacaattgaaagctgaccctggtgacacattgagcttcacctcattgatgatcacacgccacagcatcatttcaccctcaaacgttttctccttcagcaaacccttcaagttcatccaaaagaaaagccctgcattacttggcaagcaagtaatgttcaccttttcaagcccctttgtga

SEQ ID NO: 97544 - DNA, 290 bp, Glycine max
  unsure (1)..(290): unsure at all n locations
  Clone ID: PAT_MRT3847_59096C.1
tattttacgggtccctaaacagangaggaaagacccatgccgaccctaattcctatatggttaatttacatttgagtaggttctttaatttatatctgataaagaatttaaaggtttgagtaatgactaaatttataataacattaattaattgataccgaaatctcctacttgggtgagaataactaagttggtgcacatgtttccattgtatgggttcggtgagaaacatcacttgatgattttcaaggggctcattataacattgtcttcatggcccaataaatgga

SEQ ID NO: 97545 - DNA, 1258 bp, Glycine max
  Clone ID: PAT_MRT3847_59097C.1
cgcccgcgtggccttgattgcatgccttctccgtgcttttcccagtgtggatccctttcctcttccttctgtttcttgatttcaagagagaacgagattacttcaaccataacagcttaatagtagtgtggtgagtgtcacctttttctgtatactctctagtgtaagagtcatggattggcttagacgcagcctatctaggggttcaaggaatagcaaaaccccaaatatccaaacgcagtccaactccgaagtacagcaacacctagaagaaagcatatacgggattaccgaggaactcatcaaccacatcaagaccttcacccttgacacctttaagaatttccctctccaagatgaagttgaaggcagttatggggaagacactcaatcctcttcaaccaaagttcgaaatgaactttctcagtggcaagagaaacatgcaatcctcgtactctcaagagtcaaggaaatgtctcaactgagatatgtactgtgtcctcgccatttgaaggaaagtcaattctggaaaatttactttaagcttgctaggagccatgttcttgaatatgagcttcgtgacatacaacgggagaaactgaaacagatggcagtggaagatgagaaagcttcagataacaatccgtatgaagttgaaatggcagaagcaaatcatgaaaactttattgagcctctaccgccctcatagaataaaaacactaacaattggttggtggcatgaatggaacaggtctctcactcctcttctccccagcgtcgaagggacctttccctggcgcgtgtgaaactgccttccctcggttgatatcatgatattgttctgaagttagtctcaagtatttgctgtcaatctgtagctattgacattgttccttgattcttgacataattttgctgacagataaatggtgtggaatccttggaaacttctcatggcggttcttggttatagaggcaagctatttcttcattttaaaagtttgaaatgcccgacaatcaaatcacgaatccaaaaacttcacaaatgtatcactgatgctgttgctgagtaattagtttggtttctgatatatgtccctcctcatcagtcttatcatagtcaatcagaaaacaatggataaatgtacaaaatctgtttcgaatgatggagttggctataacgattttggatttaacattaatgtttaccaattaccataaatgttgataacttcctttttacaacgtttttttgaac

SEQ ID NO: 97546 - DNA, 159 bp, Glycine max
  Clone ID: PAT_MRT3847_59098C.1
tcgccattacgtccgcacaaaacttattgcacagcgttattatcagtatcagcatcatggctccaactgcagtgggagacgtctttcttgacgctatttttggcttacttgcatgaagaaaccaatctctatattgtttatattcactttatctccccc

SEQ ID NO: 97547 - DNA, 314 bp, Glycine max
  unsure (1)..(314): unsure at all n locations
  Clone ID: PAT_MRT3847_59099C.1
aattnangcanacgtagtaaacncggaantnaggnnganggnatcaangnnannagganagaataagaggaaggtaggnttangacagngcagntaangnngangngggcgtaggggtnnngngactgcgnganggatgnncgganaangantgnagnggannngactncnanaanagngancaaggcagntaggacngnannggngagnnanncacgcaanncgtagnngagancagnagnnancggantgtaatgnagcantnnccngngatgaggnaaatgnaanaggnaaagangagtagagnngnaggg

SEQ ID NO: 97548 - DNA, 387 bp, Glycine max
  Clone ID: PAT_MRT3847_5909C.1
ccacgcggtcgctttggatacgttgctcatcccattaaccagacccaaaagaaagattcgctggagggcacaacttcctttgatattaaatctcgctctagattggaaaaagatggctctacaaaagcacactttggtagtggaaagaccttcaaatatgacataatctggcgttggttgacattcttcagaacactttcctgaaaaggaagaacatgaaaaaccccaaaagactgatgccagattgagacaaagaatagagtcctcaatacaatgaggttcaggctcagatggaaacaaatttgctcaaactgcctcttgatgatggtgcaactcctaaaggctccatgatggcacttaaaatttctcaatctaaaattgcacttc

SEQ ID NO: 97549 - DNA, 1372 bp, Glycine max
  unsure (1)..(1372): unsure at all n locations
  Clone ID: PAT_MRT3847_590C.1
ccacgcgtccggtgaccctaaaattgaaaatacttccattcctatacgccgtcgtttggccaaaaataaactaaactttcaaggttccagaatctgagtttcgactttgaagccctatctgccgcaacgcgacgcgacttcctccgactaggcaaccagagtgcttataaaaggaatagtagtaagcacattcatctcccctagatatgaactcagttgcaaggcgtttatcaagcttagtcagacattcaggtttcacacctgaacccttcaataatgggcatcatcaaatgcagcagctccagcaatgcagaggcataagagtgaaggtcatgggtgggaacttggaagcagcattgggattgatgcagcgtaagatgcaatcaagtgggattgagaggatgataaagcaagaacaaagattccatatcaaaaactctgagaagcgtgttttagcccaaaagaacttggagcggaagattcgatctgaagatcttgctaagaaacttaaggccattatgatcaagaaagtcaggggtctatgagaaagttgcagttcacacaaaaaatggccagcataagttgcaattattttataatttgcatgtggccactgcagtcgacacattctttccaatgcccgaatcaggttgtaagtactttggtagctgtgattttttgtatcagatgcatttgcaatctatacaataaataaagtatacattttatgacaagtatgacaatggtttggtcaagtcttgaatctgagtcaagatgttgaatgttctttatttgtgatggcagttttcaagcagcagttgtggatgcaggattatcctgttatttctttttactaggataatttatttaatatgctccttgaagtatttaatgaattctattcccatgtcacttgttgaaatagcctataaatatttttcatttctagaagagtaaaagatagatctctagctagagttgaagacttgtagtcggatatttactgaaggtgtgttccccgtcttgtcactttctttttggtaaattaagctaataaaaattgctatattattgttgctcgtcaatagggagtttgatatcatatggaattaaatgtctcgttaatgaattataatggtgtatcagtcctgtattagtttaatttacagaataatatgttatagtatgcccttggtagtgcataacctagattacatgttcgcagctgggtgtgatgtggttggttgaagccttgaaggtttgttgtcaattatgcgccttttctctttactgcaccatatttatttatgcaattgcagctataatagtcttgtgcaaccaatgaggattgcatcttattaccacannatat

SEQ ID NO: 97550 - DNA, 325 bp, Glycine max
  Clone ID: PAT_MRT3847_59100C.1
ggggggcgcatataaacccccaaataaatggcgccttccccaaccacaatatttttaactcatttccctcccaatttattctcaaaatttaaatagatatgaaacacattttaggggatgaaaaatttccccccccagaaaatattaacacacaaacccactctcaatgctttttttctataaaaaatttcccactctttatattataccccccataaaatatctctataacacacatttttaatatgccccataattatataatattttgaccttttgaaaaaaactcttgcatatataacacactattttcttctcatataaa

SEQ ID NO: 97551 - DNA, 286 bp, Glycine max
  unsure (1)..(286): unsure at all n locations
  Clone ID: PAT_MRT3847_59101C.1
gtngnangaagagtaagtaagannggaattaggatagaggnatntttgtattggtgaanangaaaaatatntgttgnnatntgntntgnttagggttgnaanttnganagaananangaggnnaaaagangnannaanggnaantganganaagnnnagggngaatagggaagaananngnnggtaggtagagtggangggangtnaanaganatatanggaannnnnnnggagatgaagntggtttganntnatntatatgggagaagagagagagntgaggngg

SEQ ID NO: 97552 - DNA, 259 bp, Glycine max
  Clone ID: PAT_MRT3847_59102C.1
ctattccataacttttatagcacactttcacactggaagaattttctaatttcagtttatattgagtgttatattgctattgggaaagtaatggtgatctcataggtgcaatcaatctattaagtgacagagctagaggagaatattctttgggggtaggtcatgcttgagaaatgaaaaacaataaaaattatcttttattcacttttaaacctttaaaaaaggggctaaacttttattatctattaactattatgcc

SEQ ID NO: 97553 - DNA, 397 bp, Glycine max
  Clone ID: PAT_MRT3847_59103C.1
cggccggaattccgtttacccaccttttcatgcaccgactgcacattgtggatttctagttcttcaccaaacggtgaaaaaggcaaaggagattgtctggggaggtgaaagatgacattattccgggaaccacgttgaagaggctacaacaagctaatagttgaacttgagaaaagtgtcctacattgttggcattgaatgtcccaaggatgagaaacttcctcgctgaaaattttgacaaacctaagacgcgctgtcactattctccctatggagtaatcttgtggtccccagaagttttaatatctgtaggtttcatttaaaaaaagggacacgcttagttgcaagtggaataacccaactccaggaagactggtttggccatagattgtgttaa

SEQ ID NO: 97554 - DNA, 340 bp, Glycine max
  Clone ID: PAT_MRT3847_59104C.1
gcttttcgtaagtgtgaaaaaattagtctccgtggggagattgacactgaccaacagcgccattgacgagaccctttatgagggaggacaccaccaggcagcggggcttcaagatgaccaccgtgctggaaaatccaacagggagcaccgtggtgaacacatcgttgaggacaaaggatagcgtgacggacaagacatagctgtacacatccatgatgctcacaagcgataggacatggcgactcatcttgactaagcctatgacaatagccattgatagaacagctccaactgctgctggattaataggacgtgcgtcacaaagcataaagagcatgga

SEQ ID NO: 97555 - DNA, 1048 bp, Glycine max
  unsure (1)..(1048): unsure at all n locations
  Clone ID: PAT_MRT3847_59105C.1
tcatcagtttctagtgtggaaaagtgcttgtggtaagctgcgactggcaccaaaaccctggtatactagagacaccaaatgcatggcctaaggttccccacagccctagcaatccccaaatgattcctgggtgagtgttccagtagttgcatgtaccagtgaagggagttggggaaggaaggtaagggggtgtggaggggatagtgngggtgcctggatcaattggggttgaaggtgggctcacagtgattggtgttggggggctaccacctccataagttggtggtgagttatagtacccacctcctcccaagggagggtttgatggggttgatggtgttgttgggactgagggtgttggagtagaggggtcttgtggtggtgttccacagttgctacctgagggtggtgatggagttggattataacttccaccatctgtgggtggtgatggggttggatcatagcttccaccacctgggggagttgatggagttggattgtaacttccaccacccgagggtggtgatggagttggatcatagcttccaccaccaggaggagttgatggggttggattgtaacttccaccatttgtgggtggtgatggggttggatcatagcttccaccacctgggggagttgatggagttggattgtaacttccaccaccaccatcacctgagggtgtggatcatagcttctccggccgcgtggagttaatggggttggattgtaacttccaccaccacctgagggtggtgatggagttggatcatagcttccaccacctgggggagttgatggggttggattgtgacttccaccacctccatgtgatgtagatccatgatgagagggtgttccatgttgagagtggtgtggtgagcttccgtgcccaccactcccagagccatgatctggagagcagtatgaacatagagaatttgataaatctgttcctgcatgtgggtctggagagttgaagttctggtccacaatgatggcagtggtagatattacagggatgacaaggttctgagcaagc

SEQ ID NO: 97556 - DNA, 245 bp, Glycine max
  unsure (1)..(245): unsure at all n locations
  Clone ID: PAT_MRT3847_59106C.1
ctacttctanttccctttgttctcaaagcttatcccttatnntnncaaaaccanaccatgtctanctccgcagcttctctngnactcnnaaccctcactctccgaactcgacaacctctctgtnctccccaatgnttctcctngtccntctcaatcacccctaactccaaacccatttgcatttccggggttttcctcaaaagaangctgttgtcgncgtcgctgntgncgctgtcgtnnngnnt

SEQ ID NO: 97557 - DNA, 240 bp, Glycine max
  Clone ID: PAT_MRT3847_59107C.1
cccacgcgtccgtacacgcgtccgaacacgtgcgagaggacaacaaaagaggccactctctctgtgcactctatacacaatcttattataactactatacatctgcttgctctgtgtaatacttgtaatacttgatcatcagaatgatgattttatagatgatgatacaaattcgatctttgactagaccacttgcatcattgcgtatgcgtaggctgtacagcttccttgagttgacat

SEQ ID NO: 97558 - DNA, 869 bp, Glycine max
  Clone ID: PAT_MRT3847_59108C.1
ccacgcgtccgcttctcttctttctaatagtgttctaagcagtcagtgacaatggagaggaaaagaaacaatcctacttctttcactatgttcacattgctacttggagtgctttctcagaaccttgtcatccctgtaatatctaccactaccaccattgaggaccacaactctccagacccacatgcaggaacagatttatcaaattctctgtgttcatactgctctccagatcatggctctgggagtagtggacatggaagctcaccacatcactctcatcatggatcaccatctcatcatggatcaccatctcatcatggatctccgtcacaatggaggtggtggaagttacaatccaaccccatcaactccccctggtggtggaagctatgatccaactccatcaccaccctcaggtggtggtggaagttacaatccaaccccattaactccccctggtggtggaagctatgatacaactccatcaccacccttaggtggaggtggaagttacaatccaaccccatcaactcctccaggtggtggaagctatgatccaactccatcaccaccctcaggtgatggtggtggtggaagttacaatccaactccatcaactcccccaggtggtggaagctatgatccaaccctatcaccacccacaaatggtggaagttacaatccaaccccatcaactcctcctggtggtggaagctatgatccaactccatcaccaccctcgggtggtggaagttacaatccaactccatcaactcccccaggtggtggaagctatgatccaaccccatcaccacccacagatggtgggaagttataatccaactccatcaccaccctcaggtagc

SEQ ID NO: 97559 - DNA, 385 bp, Glycine max
  Clone ID: PAT_MRT3847_59109C.1
ctcttcttcttcctcgcatctcttttgcctctttctttctcaaaccctttttcttattcctcgggatccagttcaagaaccacgtgtctcgttgcttctgttctatgtttataagtaacttgagttccttctttctcttctctttttgcattgaaatattgtgtctgatttggttaagttgggagatatatatactgtttagttaacttgcatcatatctcagtgtcaaagaccagttcatcatttttctgagacattaagggattttaatttgcatcttttggggaagatttgtgactgaaccatcttgatctgtgactattccaagagagaaagggctccatagagagagggagaatattgaataattttctcatgttccccc

SEQ ID NO: 97560 - DNA, 274 bp, Glycine max
  Clone ID: PAT_MRT3847_5910C.1
agttgatcccacactctagaagaaaaacaacatagcgagcgatcagagaaaatcgaatattcacaaatcccttcatagagatacgagaccgtcaccacaaagagtgtaagacgattcaacaaccaactttggacagaaaaaaaaaattccaaacaaacaatatttcttacactaactctctaaaattattatgccacagatggatgtggaaacgctggttaccgcctgcgccggcggttgctccgaccagaaaatcgcctacgagcctcgtcgg

SEQ ID NO: 97561 - DNA, 1525 bp, Glycine max
  unsure (1)..(1525): unsure at all n locations
  Clone ID: PAT_MRT3847_59110C.1
ctcttctttctcagtgttctaagcagtcagtaacaatggagaggaaaagacacatctctcactatttcactatgttcacattgctacttggagtgcttgctcagaaccttgtcatccctgtaatatctaccactgccatcattgtggaccagaacttcaactctccagacccacatgcaggaacagatttatcaaattctctatgttcatactgctctccagatcatggctctgggagtggtgggcacggaagctcaccacaccactctcaacatggaacaccctctcatcatggatctacatcacatggaggtggtggaagtcacaatccaaccccatcaactcccccaggtggtggaagctatgatccaactccatcaccaccctcaggtggtggtggaagttacaatccaaccccatcaactcctccaagtggtggaagctatgatccaactccatcaccaccctcaggtggtggtggaagttacaatccaactccatcaagtcctccagttggtggaagccatgatccaactccttcaccaccctcaggtggtggtggaagttacaatccaactccatcaactcccccaggtggtggaagctatgatccaaccccatcaccacccacagatggtggaagttacaatccaaccccatcaccaccctcaggcagcaactgtggcacaccaccacatgacccctctactccaacaccctcagtcccaacaacaccatcaaccccaacaacaccatcaaccccatcaacaccatcacaccctccctcaggaggaggtgggtactataactcaccaccaacttatggaggtggtagccccccaacaccaatcactgtgagcccaccttcaaccccaattgaccccggcacccccactatcccctccacacccccttaccttccttccccaactcccttcactggtacatgcaactactggaacactcacccaggaatcatttggggattgctaggctggtggggaaccttaggccatgcatttggtgtctctagtatgccaggatttggtgccagtctcagcttgccacaagcactttccaacactagaactgatgggctaggagcactctacagagaagggacagcttcctttcttaactccttggtgaacaacaggttcccttatacaacccagcaagtcagagacagatttatagcatctcttgcctcaaataaggcagcagaagcgcaagccaacctcttcaagatggccaatgaggggcgaatgaagccttgagcatgatatagttaatttggtttgtgtgtcagtttatttagttaagaatattatgtccaagacttattctaagagtgtgttatttaggtttttatcttgtgtaatatggatatcgttttactttacaagttcatgttagcctttatggtttcttattttgtaataaagtttatatattgttacttcaatagttcaattataaaagcatccaaaaaaacaaacttcttttcaatatatatgaanaatgc

SEQ ID NO: 97562 - DNA, 1158 bp, Glycine max
  Clone ID: PAT_MRT3847_59111C.1
aaatttgatatcaaagcttgggtctgtgtttcagatgaatttgatgttttcaatgtaacaagaacaattcttgaggcagtcactaagtccactgatgatagtagaaaccgagaaatggttcagggaaggttgaaagaaaaattgacaggaaagagattttttcttgttttggatgatgtttggaacagaaatcaaaaggaatgggaagctttgcaaactcctcttaatgatggggctccagggagtaaaattgttgtcactacacgtgacaagaaagttgcttcaatagtgggatcaaataaaacacattgcttagagctgttgcaagatgatcattgctggcaattgttggctaaacatgcattccaagatgatagtcatcaaccaaatgcagacttcaaggagattggtacgaagatagtagcaaaatgtaaaggactgcctctggctttgacaacaattggaagtctattacaccaaaaatcatctatttcagaatgggaaggcatattgaaaagcgagatatgggaattttcagaagaggatagctctattgtccctgctttagcactaagctatcaccacctcccttcccgtctcaagagatgttttgcttattgcgccttattccccaaagatcacaggtttggcagggagagcttaattcagttgtgggtgactcaaaattttgtacagtgctctcaacagagtaatcctcaagaagaaattggtgaacaatacttcaatgatctattatcaaggtccttctttcaacgatcaagtagagaaaagtattttgtcatgcatgaccttctcaatgatttggcaaaatatgtttgtggggacatctgtttcaggttagaagttgataaaccaaaaagtatatcaaaagtccgtcatttttcatttgtatctcaatacgatcaatatttggatgggtacgagagtttatatcatgctaaaaggctacggacatttatgcccacatttccaggacaacatatgcgtcgttggggtggtaggaaactagtagataagttgttctccaagtttaagttcttacgcatcctatctttgtctttttgtgaccttcaagagatgcctgactctgtaggcaatcttaagcatcttcgttcgttagacctttccgatactggc

SEQ ID NO: 97563 - DNA, 626 bp, Glycine max
  unsure (1)..(626): unsure at all n locations
  Clone ID: PAT_MRT3847_59112C.1
aaattctcagtctacgacttgggtgtgtatgtattcatttctgcttagagttcaaaagcctccgtttttttattattatttatatacttgcttgttccaattcatcactttctcttaatttgagtttattttcaatcgattatgctgtgtgcttctccctctgtgccgtaacactttctaagaaacccaacatcaattttcaattcccatttccgtattgcccttgatttaatcgcatggcttatctcatgatttggttgggattacttttctttttccttttttttatgtattaatagtttcattcacaagaactctttattctcggggattttgtcttagttgaattagccgttatgttatgataatgttctggtatgtttttatatttatttttgtttgtttcagctgtaacatttggccaaccttgattaaacgattttaactgaaattgggaagggtgtgaagttttgattgctgggctgcttctgcaagcatagcttagngggtacctgtgatttgnatgtagtttgatagatataaacacatagtaagattatttatgtaagcccgtaggagcaatggattatctcgagctctcgaattgattctgatatgagaaagan

SEQ ID NO: 97564 - DNA, 476 bp, Glycine max
  Clone ID: PAT_MRT3847_59113C.1
cccacgcgtccgaaaagattgatgtgtttagctttggggtagtcctattggaactgacaactggtaaagaagcaaattatggagaccaacactcatctctttctgaatgggcgtggcgtcacgttctgattggaggaaatgttgaagaattgctagacaaagatgtcatggaaggcatttactcagatgaaatgtgcactgttttcaaacttggggtcctgtgcacagcaacactgcctgcaagtaggccttcaatgagggaggccctacaaatattgcaaagcttaggagaaccatttgcttatggagatcagaagaattttggccactactatgatgctattccccttctcaagagttcagaaaaggaaactaggttggatgttgttgatcatagcgaatgactaactaattggattcccaaggatgccatgttagtgcaaattctagcacattggattttaggatggggaata

SEQ ID NO: 97565 - DNA, 954 bp, Glycine max
  Clone ID: PAT_MRT3847_59114C.1
ggctcgagccataacaaagaatttatttcacaaggaacttcttacttcatccaagttcgctaatacaatatattgtaatggcaacagtagaaacatcccatgaagctatggctacagtggccaacaaggcaccaatcacttctgagagaaagctccctgaggacttggacaccaaactccccaaaccatatttgccacgagctttgagtgcccctgacacggagaatgtgaatggcacgcggggccacaaacacaacgacatgtccgttcttcagcagcatgtatccttcttcgacctaaacaatgatggtgtggtctacccattggagacatataagggattccgtgcactcggtttcaatgtgattctttccttcatattttcgattggtattcatgtgactctcagttaccctactcttcctgtgagtcaccctttacatggaactggccttagtggtaaggatttaccttaccattactacaaacacttactgaaggcatgttgggacatgactcacagacatggcggtgcatatgacttctttggctggtcctctatctttctctttcaactttttgcatacacacacacatgttgagaatcttgaaccgaaaatgggtgattttttttaactaactgcagggctgccagtaaatttgagtggggagttttgtatgtcctagcaagagatgaacaagggtatctgtcaaaagaagctgtgaggcgttgctttgatgggagcttatttgagtattgtgctaaaaaccccagaggtgctgctggaaagatggcttgacagttattgttccctactgtattttaagttcaccgaaatttgcaaaacagaacgtccttcggtgcaaaattgtcttgcagttgtattgtatgtgtgctgtcttatagaagtctaattattatatggtatatatatacttactttctagtttatt

SEQ ID NO: 97566 - DNA, 1109 bp, Glycine max
  Clone ID: PAT_MRT3847_59115C.1
tgttctcgtgggcggacgcgtgggcaaaattggtaaagattgtgtgctccaatgccatgtgtcggatagaatacacaccagcaacgcgagtcacgaggaagaatctgaatctgttactgttgcgtgtaccatcccttcttctcctctcttcgcgacacttctttaagttcttcttcttccctgttagttttattcagcatccaccacttccaaacttctacaaagaagagaaaagaacaagggattctcttcatccaagttcgctagtaggacatattgtaatggcaacagtggaagcatcccatgaagctatggctacggtggccaacaaggcaccaatcactgctgagagaaaggtccctgaggacttggacagcaaactccccaaaccatatttgcctagagctttgagtgcccctgacacagagaatgtgaatggcacgtggggccacaaacacaacgacatgtccgttcttcagcagcatgtatccttcttcgaccttaacaatgatggtgtcgtctacccattggacacatatatgggattccgtgcactcggtttcaatgtgattctttccttcatattttcgattggtattcatgtaactctcagttatcctactcttcctacatggctaccttcaccttttttcccaatttacataaaaaacatacatagggcaaagcatggaagtgacactggtacctatgacacagagggaaggttcatgccagcaaatttggaattcatgttcagcaagtatgcacgtgaggtgcctgataaattgacattgaaggagctgtggcacatgactgaaggaaacagggttgcatatgacttctttggctgggctgccagtaagtttgagtggggagttttgtatgtcctggcaagagatgaacaagggtatctatcaaaagaagctgtgaggcgttgctttgatgggagcttatttgattattgtgctaaaaacagcaaaggtgctgctggaaagatggcttgacagttattgttttgttccctacttggtgctctgctgtattttaagttcaacaaaatttgcaaaacagaactgttatttagtaaaattgtcttgcagttgtattgt

SEQ ID NO: 97567 - DNA, 318 bp, Glycine max
  Clone ID: PAT_MRT3847_59116C.1
aacacgcgcgcgcgcacgcgtttttttactctttcgtactgttttgacaagacgagagagtgtagacccacaaaggactttaataattaatactttttaaccactactataaagccagtctagattatctatgcgacttttctcgcaaagaaaaaataactcaatatctctctataatagttcgagctagatctgaactaggcagacactcgcatacgggtcttagctaacatatactaatttatgacatatatgacatgtgcacaacaaagttgccacctttatcagtgaagctcctcacctcaagatcgatgttac

SEQ ID NO: 97568 - DNA, 459 bp, Glycine max
  Clone ID: PAT_MRT3847_59117C.1
ccgggagcacgaatacgcacttctctcgtttccctctcgattgctggacttgttgttgctaactgaacttttctgagcaagaatgacgggtagtgaaaagggtacgcaaggacattgtgaaaggtaggacctgagcaacaccgtaaggcgctgcccgtataacattctgggaatcaccgaggccgcgattcaacgtccggctcgtacggtaggagggaatggtatcactggcctcatctacaaacagacacgtgtggtgctcaagatctttgtgacaccaagtgtatcagtgacgctcattcacctacgctgagcatgctaggatagatatcgttacggtcatggacatgatatatgctctcaagagacacgtaatgaccctctactgatctggagagtaggtgtttgtatcttatcgtcaggctcttttgatttggaggataatctgaatttcacaaa

SEQ ID NO: 97569 - DNA, 365 bp, Glycine max
  Clone ID: PAT_MRT3847_59118C.1
gttactgttaattatcttagtgctgatccttggaattctgattttactgcctactgtaattttattgtatgaacagtcgctattgtactaacctaaaacttgtaaacctcgatagtctaaactcctattggcaaatcgtggtgaatgcctttgttcaactcgagaccacttgatattacagtatgattattaaggccgacattgtccatagcttttgtgggcgcatgcctaagtgggcatcgcattcagagttctagcagcgggtggcaaggtcgctgattcctaagtagcacttggctcgccaatagtgtgttttgtcactattatacatgtcctttgagactaaaagctcaaggttcaagccc

SEQ ID NO: 97570 - DNA, 428 bp, Glycine max
  Clone ID: PAT_MRT3847_59119C.1
cggaaggcccggaacgacccacgcgaccgaccacgcgggcgctgacatatattccaccaccagcccagaaaaacccagaagaaaggggggaaaatggcagggagagcatgcgccacccccaaagaccccgccaaccgagcctccaacaaggccaacagtgcagagagcagctcaacccacctctgtgagaacgccgaggatggcgcagccatacccgatgctaaagggacatcacaagcagaactagaaccaactgggatgggaggccaatgataatcgccaggagaaagccctcatcgcagcagttcccagacggacccaacaaccactgggggccaggacaaccccgcagagaccgcaagcccagcactaggaggcaaaaccaccaaaccgcactgagcaaaaaacactgaatagcacaaagagac

SEQ ID NO: 97571 - DNA, 515 bp, Glycine max
  Clone ID: PAT_MRT3847_5911C.1
aaaaacctcgtaaattatattttaaaacaaaaataaataaataattggtcaaaaagattattcacaaatgaatggattagatgtcacgtagctcttcccttgttgagttaaatggtagctaaacagaagggtctattgtaatatttttttaagttaatagattgggacaaatttaacgttgggtgatgccattttgcaaaagggtaaagtctaagaggctgattgtaattttcccttgaaaaatatgtgctatttatactattttatgtgaagaatctgtattgcatatgttttggtcataacatgcttgtttgtctgtgatggacttcttcgacttgactggtgatcttttttctcaactcctcttaataatttaacaagtttaatttggttagcctgtaagtataaattgaacctcttgaaattgctgctgtttatatggacttggatctgacattgtcttgatgccaccttatatttgcgctcatcttgctaagcttttaacattatgctat

SEQ ID NO: 97572 - DNA, 821 bp, Glycine max
  Clone ID: PAT_MRT3847_59120C.1
ccacgcgtcagacaccacctcctctcctacaattttcaaaatcaaaacactcatacacacctctcaattcaaaccaatttctactacttccttcaacatctctccatcacaagcttacacaactacttacttcaacctcaacaacctctctttcaaaattagaaacaaaaaccattcaccatggcatcatcagcagcagcaacaacaacaacaaacacttggatcaaaaccacactcccttctcctcctacaaccttaaagaaaaggtttccttgcaattccaattccaattccaactccaacgccatcacatgttctcttcaaacactccacttccccaaaaagtaccaaccaacctccacaaccacaaccacaacaacaacaaccactccagcaagagaaaccaaaccagtaatcgcttctccctccgaaacaaaacacccattacctcaaagttggaactttctccagaaagcagcggcttcagccttagacatggtcgaaactgccttagtctcccacgaacgcaaacacccactccccaaaaccgccgacccacgtgtccaaatcgctggcaacttcgcccccgtgccggagcacccggcgcagcactcccttccggtggccggaaaaatccccaaatgcattgagggcgtctacgtccgcaacggcgcgaacccgctctacgagcccgtcgctgggcaccacttcttcgacggagacggcatggtccacgccgtcaaattccactccggcgccgccagctacgcctgccgcttcaccgaaacccagcgcttagcccaagaaaaaaccctcgggcg

SEQ ID NO: 97573 - DNA, 122 bp, Glycine max
  Clone ID: PAT_MRT3847_59121C.1
ctctcactttgggggtgaagatgcggtatttggtgggccggagattttgggattggattatttcatctgagaaaaggactctcatgtatactcagaatgcttagccagcacttcaggagccg

SEQ ID NO: 97574 - DNA, 324 bp, Glycine max
  Clone ID: PAT_MRT3847_59122C.1
atcccgggtcgatctacgcgatccaagctcgaatctcttgtctgcttgcgcgctagtttgcctagcgatgcaaagctcgctggtatgaggggcttgatccctcacataaaaaggactgagtggacgtgagaagaggatgagaagttgctttatattgcttagctcatgcccacacaggggagaacaattgcgacaattgatggacaggccctttccaagagtcgtgagcggtgcgagaagctcctggcgggccccggagtggtgcgtgaagactatgagcccagggatgaaccttataattgcttactcactagaatgattcaa

SEQ ID NO: 97575 - DNA, 345 bp, Glycine max
  unsure (1)..(345): unsure at all n locations
  Clone ID: PAT_MRT3847_59123C.1
cttctttccagatccacagtatgaaaatgttcaacacatcatatgttgtgattcttatgctacatatgcttacgactttgtgtttgagaacaacgttggattttcaagaactaaatcagatgttcctacaattcagattgcatttcagtactcagttgtagttcctcctcaggaactttctatttctaattcaggaggggtttctacaaatagaaccaagcatttccttcagcgccgggtaaagatccgaacattggaatttggtgttgctcagaacattcatgaactttatgatagctgtgatcccgaagntgttctatctttgcttggtcacaaggttatatt

SEQ ID NO: 97576 - DNA, 347 bp, Glycine max
  Clone ID: PAT_MRT3847_59124C.1
gattcaaaaaaaaaaaccttacaaattaacataacatgttcacaaaatcaaaattcgtcaacaaagtcaaaacttagaaaatttttgcgaaaaagtgaaatagtttacagtaaaagttgtcaaagaaaaagttaatgataaaaagtacaattatacaagcatgtcacatcaacttgacaataaatatataatttaaagttgtttttaacaagttaaaagtaaaatacaccaaattaatttgttggtagtaaaatgtcccaaaaaataaaataaaaaaacataaaaatgtgattaagctaatttttctaattatatctctagtgagaattaatttttaaaaaatataa

SEQ ID NO: 97577 - DNA, 414 bp, Glycine max
  Clone ID: PAT_MRT3847_59125C.1
gcattagcgcaatcaccaaaccttcatgctgtggcgccgtgatacaacagaagacaccaaactaatcccatttaatgggggttattaacaaaaacacccaactggaaaaaaaaagaattcatacctattcctaactgacatgatacatataactcataggggaagcgcaaactcacaaggatcaaaagaaaccaaaatacccacataggagagaatctggtccaaaacttaagcaatctcatgctaccgcaatccctgctactgaagaccccgcctgtgcttatgaacacataccacgccctccttaacctcggagaacgataggcaaaccttccattgaactgacacaaacccgccctaaacctgcttgaacgagctgcacagggctacgaacaatacgtttgaacccatgcc

SEQ ID NO: 97578 - DNA, 279 bp, Glycine max
  Clone ID: PAT_MRT3847_59126C.1
ccgttgtgaaccactcgatgaggggaaagtgggagaattcgttctcgtgctgcggaaattgcttctgcactttcagagtttcaacattctcaaatgatatcccacagttggcgtcttatgagcacaatctttgggagcagctgcttaggatgcagaaggagcatgatgacccattgtttccgtttatgagccccggaggctaagggtttgctttgccaacatggatgatgaaattgacacgctgttggagttgcagctgcctgaggagaaacgcaatct

SEQ ID NO: 97579 - DNA, 883 bp, Glycine max
  Clone ID: PAT_MRT3847_59127C.1
ccacgcgtccgtgcacagagcagagtgaaagatgggacgcgaagcgacgaagaagaagaagatgaagaagaatgcaaaatctgggggttttgaatcacttggtctgaatcccaatgtgttcaaaggaatcaagcgcaaagggtacaaagtgcccactccaattcagcggaagaccatgcccctcatcctttctggctccgacgtcgttgccatggctcgcacgggctctggcaaaacggcagcgtttcttgtccccatgcttcaccgcctcaatcagcatatccctcagtctggtgtcagagccctcatcctatcccctaccagggacttggcccttcaaactcttaagttcaccaaagagcttggccacttcacagaccttcgtgttagtttgttagttggtggagatagtatggagagtcagtttgaggaattagctcagagtcctgacatcataattgccactcctggtaggctcatgcaccatttgtctgaggttgatgacatgtcattgcgcagcgtcgagtatgttgttttcgacgaggctgattgtttatttggcatgggtttcgccgagcagttgcatcagattcttgctcagctcggggagaaccgtcagaccttgcttttcagtgccacactgcccagtgctcttgctgaatttgccaaggctggcttgagagaccctcagcttctccgcctcgacttggaaactcgaattagccctgacttgaagcttgccttcttcactttgaggcaggaagagaagtactccgcgttgctgtatttgattagggagcacattggttctgatcagcagacattgatttttgggtccaccaaacctcatgtggaagttctcaaccttttggttcctgaaaaa

SEQ ID NO: 97580 - DNA, 381 bp, Glycine max
  Clone ID: PAT_MRT3847_59128C.1
gtttgaccaagggtggagcagctgaatatagagcagatgcatatggctgcatgagcagcaagggctgctgccatgacaaagctaattggatattctgacataggccgcctatctatattattgaatgatctcattgatctacaactgaccctactatccacaacattacacaatattatacataggaattggatgagagatgatcttgcatagagcatacttcaggttaacccaaagatttgaacggagagctacaactactaagtcatgctagacttatacatacgttccaccaagaatgatgctgaatactaatatatgattattgtataatgaggatcatctatatacgccgttttctctacgctgaagatggatagc

SEQ ID NO: 97581 - DNA, 335 bp, Glycine max
  Clone ID: PAT_MRT3847_59129C.1
attatgctttccataactttacccctgaggaggtcgtggtggctttctaagctgcatcaatggctagcatcaaagctgccaaggctggaaaagctgtagactaggaaaaaggctagactgaaataaaggcagatacttctgccaagagggctctggatttggttgcctcattctctgaagaggcagtgagcaaaatagtgtacatcacgaggaacaacactctcactaagcactcccgagttgaattcttgtacaacaaaaatgaccccattgtaaagttcgcgactgatgactaatttgccactaagtatacatcatgccatgtacagaaaggc

SEQ ID NO: 97582 - DNA, 384 bp, Glycine max
  Clone ID: PAT_MRT3847_5912C.1
ccacacgcgtccggggacaaggaagtttaactcagagggtttcctaaagccgccgaaggagccgaagggttaatttaaccgttccgtcaagcgtgcgtggggtcctgataggcgcgcttttttggaccgatttccggtcgaagaccaacgggcggtccattccggttcgaagggccaacaaggggcaggtggtggggggaacctacaagggccgcgggggcaaaggggtccaggtttatcgccgaagggggttaatcaaaatgaggcgcataacccgcaggagggttaacggttcaaccgtcaacgttggatttaacctttccagggtggtggtaaccaagctttgattggccaaggaccgaaaatcttggttggatcggaagg

SEQ ID NO: 97583 - DNA, 259 bp, Glycine max
  Clone ID: PAT_MRT3847_59130C.1
ctctagccgaatctgtctctgtttatgtcgctttctttcaatctgagtccgtatgggaaagtcaatggcatgtttggacggcgccattgtgatcctgaggtgcttagtaagccatgtcacatctgatgcatccgatcaccgatacatgaatggcgattccgatgacttttatgccaacaaagtgggatcctattacaatctcagtgtgacataccgagattgagatcttcctttttgatcggcagcttatgaggtaaaa

SEQ ID NO: 97584 - DNA, 295 bp, Glycine max
  Clone ID: PAT_MRT3847_59131C.1
aacaaaatcgccgtcgttaaaaatggtcattcagaccaacatttctggcaaggggacggctaaagtatcggcggcaccaaagcctttccccgaaaaggacccttggcaatctaacgagaagctgagggaaccaaaagcccccccaaaccaggttcgccaattatcagacgaactatccgaagtgctgcattaagcccgtttaaaaatcccctcttacaagaaatcctttgatctcgaggacgagacaggtcaaaattcctactggcacttaatcgaacatgacatggggcggccc

SEQ ID NO: 97585 - DNA, 271 bp, Glycine max
  Clone ID: PAT_MRT3847_59132C.1
gggatagaggggcctggtgtgtatgagagtctatggctactgctgttgctgccgtgtaccatctgggtactctgcatggcctcaggactatcacaccaggctgtgatgtcggctgatgccgccagagacttacacatgattgaacagtgaaagtcacgagtgtagtgctcgaacgaggtaaactacaattccagatcaaaacctgcagtggcagatgctgagaaggccgtgacacctttggagacactgcctgctgtaatggagctgactc

SEQ ID NO: 97586 - DNA, 2197 bp, Glycine max
  Clone ID: PAT_MRT3847_59133C.1
acacgccataatagcattgggttcttctctagtctctgtcctaccacaaaaatggtcccaaaaccaatcttagtcacaacaccaccgccggcaacttctgcaccctctccactgctcaacgcagtttcacccctcaaaacagaagaaaaaccccaaacacaaaccctaaaaacccccaccaccaccactcaaaaagctataaccaaaccaagcccatcatcatccaccaccaaaacgacgccgcagcagcgcgtggagctaaagagaaaaacaaactcatgggtccccgcactaatgctaaacgcattcgacgacatcatcaacaacttcatagaccctccactcaaaccctccatagaccctcgccacgtgttgtcacaaaacttcgcccccgtccacgagcttcctccgacggagtgtgaagtcattgaaggctctctcccaccgtccctcgacggcgcctacatccgaaacggccccaacccccagttcctcccgcgtgggccctaccacctcttcgacggcgacggcatgctccacgcgcttcgcatctcccatggcaaaaaacccacgctctgcagccgctacgttaaaacctacaaatacaccatggaaaacgacgccggtttccctctcatccccaacgtgttctccggcttcaactccctcgtggcctccgcggcacgtggctccctctccgctgcacgtttcttaacggggcagtttaaccccgctaacggcattggcctggccaacaccagcttagccttcttcgggaatcgtctcttcgcgcttggcgaatccgacctcccttacgtcgttaacgtaacccctgacggcgacatcgaaaccctcggccgtcacgactttgacggaaaactcacgttcagcatgacggcgcaccctaagatagaccccgacacagcggagtgcttcgccttccgttacggccccgtgccaccgttcctcacctacttccgtttcgacggtaacggcaaaaaacacgaggacgttcctattttctccatgctaacaccttcgttcctccacgatttcgccattacgaagaaatacgcgatcttctgtgatattcagctcggattgaaccctcttgacatgatctccggtggctcccccgtcggctccgtcgcctccaaggtcccaaggatcggaatcctccctcgtgatgctaaggatgagtcgatgatgaagtggtttgaggtgccggggttcaacatcattcacgcgataaacgcgtgggaggaggacgagggaagaacggtggtgctggtggcgccgaatattctttcgatggagcacgcgctggagagaatggagctagttcacgcgatggtggagaaggttcggatcgagctggacacagggataatcacgcggcaaccggtgtcggcgcggaatctcgatttcgcagttataaaccctgcgttcgtggggaagaagaacaggttcgtttacgcggcggtgggggacccaatgccgaagatctcgggggtggtgaaactcgacgtgtcgaagggggaggagcggagggactgcacggtggggtgcaggatgtacggcgagggttgctacggcggagaaccgttcttcgtggcgagggaagaagggggcgaggaagatgatgggtacttggtgagttacgtgcacgatgagaggaagggggagtcgaggtttttggtgatggacgcgaagtcgccggagctagatgttgtggcggcggtgaggcttccgcggcgggtgccgtacgggttccatgggctgtttgtgaaggagagtgagctgaggaaagtgtcgttgtcgtgaagctgagacatgatggttcgtgtgtggggcttgtcttccacgcttctgtccattatacatgtgtcctgtaatgtaatgtatagcaccattattgcttctcagaattaattgatgaggtgtaattagtaattacatgcaagtctatgccagctaaacaaagtaatcatcgttcatgtatgggtgaatcatgaaggaacagctgaataaattatttgtatttttcattattaccgttacatttgtttttgagttttatctgctacaattaagctactcaagttagttagaaatgaaatgaaatattgtaacaagtcatacgtacatgtttttatttcattagaaatgaaatggtacatttgtttttgagtttttt

SEQ ID NO: 97587 - DNA, 457 bp, Glycine max
  Clone ID: PAT_MRT3847_59134C.1
ttttggacaactaattgaatttcaaattttcactggacttaaaagtctttctttttcacgttcaagatggctacatagttccacaaagaactaataaataataatccttacattaacttgcacaacgctgtggagtcaaatcatctttcttatgcatgcgacccttttacattatttaaaaatacttcttggcaagcattccttgtagtgagcttaacaatcctatggcaatcgcagggtctccgccgatgggtttcactagccaactgtgatgaccaaatggatttatctttggccccaaataagagaagaagacagaaggccaaccaacaatgaccacgaaaaaacaattggtccggtgtgccgttttcggcgacccatgaaacctctgaggaatggatagagatgaaaaatcacccagaaggcaaagaaaactctcccaaagagggggtccccc

SEQ ID NO: 97588 - DNA, 1017 bp, Glycine max
  Clone ID: PAT_MRT3847_59135C.1
tagagaatctttagcgtatcatggttgtgcagaactgttccaggatgtacataccgaacttattcaacacaaacgatcatggatgataaaacgtgggattgtcaaggggaagctttcagtcaactcagccgaagaaagactaaaaggctcctgtcctttaatgcctcaggagattggtattcttcttcgtgcttatggatactcaaaggatgcaattatttatgtatctggaggagaagtctttggaggtcaaagaacattgattcctcttcatgctatgtttgaaaatgttattgatagaacttctctaagcactccttgggaaatgattaggctctatgggaaagaggtgaaccttgttgatactcctggaccgccacctttcgttgaagaagtaacaaagcgtgcagcttggaaaaatgcaggtccacgtcctcgcccacttcctccacctccagctaggccaaaatcatacaacatagaaggttggtggggttgggtagctgagagtgataatgagcctgatagtacagttatagaactgaggaccaatgcccataaattactatgggaggctattgactatgtgatctgtgttgaggctgatgtattcatccctggatttgaccgtgacgggaaggggcatccaaattttgctagcttggtgatggggcacaggctatatcagtcagctgcatcaaagacatttagacctgacagaaaggaagtggctaaacttctagacgagatttgtgaccataggcatcatgcaaatcatacatggctagaaacagttcgaaggcatttgacaaaaacattacttgatggaattatagaagcatcaaataaatcaaaaccactatcctttctctctcatccagtccctgaatgctcttgttcacggcgtgactcctttgaagtatcaaagaattcttctagccctttaacttcccaattatggacagctcttagtgtagctcaccagtgtcctgcatggatggacactggtccaatttc

SEQ ID NO: 97589 - DNA, 609 bp, Glycine max
  unsure (1)..(609): unsure at all n locations
  Clone ID: PAT_MRT3847_59136C.1
aaaacaccttttttttttgccaaatttgttttactgcatgacccttccttccttatgccggtgtaaaaaaaaagtttgcttctttgtagtagtcacgattgaagttgattatattaattgtaatatttgtaagttgattttattgtaacgatttcaagaggcaaacgactattcctctattttcaaggatgaaatgaatgagaaaaatcaactgaaccctgcttctgcgttcctctgtgttttttggttggctcacataggaaaaggaatagatgccttttactgttttgaaacgcttttttctaaaaaaaacctttggtatgatatctctacattaatttaatagaaaaatattatagtatagcactaatcatgtaagtttaataatagattaagaaaaatgaaaaaccgtatgatgaaccanatcaaatggctgaaaattgattgatttggatttgatgatatattaaaaattgatcaaatttaatcattaatatttaatttatatttgatttagatgaatttgtctaaaacttaaccaaaccacattcagagcattcttagtgagagattgaggataatattttgtattgtgcacaacaatgttag

SEQ ID NO: 97590 - DNA, 274 bp, Glycine max
  Clone ID: PAT_MRT3847_59137C.1
ctgtacgcgtgggctcaaatgccaaaggaacgaatctatggccaggacaaataaatgggggagggagaccatgtgtatgtgatagcaaacgatgtgcccaaaagacatgcgattgactatgcttttccaagccgcacaacggcggggtctaccagaaaccgatgccggatcggattgttgaccgggctgagttcacgtgatggtgatgcataaagagcatgtgaagcatagtttggtgctctttactgttcttttacgtgctcggaggaaccgc

SEQ ID NO: 97591 - DNA, 628 bp, Glycine max
  Clone ID: PAT_MRT3847_59138C.1
ggtggagaagaaggtgaagggaggagttgagtagagccgagtgtgaagcaaaaaccatcccgaagttttcatctttcaatcaaagggtcctcaaagaatgctctgaaccgtcgttatcttcttttccttccaatcgcgtaaactggggtgatggtgggagtgctttttctttgaaggatgcgaattcacaaggcaatcagtcaaccagagacataggtgttcagtttaatgctgttgagtttaaaaggtccactgaagaattgaaattgcgttattctaattctaacgaggaagcagttaataaaaccgcaaaaaagaagcggaaatcagaaccctatggcgaggaaccttctggtgaaaatgaagaggaggcagaaatgcgctataggttttatgaaagtgcatctgcaaggaaacgaaccgtgacggcagaagaaagagaaagggcaattaatgcatcaaaaacatttgaaccgactaatcctttctgccgagttgtcctgcgaccctcctatttgtataggggatgcataatgtatctgccttccacctttgctgaaaagaatttgaatggggtttcgggattcatcaaacttcagctgtccaatggtagacagtggtccgttcg

SEQ ID NO: 97592 - DNA, 1760 bp, Glycine max
  Clone ID: PAT_MRT3847_59139C.1
ctctaaagcagggaagggttggagaagaaggtgaaggaagtgagagtggagtagatctgagtgtgaagcaaaaattcttccaaagttttcatctttcaatcaaagggtcctaaaaaaaatgctctgaaccttcgttttcttcatctttttctttttctaagtccacaatcactatatcactatgccttgcccttgtttcctcaagcttgctatcactcctcaatctacatacctgatcactgaggattccagataattttctgaggaaatatgggacccagctttctacaattgctaccctcactgttcctgatggtagtgtttggcgtataggattgaaaaaagcagacaacagaattttgtttgttgatggttggcaagattttgttcaacactactccattggtgttggatacttcttggtgttcatgtatgaagggaattcatccttcattgttcatatttttaatttgagtacctctgaggtaaactatcaatcggccattagaaaccgtaatgaaggatcttgcttggccaattatcatcatatttttgattaaatggaagatgtagacaaactagattgaatggggtttcgggattcatcaaacttcagctgtccaatggtagacagtggtccgttcgctgcctctataggggaggtcgagccaagttaagccaaggatggtttgaattcacagtggagagcaagttaggaactcaaccgcataaactggggtgatggtgggagtgctttttcttcgaagaatgccaattcacaaggcaatcagtcaaccatagacataggtgttcagtttaatgctaatgagtttaaaaggcagagcccaaacatcaaccacactaaactcttgaaccctcacttgcagcatagcatcaaaacaaccaaattgattagaaactagggaggggaattaatttctgatagtgaaaatgtggccgataagccctggaggttttatgaactggcatctgcaaggaaaagtaccgtgacagcagaagaaagagaaagggcaattaatgcatcaaaaacatttgaaccaactaatcctttctgccgagttgtcctgcgaccctcctatttgtataggggatgcataatgtatctgccttcctgctttgctgaaaagaatttgaatggggtttcgggattcatcaaacttcagttgtccaacggtagacagtggtctgttcgctgcctctataggggaggtcgagccaagttaagccaaggttggtttgaattcacagtggagaacaatttgggagaaggtgacgtctgtgtgtttgagctccttagaacgaaggaagttgtgctgcaagttacggtatttcgcgtaaccgaggatgcagggttgttgaaccagcctcctatgatgcagcagcagcatatcccaaatatgagccacactaaactcttgaaccctcacttgcagcatcgcgtcagtactaccaaattgattagaaattagcagggagatttaatttatgatagtaaaattgtgcccatttagccctggattctgagtgatatgtaaagcatctaatttcttcacttggaactttgatgctttacatgttcataaacattggaacttagttattgtatcaatgatacaaatttcttttgtttttgacttgggttgtaaatagattgttaaatcagctgatcataaactgagtcgaaatgtttgtgccaaaaaaaaaaaaaaaaaaaaaaaaaaaaaaaaaaaaaaagataa

SEQ ID NO: 97593 - DNA, 678 bp, Glycine max
  unsure (1)..(678): unsure at all n locations
  Clone ID: PAT_MRT3847_5913C.1
gcaacaaaaaaacttttccatacagggatatgggtcagttcctcttgcttttatcgtttccactgaggaccaggaaattccattgaatttccagcattggatgattcaaaatgctggaatcaatgtcgaagttctagagatcaaaggcgcagatcatatgcttatgattagcaagccacaagaactatgtgattctctcctccaaatagctactaaatatgcatgaatcatgagaattcatttgaaaccacgagatgcttacaagtaaaataatattcggttgcaacgacgagacagatatgaagttgtatttttcatatgtcaggaaaaaaatgaatgttgcaatttgaccatggttgtgaataaaaattgataattctttacgtggagtcatgagtggtgtttggcggatgtgagtggtatatgagagttagggataaatgttacttttgtgagaatgttgttgtgtgtgatgtgttgcaaaatgatgaaattatatattggggtgagaaagtttgctgggagaatttaattagatagtttggtgggagagttagataagagagttaggtgnggagggttagatcggaaaattaggtagaagcacactgttccacatcatttatcgagttcatgtgaattattgagatctgtgttaatgtggttgtcaatacatat

SEQ ID NO: 97594 - DNA, 271 bp, Glycine max
  Clone ID: PAT_MRT3847_59140C.1
ctagctatctcgatcgaactgtccaaggtcctgtcacgtggtgttggtatgggtgttagttagggggactcggtacgctggggcagcgtggtgctgcgttggttaccagtggctatagtaggtacggtggtgctggtggtggtatgtacagggtgcgccccgccggttgtagcgtatccaacgaaaccgtaaaaccacccgggtgtggtggattgagagcaatggggccgcggcaaaggccggccgccgggaaaggaggcaacacgcgagg

SEQ ID NO: 97595 - DNA, 310 bp, Glycine max
  Clone ID: PAT_MRT3847_59141C.1
atgacccatgacttatggttggtgacttaacttttacatacaacgggcacggcacacaggtcggagctatggtcctaacaggttcttcttctggccccggcgcagtacagagaggcatgagtgacaaaaaagatgagtcggcaatgccaaaggacgcaaaaaatgtgaagtctttgctgaaatcaatgggcctggaagactactaacctcgcgttattcacaagtaccttgagctttgatatcgatacaacggctatgtcttaaccgacgcacaagtctatacacagcatgctgtataacctgcacttga

SEQ ID NO: 97596 - DNA, 439 bp, Glycine max
  Clone ID: PAT_MRT3847_59142C.1
tccacgcgtgcgttcattggagagaggcggggggctagttaattgcatccgtctgtgcctacatcagatccaaagctaggggccatacgagggagctatggcacaggctaaggtgcaggattagaagaatgaagaggaggctgctgatgactctgctgacaacgaagaagacaggggtgaacctgtggatgatctgaacgattaaggtgacggtaacagcgagggatacgccatgccctaagcccatcctgaggaagcaactgttaagaaaaagtatggaagggtgccgccactgaagcccacagtactagaccaggatcacgaacgcgctgactatgactctgctgagagggctggggggcagcagggtgcacgaacacctgaaggaccacttgcagcgctgccggcaaagtggcaggcgaaatgcattgcagatgtg

SEQ ID NO: 97597 - DNA, 1000 bp, Glycine max
  unsure (1)..(1000): unsure at all n locations
  Clone ID: PAT_MRT3847_59143C.1
gcttcattcattggcttcttccactcctcacaataacatcaacatggctgataagcaatcccaactaaacggtgcgtattacggccccgcaatccctccatcggagctgccacgtcaccaccaccgtggccgacgctgctgctgttgcctcttcagcttcttctggaagcttctccttgccatcgtcgtcttcctcgttgtcgtattcctcgtcttctgggctgtggtccagccacgcaccttcaagctccatgtcaccgacgccaaactcacccaattcaacctcaccaccaacaacaataataacattaacatgctccgctacaatctcgttctcaatctcactgcacgaaaccctaacaaaaaactcaacatctactacgaccaagtggagggccacgtgtcctacgaggggatgaggttcgcctcagcggacctgatcacatggcgaaactccttccgccaatacacaaagagcacgaacaacatgagcggggttttcacggggcagcacgggttggtgttcgatggcgatcacgtgaaggatttcgaaaaagatgagagaggtggggtttttgatattgatgtgaagctttactttaacattaggtttaggcttggtgacttcataggaagtagctcaagggttagggcgaagtgcgagcttcaggttcctttggtttcgaggggagtgtttcttcccaccaggtgccatgtcaaattctgatgagggtccccgtttcacgtgcattgcatttaattttgtcactcatgtttattaaattcgttggttggattttcatttttaatttctccccttatagattgtttaaatttacatagtatggctttttcttctttcttttttttttcttttttttttttacgtggaaggcatggttgatgtataataaaaataatgtttgtgtgtaactttttattatttgttcaaaagaaanagaaaaaaaaaaaataaaaaaaaaaaaaaaaaaataaaaac

SEQ ID NO: 97598 - DNA, 695 bp, Glycine max
  unsure (1)..(695): unsure at all n locations
  Clone ID: PAT_MRT3847_59144C.1
gctgattcctctcaattaaatttcccatgttgcactaagttacttacgtatgtatgcatgcagtccaggaacactttggggtaaacacccatccaaacaagtagagtcaatagttcagcatttaggccgtaacatttagcaacaaaaaaatctttaacccaacaagtgctctccgaaccaagctagatagtctcctatcactaggctcaccaaccaacctggactttgattctgattattcctaccaaaccataaggattgtttccagccatgagttcccatattacataagcgctcttgggtgggccattccatcaaatctttgagaaggggcccaatctcgtatttgatggtcggcgtggcgataggcttcgcttctacgactgcctccccagccgttgcaaagactgagcgagaacggtaaggggcgaagaatgtcgttgcgcggggatgcgattagccaagctggggcaaacaaagccgtccggccccctaccggattgggaatgcgaaggcctttccttcgaaaggagaccggggaaataaagagctatgctattgaccgaccctttcgtagtgacttcgaatcaatagtcctatacttttttctccgtntgtttgaggcgggccgaatagagaataaaatgaagaaatacgggaaagagttccaaacctttttttttggtttaagggct

SEQ ID NO: 97599 - DNA, 539 bp, Glycine max
  Clone ID: PAT_MRT3847_59145C.1
tcccgacaccctaacactttcttacacgctagttttgctgctttggcttctctctcctttctttctttctttctctcctaaagtttgagagaatcaagagaaggagaggggagagacagagagaaaacaataagtcaaaaacaagaacaagaaagacatataattttaaagagaaacatggccgtttccagtgcttcattgagggtggttgccttccttagcctcattcttgcagctcttatgacagtggcttcttcacaagtcactgctccggctcccgcaccaacaggcgatggcaccacaatcgaccaagcggttgcatatgttctaatgcttgtggctttggtgctgacctgcatcatgcattgaaccatcatgggactcctcgtttatttctagattgatggatggtaacagagccttctcaaggcaaagagaggcattcgtgtcattaggactacggaagagattttaattaattggacaaatgcattcttgtaatactcttctgcttcaatgattatctcgtaattctgatc

SEQ ID NO: 97600 - DNA, 766 bp, Glycine max
  Clone ID: PAT_MRT3847_59146C.1
ccctcctctcctttcttcgctccttcctcccaaccataccggctcgagctttaaacacacttacaaaatcagttacaattacacactttcactagctattacactttttgagggtttttttttttattctactatatatgggggcaagctcgggtatagtactagaaatcacagttatatcatgcgaaaaccttcgtgtcacggaggatccatacgttgtcgttagggctgagtcgttaaattgttgcacctcgaatatagcgaaggattgtgggagcaacaaaacgagtttgttttcgtggaacgagaagttgatgctgaacatgcccatgcatgcaaggtccatcacgttcgaggtgcaatgcaacaggttcaagggctttcgacctgctggggtggccagaatcgccgtgtcggattttctcggcggcgctgtgtcggaaaactgcatgcacgtgttgagttaccggctgagggactgggaagggaaagaaaacgcgatgattaatttaaaaggttcaagggttttcgatcggttggggtggccagaatcgccgtgtcggattttctcggcgttggcgtgtcgggaaatttcatgcacgtggagttaccggttgaaggactgggaagggaaagaaaacggggtgattcatttcgcggtgagggtggaggtggcgccggtgaaggggacggtggtcagtaaggttctggtgatggtttcgtgggaatcaaagttggtgaccagtgtaacgaagttgttgttggt

SEQ ID NO: 97601 - DNA, 653 bp, Glycine max
  unsure (1)..(653): unsure at all n locations
  Clone ID: PAT_MRT3847_59147C.1
cttgggtcctgtttttttttttttttttttttttttttttttttttttttttttttttttttttttttttttttttttttttttttttttttttnannnncccaaggggtttctagggggggccccccgaattttactatttttcttttcttcctcccccccggggggtaaaaggcccccccaaaggagaacaccccctttccttttttgggcccatccgccccacctcttttctttcccctggttccctctttccgtccccttaaccgcggaaaaatcctccccccttgtcctggggggaaaaatgttgttgttgctccccctgctgttgttggggttgaaccccctccctttcaaatcccttcgggcgggtgggcaaaacctttctttttttctcaaccctccggggttctttttcaaggtgggggggcccctttcccctctccttgtggggggtaaaccttgcccattttaatctttggttccccccctccnagccttgggtttgggcgcttatttccggcccccccccctggattatcccgccccccctcccttgttttttggccccagcccttttacctaaatttggggacccccccctccccccagcccttctgttgttgcttcaactggggggacttaaaaacccc

SEQ ID NO: 97602 - DNA, 245 bp, Glycine max
  Clone ID: PAT_MRT3847_59148C.1
ggctcgaggagcatctcacacgagaaagacatttcttcgcgctagaacaacaaccttcattcacgctctgaacggagaacacgctttgcatattttgacgggaaagtgcactgcgccctacatcctatccattatctatggctgctcactacaccaccctcgccaactgactgcgatgcaaaacgtccaccttccggagaggacactgccccgtactacaacaggcaccatcttatggagcttca

SEQ ID NO: 97603 - DNA, 356 bp, Glycine max
  Clone ID: PAT_MRT3847_59149C.1
ggctcgagcgaacatcgaggacacatcctggtgacagggcgatcatggtttaccatgctctagcagggcgacaacggggggctgtgggcctctgcaatagggacaacacggggggcgaggacacgcagctagtgttcggactgcctggaaatcatgcgatagccatgctactgtgcatgcgctcgctctgactagaggagtgtcttcaactgcaactgaaaatgatgaggatgagaaacgtgacgctgaggctaagccgctggctcattatactatggcagctgccgatgctgctcatacggctgaatatcaactgacttggcctaacgagaagactaatctgactgtaggggctg

SEQ ID NO: 97604 - DNA, 271 bp, Glycine max
  Clone ID: PAT_MRT3847_5914C.1
gttggtaaaaaatgtacaaacacattctagagtccgaataaaaagtatgtgtgggtgtgaactctagataactattcatttgcctagttaagaagggaggaaactgtcagatattttcttatcatttcaaattcatgtttttgttatcattggatgaaaggaattgagagcctttaggatgtatgacttaggtagtgggtacaaatagggtataatgaatacgccaataactaatcagatacatcggcaccgcactgatcacgaggatctt

SEQ ID NO: 97605 - DNA, 322 bp, Glycine max
  Clone ID: PAT_MRT3847_59150C.1
gctttttcaaacaaaattgtttttgatgatgaggtggtgttggctaacacacaagaattctttgatggaaattttccagtggatttttggttaccaatatgtgagaattgtctttatcctgtaagacaattaccgttagaaagcttgccttgtaaatgttacatggtggagtggacgtagttggaatgtcaggctttttttgtataggatttggaaatttgggtggttattccattaaatttgagggtttttcccaaaagctggtgcaggttggagagattcaagaaaaagttggtttgaaatttttacaagaaggattttt

SEQ ID NO: 97606 - DNA, 454 bp, Glycine max
  Clone ID: PAT_MRT3847_59151C.1
accggcaagatgactgttcatacacgtttatgttgcaaaaatggcaataggaagcgtttgatgggtttttatttttttttgttgttgttgtacatttatatattatcgaaaacaaggagaaaactttagcccaccctaaacagttatttgatgggtctaatacctaaataatacacattcaccagatttaaataaaaagtctccatccaatattgtcccatgtaaaactctatatatactaatggaaactcccagcagtgacggaagaaaccttggccacatctgctggctttggttttggcagcagaacaaccgctagcacggcactcacggcggctgccacggcacccagcacaaacgccgggaagttgccaccaccaaaccatttatcccactgtccacttatagccgatactatcatctgtggcacgacaattgcaacattgaggacacc

SEQ ID NO: 97607 - DNA, 580 bp, Glycine max
  Clone ID: PAT_MRT3847_59152C.1
cggacgcgtgggtttaattttaatcaaaaaaaaaaaaaaaaaaaaaaaaaaaaaaaaaaaaaaaaaaaaaaaaaaaaaaaaaaaaaaaaaaaaaaaccaaaaaaaaaaaaaaaaaaaaaaaaaaaaaaaaaaaaggggggggccgtttaaaagaaccaaatttaactaacccggcattgcaacgaaaaacttttttaaaagggccacaaaaataaaatcaatggcccgccttttaaaaacgtggaaatggaaaaaaccttggcttacccaaattaaatccctttgaaaaaaatccccttttcccaagtgggctaaaaacaaaaaaggcccgaacaaatcgcctttccaaaaatttgccaaccctaaagggaaaagggaaccccccttgaaccggccaataaaccccggggggtggggggttaaccccaaggggaaccgttaaatttgcaagcccctaagcccccgttcttttcgttttttccctttcttttctgccaacgttcgcgggtttcccccgaaaagttaaaaatggggggctcctttaagggtcccaattaagggtttaacggaacttgaaccc

SEQ ID NO: 97608 - DNA, 290 bp, Glycine max
  Clone ID: PAT_MRT3847_59153C.1
cccaattcgaaacccttaatcctctcacactcacatgttgattgatcttttgggtaccatttggacacaatctgccaccgttcaagattcccgcgggggacacattttcgacggcgggagacaaagttccttcggccattttcccaaaggcccgtttgaagcttccgaatgatggatcgcttcggcggtcatcggacaacaaccacaagttccctcatcaccgttgagacatacaggatctatatcttcaaggttctgaagtatgtccatcctgatattggtatctcaag

SEQ ID NO: 97609 - DNA, 255 bp, Glycine max
  Clone ID: PAT_MRT3847_59154C.1
ctgcagccaaagcagttctagaacaagattttttgtgttacgcacaccaccggcgcgcggcgccaccaccattgggtggaggcaactaatggcaaccactctcactccaatccaaaccctccaatactgttctcccaatgccaaacctttcttgactcccaaacctatcttcccttccaaacctgcttacatctgcacacctcacaccttgcgggccgatcaactttttctcttccttttccgcgccaccttctt

SEQ ID NO: 97610 - DNA, 532 bp, Glycine max
  Clone ID: PAT_MRT3847_59155C.1
ggaaaattataaatctacataaacattcaagtaagtcactccaaactgcaataatacatggtatgaactagtcgatgagaaggagaatgctgccggcagctacttctatctcttattatgccccaaagaaactagtatctgaaagaaacctgcctacaacatgaataaggatcatgacaagcatatcatgaactcgtgagagaaccaaatgaaattgagatgagtttggaaagttatggggatcaccaatatttaactaattcatttggctagaattggaacaccacaggctgaaggagcatgctttcctttcttaaacacaaggtttcctctgacaaaagtctccaaaacttttccggatagccttcttcccatataagcagagaggctaggatgtttaaggaaaacaggataatcttcattcaggtcaaactccacctctggtttccaaactacaatatctgcatggtttccaactgcaatggccccctgcaaagatgttactcctccccaagccttcaagagtcaccct

SEQ ID NO: 97611 - DNA, 573 bp, Glycine max
  Clone ID: PAT_MRT3847_59156C.1
ccacgcgtccgacggctgcgagaagacgacagaaggggagacaaaaaattcttcgcattgcaattgtaatcgagtgagtcaagtgcgggaacgattctaactcagtctgcacgcactgatctcacagcatagcgcttgggctgaggaagaaggaagagaagaagaagcatggcggtgcgggccactgtgtcgcgtttcccgatggacacggacgcccgcgagggctcgggcctcctctggggagtaaccgtcacgccgttctccgccgccgacgagaatgcccgcgctccgtcgtacggctccggcggcgacctcttgccccggtgcgagaactgctgggcctacttcaacacctactgcgagctcgagcagtggtcctggtcctgctccctctgcggcaacctcaacggactctcctccgacgccatcgaccgctactctcgcactcagtcctacgcactgatctcacagcacagcgagcgagcacaacgcttgggctgaggaagaaggaagaagaagcatggcggtgcggtccacagtgtcgcgtttcccgatggacacggacgcgcgcga

SEQ ID NO: 97612 - DNA, 443 bp, Glycine max
  Clone ID: PAT_MRT3847_59157C.1
ttaaattgagcaatctttatgagatgcagctatcgaggaatggctttagtggtgaaataccatttgagattggaagtctccaaaatctccaaatcagtttggacctcagttacaataatctatctggtcatatcccatctacactcggcatgctgtcaaaattggaagtacttgatctttctcacaatcaactcactggagaagtgccttcaatagtgggtgaaatgaggagcttggggaagcttgacatttcttacaataaccttcaaggcgcattggataagcaattttcccgctggccacacgaggcgttcgaaggaaatcttctttgtggagcctctcttgtaagctgcaacagtggtggtgataagcgagcggtcttaagcaacacatcagtggttatagtctctgcactttcaactttagctgcaattgctctactg

SEQ ID NO: 97613 - DNA, 419 bp, Glycine max
  Clone ID: PAT_MRT3847_59158C.1
cacacaagtgttacactaaaatatattatactgccaaataaagttttaagtagagctgcttatacatacattgcacatggctggccatattttgataacaaatacgaaaataatattgaacagttttgctaatacaaaaaaccaggctctagaggaaatctcggtttttcagtctataagcgcatccttacattgcctttcaagctttattgagttgcaggttaatgaagcttaccttgtttcaaagtacaaatgctcccatctgaaggggcggaacatagatataacttcagcggagcttttaaacagaagggccacactcactcagacagctgctatgtgcaccattgatagcattgcatgcctgtataccaaaaacctgcctactgcaattttacaagaaattgttttgttacaaa

SEQ ID NO: 97614 - DNA, 691 bp, Glycine max
  Clone ID: PAT_MRT3847_59159C.1
ttggagttcaagccgtagttaaagaaacgatgaggttgtatgcagctgcaccacttccaggtccacgtgaattcacaagtgagtgtaccttaggtggctaccgtatccaagcaggtaccagatttattttgaacatttggaagatgcagagagacccacgtgtatggtcagacccattagaatttcaaccagaaaggttcctcacgaaccacaagggtgtggatgtaaaaggtcaacattttgagctacttccctttggtggtggaagaaggtcttgtcctggcatgtcatttgcccttcaaatgacatacttggcattagcaacttttttgcaggcatttgaagtcacaaccttgaacaatgaaaatgttgacatgagtgccacatttggactcacacttattaaaaccacaccactagaggttttagccaaacctcgtttaccatatcaacttttcttcactgatgaaactaaggaaaatccaacacattcaccatgaattagattattgcctttcccccactagcaccgtgaattggtgaacaccaaaagctagtttatggtgtgaaagttatcccaactgatatgcattatttttggtcatatttatattggtaagggaaatagtttgtaagattgaacataccaggaagtgatctaataacagttcaataatgattgatataaaaa

SEQ ID NO: 97615 - DNA, 977 bp, Glycine max
  Clone ID: PAT_MRT3847_5915C.1
ttatatgagcatatagttagttaagtaaaatttcgtactggaccttgtgacaccaatccaagtatgtgaaattatagccttgtttattcctcttggatatagtgctgggtggaaccgagaccacatcaacaacattagaatgggtggtagcaaggctgctgcagcatcctgaggcaatgaagagagttcatgaggagttggatgaggcagtaggattggacaattgtattgaattagaatcccagttgtccaaattacagcgcttagaagctgtcataaaggaaacacttcgtttgcatccccctctccccttcttgataccccgttgcccgagtcaaactagcactgttggtggatacaccattccaaagggtgcacaagtaatgttgaacgtgtggactatacacagggaccctgacatttgggaagatgcattggaatttcgaccggagaggtttctgagtgatgctggcaagttggactactgggggggcaacaaatttgagtatcttccttttggatccggaagaagaatctgtgcagggctacctcttgctgagaagatgatgatgtttatgcttgcttccttcttgcattcttttgagtggagattgcctagtggcacagagcttgaattttcaggcaaatttggtgttgttgtcaagaaaatgaaaccattagttgttattccgaagcctagactatctaaaccagaactctatcaatgatgttgtaatagtgaaatgcatgcttattacaacttatataataagatttgttacttgcttcggctgagttatgttatttgcataagattttcgaatggtgtatatacttttatactcagtcaccccttttgtatatatttttctctcttataccacatcaaaagactaattcagtggggacacatacggtgtctcctataaaacgtccccaaaaaaaaaaaaaaaaaaaaaaaaaattttacaaaaccc

SEQ ID NO: 97616 - DNA, 2308 bp, Glycine max
  unsure (1)..(2308): unsure at all n locations
  Clone ID: PAT_MRT3847_59160C.1
gcagttgacatgtttggagtcttaccttccaacgaatatgagtgagagcaactcccacctactgcttctcttgttctctacacacttgttgttcgaccattgacaacagcttgtcgatgagctcagcaactacatcagacctgaaattgggtccaacaagacctgtcagacactctgaagcagatggcaataataatgctgacaaaccagacggtgacagtgcccaatctgacagcgagggtccaagcaatgggtggatgatgagggtctcaaacaacgtggacaaccaggtggtcctggcagaggacactatgtactaccccactgctgaagaggtgcacagcaaagacgaaccccttgaacatccatcattaagctggtgacgggcataaagttctaggtcctcatgaaggagtcttccacattccatctgtgtcctctcagttcctccttggcctcacgtcaaaccactccaagttgaagctcanggttttctggaacgcacaaggacagattttttaaagatcggcactacttggataaggaatggggcgaatacttttctgggggaggaagaaaagtgattttggaggttggctgtggagctggaaatactatctttcctgtcatagcatcaaatccagatgcttttgtttatgcatgtgatttctcaccacgagctatcgagttggttaagacacatgaagacttcaaggaatcccatgttagtgcttttgtctctgatttgacagctgatgatctgtgcaacgagattcttccatcttcagttgatattgttacaatgctgacattgtaagcagatatttatgttgtctgcagtgtccccagaaaagatgcctttagttttgcaaaatattagaaaagttatcaagccaaatggatatgtgttgttccgagactatgctactggagaccttgctcaggaaaggttctctagcaaggatcaaaagattagtgataacttttatgttagaggtgatggcactcgtgcttactatttttcaaatgagttcttgaaaaatttattcaaagaaaatggttttgatgttgacaaacatcatgtatactgcaaacaagttgagaatcgctcaagggagttgataatgaatcggcgttgggtccaagctgtatttcgtgtatcagatagttccaactcctcttcatgcatagaagctgaggccaatcatcttgacaatggtaatgccaatatggaaatcaagcaaaatagtttgaatggtggtttaaatgattctgcagttgacttgtctgagggtgtggcagttgacatgtttggagtcttaccttccaacgagtatgagattattgagatcaaccttagaggctggaatttcaagattagtttactttcaaaagagtaccagcatacctgcaagtcaacaggtttgatgctgtgggaatcagctcggttgatggcttctgtccttgcagaaaatcccaacattgttgctggaaaaagggtcttggagttggggtgtggcagtgggggaatctgctccatgattgctgctagagatgctgatctagtagttgcaactgatggagatggctttgcacttgatctcctgaccaaaaatgttgcatccaacattgagccatcattactgactaaactcaccacaaaaaaactggagtggggaaacaaggaccagtttgaaagcataaaggaagtagtgagcaatggagggtttgatgtcatcattggcacagatgtgacatatattcctgatgctatattgccattgtttgcaactgctaaagaactgattgctcccagtggaaacaaggaagatgataatgttcctgcacttattctttgccacatctttcgccgagtagacgaaccaaccttactttcggctgcagcccatttcgggtttagattagtggacaagtggcctgctggaacttcaactaatttgtctcatagaattattggcaattggtttgttgacaatgatttaaaggatgatcttcctagtacagcattaaacatcttgctcttctgcaaggagtgatattgaacaacttgattcttctcttcattactattaaaagtgagaagtagaatgtaatttcctagttgattcatttaagtactcgacaatccgtgtgggctcatttttgtaagtttttggtggagagttctgttttatttatttatttataaattttgtagctttgctcccccacttgggggccttagacacggacacgtgatagttatgcaccctgcatcatttgctaggaaatgcaaaaggaccacttt

SEQ ID NO: 97617 - DNA, 526 bp, Glycine max
  Clone ID: PAT_MRT3847_59161C.1
aaagcaagtagtacccaatacagggtttgatgtcatcattggcacacacgtgacatatattcctgatgctatattgccattgtttgcaactgctaaagaactgattgctcccagaggaaccaaggaagatgataatgtccccagacttattctttgccacatctttcgccgagtagatgaaccaaccttactttcggccgcagtgcatttcgggtttagattagtagacaagtggcctgctggtacttcaagtaatttgtctcaaagcattattgacaattggtttgttgacaatgatttaaaggatgatcttcctagtacagcattaaacatcttgctcttctgcaaggagtgatattgagtttattattctagcttgatttcaagttggtttcttgattcttctcttcattacaattaaaagtgggaagtagaatgtaatttccttgttgattcattttaagtgcttgagaacccctttgggctcacaaaattccccaccagatggagagagttctattttatt

SEQ ID NO: 97618 - DNA, 576 bp, Glycine max
  Clone ID: PAT_MRT3847_59162C.1
ctgtctctcttgtttatattctgagagccgagactcctccgagataatggccgaagcagccgcagcaccgactgtatcatctttcctttcaaaacggtcttcactctttacgtacactcacgctatgaccaaaactccgactctccctctgcagctggcactttccaaggacccggtgaccgatactgtgggaagctacaacaattataagccgagcgaggaatgcggggtgggtggcatatactgtgacccggaggcctcgcggatctgctaccttgccctgcatgcgctccaccatcgcaggacaagagggcgccggaatggtacccgaccacaacactgtgctggaaccacccatcactggcgtgggcctggtctgcgaagggatgaaccgatcacagcttgaccggctgcatggcaaccgcggcatcggccacgtgcgatactccaccggcggacagtccatgcgcaaaaacgaccagcccttcgtcgcctggtaccggttcaggtgcgtcgggctggtccacatcggcaaccgcgtctactataagactctccgaacgagcctcgaggaca

SEQ ID NO: 97619 - DNA, 530 bp, Glycine max
  Clone ID: PAT_MRT3847_59163C.1
ggctcgaggtcggaggctccatgctgcacgccgttgacgaatccgaaggaagccgagaacgcgtctgggttcgcttcctcaacgccgagtacacgctcaagaccaagctttggtcgcgttacgatccttccaccgtatttgatgcacgtggagcaacagctacaaatagtagtttctgagttttagttttacgctgttgacatgaaactgccacttgactcaaggatttgatatgcaaacaaacaccagctaagtaaaagagcttataggagtcactttctaaagcttaactaaataccttcaatttttaacttatgtgcttatatgataagtccaaaccagttctgaagaagctattctaaatggccccaaattgtattcttgtgtctttaatgctcgtgctgtccaagcttctgttcctggcctgtttattttcttcactgaaataatttgtgttctgtgctgacgagtgtgctgtaagaaactgacctttgcgatcttaacctacctaataatctattttgaaaaca

SEQ ID NO: 97620 - DNA, 297 bp, Glycine max
  Clone ID: PAT_MRT3847_59164C.1
cctacgcgtccgcccacgctgtagagcaagcgagggacgaactcctttggagagccaaaaaagcaagcctcaagctacagcaatgcatgtgggagctataaaaattatcattagctagtatcgccagtaccgactgcaacatagagggcgcaatgcttttggtgagatacttataataccaatcctgaaaaagaagttaccattattttgtgagtgcctctcaaaggtggaaggcccatcagggtggtttcattgccaaataccatggtgcagattgagccacacatgaattcaaag

SEQ ID NO: 97621 - DNA, 327 bp, Glycine max
  unsure (1)..(327): unsure at all n locations
  Clone ID: PAT_MRT3847_59165C.1
cacaagaataccagtaccaatgagatgattatgcttaaataaattgaatcatccattaccaaaattaaaatagtatgcagtaacatcaagtttagataatgaaactaaattcctagataaactaggtacataaggagtttccagtaaatctaaatgatgtccagtgttgcgttttaaacnaattaaatttgcctttnccgaaaaaaaaccgttttaaaattggtttgggttgttttcgccccaaaaacacccctttttttgaaaaaaggggagagctttcacttgattccccatgaaaataaacttctcatttgggcttatggtttg

SEQ ID NO: 97622 - DNA, 319 bp, Glycine max
  Clone ID: PAT_MRT3847_59166C.1
gccctttttggggtttggggggttttttttttttaaaaattaattgagttttcattcacattaacaacaacgtgctggcaaagacataaaccacataaaataggcgcctaaatttaaacctaaaacagcgccaatttcattatccccgtatcaaatattacccagtggggcgggggtagtcaacaaagggggtaaagaagcagcgagtataactaacaagaaatggggggaggatcaaacccctgattttggggggggttattgagagccacgggagaaacgaaaaaccccagagggtgaccaagaacggcgaccaaaa

SEQ ID NO: 97623 - DNA, 160 bp, Glycine max
  Clone ID: PAT_MRT3847_59167C.1
acctttagctgaatagtgctcacactgtgagaaggaagcttggaatgtttcccttgggaaccttataacatacccagttggttgagatgggtgggtgaacaagacattgtcactgaaaggaggatactgtgactttggtaaggaatcttgtgagctctgg

SEQ ID NO: 97624 - DNA, 864 bp, Glycine max
  Clone ID: PAT_MRT3847_59168C.1
ggattctcaccaaccagtggccccaaaactctcctcgctttagggaaacattgcaggagtatgctcgagaagtggaaaagctagcttacaagttgttggagctgatttcactgagcttgggtttggatgctgaaaaattccatggctgtttcatgaaccaactcagcatggtgaggctcaattactatcccacatgccctttccctgatttggcacttggtgttggtcgccacaaggactccagtgctttaactgtgcttgcccaagatgatgttggaggattacaagttaaaagaaaatcagatggagaatggattccagttaaacccaccccaaatgcatttattatcaatgtgggggatatagttcaggtttggagcaatgacaagtatgagagcgtggagcacagggtggtggtgaatacagagagggaaaggttttcaattccattcttcttttccccagctcactatgttatagtaaagcctgccgaggagctggtaaatgagcaaaatcctgcaagatatagagagtacaactatggcaagttctttgccaacagaaaccggagtgatttcaagaagcgtgatgtggagaatatccaaattcatcacttcaggatcttggattagccatttgggttggcattctcaatatcaatatctgagcacaactagttctgctagttccatcatttcaaaaccaaacaaaattgcgttggttcgattctgtcagtaaataataaaacattaagtctagttctagtatgttttgaaacccaagctgaataggatcattaacagatctctgattgagatgtgttgttctttaaatttttcttatataaaataagaggtcaagacc

SEQ ID NO: 97625 - DNA, 522 bp, Glycine max
  Clone ID: PAT_MRT3847_59169C.1
ggctcgagcttttggccaaaatccctcctctacaaaaacccaacccaagtgttacaagtcttaatttccattatcacgtgaattgttgcacattccttgtttagtcccagcaatgggaagccacaacacaacaaccagctcctcgtctgattctgaactcccttgttctaattatattccgatacccgatggaacccactttcccgcagaagaagctccaagagagctgcttgtgatcttttgtgggttgctggtgcttgtgtccttggtggccttcaatggctacagggcgcatccaaatgatcatcatcacgtgtcgtcatgattgccaacaacgttgttaacagtgacacccaatgaattggaactgagccccgatacagtaccatgttcaacatcggagacgacagattcacgtggcttgtctagaagggtttcggagaagtcaagctggcaattgaacagcaacaatgggagcggagaatcgtatccatggaacaatagcgtgctgtcatggcagag

SEQ ID NO: 97626 - DNA, 349 bp, Glycine max
  Clone ID: PAT_MRT3847_5916C.1
aaaaatattgacccttttttcaaaggacaacaatcctggatttaaaagaaaaaggacccaaaaagaaatcaaaaaaaaaaggggaaaaaatcccaattccggacgggtgggtccaacccggaaatcccgaacgaaaacaagaggcgcaacaaatttccctatacgggaacaaagttgagggcggaagaaaaaaggtcataggtgactgctgcacaaaagtgataacccgggataataaagggccacattcctggcggaagggcaaaaagaaaaaaccggaggggctaaaaaaggggccaacccccattaaaaggggttagcacaaaggcgcgcatataaaaaaagggaa

SEQ ID NO: 97627 - DNA, 566 bp, Glycine max
  Clone ID: PAT_MRT3847_59170C.1
tcaacaaaattgaatggcgtggttttaaatgggaatagcatttttctattcttatttatttggatgaaccaggctaaagaccatacctttgtttcacaacattacaagattattattgccactgcaaactggaaaataaagcatacttgctcttattgagccaaactacacggaattctaaagcaaaatatagagatgacaccaccaaaattttaacacagtaagtgttaaaattaaaaactatatatatagttgcttgagagttttgggtaaggagagagcttcttccatgggagtgaaactccagatatacactatatatctttcagtttttagtcagcaatttcctgaaccatgagtacatggtggatccagccgatggcaatttcttttaaaagggtcgcatccaataaaaggaggattacggtacgcgggcccgatcggaatagtcactgcctccttcggttctcgagctagagttgaactgggaacgaaagccacatagggcaacagtaagaatgcaataagaattgccttcatggttggggatatttaatgcttagtag

SEQ ID NO: 97628 - DNA, 1936 bp, Glycine max
  Clone ID: PAT_MRT3847_59171C.1
ttctgaattggtcactcgagatgacagttatgtgaagaaagccaaatcatcgttttactccaatgggtatggatttgagcccactatcccatcaaaagctagtatcttggattcatcgttaaaacctacatcaactgcaggccaagatggggataagttgagtttgatcaagcttgctagcttaattgaagtgtctgcgaagaaagggactcgtgatctcaaactgcagaacaagttaatggatcaggttgattggctacctgattcgatagggaagttgtccagcttggtgactcttgatttgtctgagaatcggattatggccctacctgctacgattggtgggctttcgtcgttgaccagattggacttgcattccaatagaatcacggagcttcctgattctgttgggaatcttcttagtctgctttatcttgatctgaggggaaatcagttaacactattgcctgcttcttttagcaggttggtgcgtctagaggagctcgatttgagttcaaatcagctttcagcgcttcctgactctatagggtcgcttgttagactaaaaatattgaatgtggaaacaaatgatatagaggaacttccacattctgttggtagttgttcttcccttagggagcttcgcgttgactataaccggcttaaggccctgctgaccagattggacttgcattccaatagaatcacggagcttcctgattctgttggaaatctccttagtctgctttatcttgatctgaggggaaatcagttaacactattgcctgcttctttgtagcaggttggtgcgtctagaggagctcgatttgagttcaaatcagctttcagcacttcctgacactatagggtcgcttgttagactaaaaatattgaatgtggacacaaatgatatagaggaacttctacattctgttggtagttgttcttcccttagggagcttcgcgtagactataaccgctacgtgtcctgcgagcagaagagaatcctcttgaagttccaccaagagaaatagctgagaagggagcacaggctgttgtccagtacatggatgagcttgttgagaagagggaaaagaaagatgttaaagcacagccactaaagcagaaaaagagttgggctcagatctgcttcttttcaaagtctaacaaaagaaagcgtgacggggttgattatgtgaaaacctgatttcattcaatgacaccattgttggcaagcaacagattctatgtggatatgcatttaaaaatagagacaaatatatctcttagtgtgcggtcaataatatgcagagatatggatcgtgcaagaatgaattgacagcctctgtaggctgttataatttgctttgacttggcggcacaaattgtagatttcttgttcagtattttctgatttttttccctgtataatttgaattttcgatttatttcatttgtatttctattgctgctttgaaagtagaaagaagtgtacacaacccaacaggcaaacagagacgacggatagtgggggagaaagagaaaccgaagatgattatgtactatggttattatatatgtacaattgtaacttcactctattgttaaacgaattacagtttaccctttgtaccatatcgatcgtgcaagaatgatttgacagcctttgtaggctgttataatttgctttgacttggcggcacaaattgtagatttcttgttcagtattttctgattttttttccctgtataatttgaattttctatttatttcatttgtatttctgttgctttgaaagtagaaagaagtgtacacaatccaacaggcaaacagagacgacggacagtgggggagaaaccgaagatgattaatgtactatggttattatgtatgtacaattgtaacttcactctattgttaaacgaattacagttt

SEQ ID NO: 97629 - DNA, 352 bp, Glycine max
  Clone ID: PAT_MRT3847_59172C.1
caaatatggttcatcatatagccgcacaacatggaaacctgcttaagagtcacctcaaatcaaaatgctacaaagatgaaccctaccctgctctttccttttcaagtaagggtgaacgagatggacactggcaatctttttctactgggttatctcccacaacctctaaggcagcaagcgatccatggctgtcattcttatgtggtccatctgctgttgatgaatgtgaaaatgtgcagccagattcttcaagtgaagtaagcattgaagaaatacactcaaatgataatgtgttagaaagagatgttcaaccgtctttatctgacaaagaccaaatagagaaagcacagca

SEQ ID NO: 97630 - DNA, 424 bp, Glycine max
  unsure (1)..(424): unsure at all n locations
  Clone ID: PAT_MRT3847_59174C.1
cacaaaggttgtcttcttttatttttagcttggaatgggaacgattattcttttgtcttttagcaaaggaggtggcggctgattnaaatattaagcttatatccaaatgtctactttcttttgcggttctagctggaatagtttgataccctaatgttggtaaatgtcattttttatcaaccttattataaaactaattatgttccctgctttttacttttccttattttttattatatatttatattttttatttactaatcatatttcaatcttattatttattcttcattatattctatctatattctattatattcttttatcttcaatcattttcatatttttatattattaatttttatttttctaatttcttcatatttttaaattttatttcattttaattcttatttttttatta

SEQ ID NO: 97631 - DNA, 391 bp, Glycine max
  Clone ID: PAT_MRT3847_59175C.1
ctctcgatctgaggtacatataattagcgagacagactcagtgccttatgacgcggacgctaacattaaagttcaatattcaacagcaaatcatgcctaaaccggaccaaactcaagacggagactcattgtactgaaatcgggcttatccaactgctggagagcgatctatttggatgaggacatttactgatagaccatcaagcgagttcagagcatgtgcgcatatattatacaaacgcaggttgtaacttctggagctaacaccaaaagaatacattgcattatctgggaaccgcaaaaagcatggttcataaatacgcacctgactatgtgctaaagcatgtctgcttggggcgacgtccaccacgaagcgatgatcatgttgaag

SEQ ID NO: 97632 - DNA, 370 bp, Glycine max
  Clone ID: PAT_MRT3847_59176C.1
ggtttggagctggtggtggagatggaatatgaggaggaggatttggcggtggtggaggaggtggatttggtggaggtggtggctttggagctagtggtggtttttgtggtggcggtggtgctggatttggtggcggagttggtggtctcctcttcgttgaatgttgatatgaatatcgtatccaccagtcatatatattcaaattgtgttacttccatctgtttctgttaaaagaccctaatttatggataatattatttctgttaagttttagtggctgctatgtctttttgttggaatataattattcattataaacaaatctttatctcctgtaatgtctctcttactattaattgatgtcaatatt

SEQ ID NO: 97633 - DNA, 505 bp, Glycine max
  unsure (1)..(505): unsure at all n locations
  Clone ID: PAT_MRT3847_59177C.1
aagatactcaacccaaggagagaatgctcttggaaagctgcaaatggttcggaaaatttttaatcaggagaaggggaacaaagagggcgaaagggaaatgacccaacgaagagtggaaaagagcgcacgccctttacaaaaaggggggaaaagacgactgccgggtgggccgcgaaggaggggaaaaaaaaaagaggagtagaaaaagggggcgtttccaaaaaaaaaagnnagcccggcgcgcgggccggggggaaaacaaaagaaccaccccccacaggcgtaccagctgtccctttttcgagtaaaaacaaaacaaaccctaaagagggggaggggggtttttctgcgggaggggggggggcgccacccgcagcgaaggaattctgaggcagaagcttggggggcgaccccgggggtgccaaaaaagaaaacaatctagataaaaaaccccggcgtgcagcgcccccgtnagagggggggggggggggaaaacctgtggggg

SEQ ID NO: 97634 - DNA, 325 bp, Glycine max
  unsure (1)..(325): unsure at all n locations
  Clone ID: PAT_MRT3847_59178C.1
ggtacagccgcaggtaccggtccgtaatccgggtcgaccacgcgtccgtactagtctagatcgcgagcggccgccctttttttttttttttttttttttttattggagngngcgtgnggngcttgtgttgatgtatttttggttcctaattttaattttcattgtgtttggttattgttattttgattgtgctgcttgttacagnancgaatcanatgttggaggggggggtanagaggcttttgatgggggccttgggaagagagaggttnttttgtttggccccaagttttgggtttttgttttggggctggttttttgaggg

SEQ ID NO: 97635 - DNA, 384 bp, Glycine max
  Clone ID: PAT_MRT3847_59179C.1
ctgtgccgcaggtactctgccgcctcctccctcgtgtgacagccacccctcctccgccggttttgcgggcctgttgagcgctctggcctcagttcatgttctgtagctctaccgtggtgcccttggtgaggatgtggtcgctcattgtgctctgtcgttcccactgttgttcacctaccgccgtgtctctgtgggtttgcgatttcacgggtgcgcctatttccgtgcgctggtgaccgtgctcagggtattctctcgattcgctctgctccatactcgtctagtttcctcgtcttgacggccttggtcccttcttcggtgctctcctgcgtgtgctctccgtcatggccctttcctggcttgctcttggcccttttcgctctg

SEQ ID NO: 97636 - DNA, 311 bp, Glycine max
  Clone ID: PAT_MRT3847_5917C.1
aaaaacaaaaacaacagatgcactactacctagggggtatactttgattaatgaaattgcagagatacaagggatcattacacgggagacgggcctttaagcaattaaaagcggacgatacaattggcccagaacctaaaaaatgtaccacttaataatcaaaatgtaccctctttagatcccaaatataaggactttaaatacagatcacagaatgaccgctgaacctagcttttttgtgaaactgaaccgaaacccagaaacattgttttggtatttagtggcgagcccaacttgcttaagcttgaacg

SEQ ID NO: 97637 - DNA, 379 bp, Glycine max
  Clone ID: PAT_MRT3847_59180C.1
cccacgcgtgcggctggcgctcctagaggcagctacattctaccctggttggatcaacccggccaacgcgcttttgggcatgcccgggaggaaacccggtccccatgtgcaggatgatatgaagagctctgtgaatgaaggggtgagggaggaggtacatgtgaagagcatgagcgcggaagatgtagatgacaagaggtgggaagactgtactggcgaggtatattggtggactgatctcacatcagcggggccactggtggcgacaacaggcctggcctgactgatcaccctacaggaggaactcattagcgcctgggcgacgctcgcgcccacggcagcagacctggatggggaggggtgcccaatatctaggatg

SEQ ID NO: 97638 - DNA, 467 bp, Glycine max
  Clone ID: PAT_MRT3847_59181C.1
tacctccatagaatctacatttgtggtggagactcttatccttccttcttctacttcttcaacctgttacatctcaatttgttacacctcttaactctgatgggattcacctgcttaaattcaaatactccatcctcagcgacccattatcagtcttaaagaactggaattacgacgatgtaacaccatgttcatggcatggtgttgcatgcagtgaaattggagcccctggtacccctgactttttcagagtaactagcttggcccttcccaatagccagcttttgggttccattttctgaagacttaggcttgatccaataccttcgccacatcgatcttttcaacaactttcttaacggctctctacccaacactattcttaactctttttaacttcaagtactttccctttcaaacaatgttatcttcggtgaactacctcagctaattggttaaatgacaaa

SEQ ID NO: 97639 - DNA, 160 bp, Glycine max
  Clone ID: PAT_MRT3847_59182C.1
ctgattgtcgagcaatcttttcttttttggtccttggcctttgtctggtcagcttaccacctacaatagacagcgccactgtttgtcaaaccgccttgattcgaccaatgactttcgtggggcggagggcgcgtacggttcgacgggatgctcgtgcaca

SEQ ID NO: 97640 - DNA, 158 bp, Glycine max
  unsure (1)..(158): unsure at all n locations
  Clone ID: PAT_MRT3847_59183C.1
agtttttgataccatgaaaaaaangtacttttnnccggagaaatttatgtggaaaaaactagtttngcntatnatgctgaagaaaaatnagtaatacngaacnctctacacaatataacagaaatttntncggggaaaagtacgtttttgataccatg

SEQ ID NO: 97641 - DNA, 520 bp, Glycine max
  Clone ID: PAT_MRT3847_59184C.1
cggacgcgtgggtgaccgtcatagatcgaattcggatatggcgaggaacacagctgacctcgtaacgcagctcaacgttgctcatcactttccccacgactctctgctccgctattgctcttcccacgtttctggcttccctcatcctccaactcatttcaccgtttcccagtttggacatggacaatccaaccccacgtacttgttggaagtgggttcacatggctccttggttaagcactatgttctcaggaagaagcctccggggacattgctcgcttcagctcatgccgtcgatagagaatttcaggttctccaagcattgggtgctcatactaaagttccagttcctaaggttttctgtttgtgcaatgatccaactgttatcggaaccgcattttatatcatggaatatttggaggggcgcatatttattgatcccaagttaccgggtgtggcaccggagaataggagggcaatttaccgggcaaccgctgaagccttagcttgcttacattct

SEQ ID NO: 97642 - DNA, 441 bp, Glycine max
  Clone ID: PAT_MRT3847_59185C.1
caggagcaacccctcttctctctttctttcttctttttcttcattattgctaagttaaaataaaaataaaaagtcatcaaactaagctggtaacttgtaagtcacagcaaagcagtggcgtgaattcccaggtgcccttcattctgtttggttttctctgttctttttgtttagcaagatacagttggtggtaggtgatgttcaactggaatgatcgtttcctacacaacatgcacttatgttattttgggcaaacacaaaaaaaacaggtttgttattaagatttatcgaaaattggaaactgcatcagaattcagaacgaggagatgggatctgaagggccaagggccattactattcatgtaacaggatttaaaaagtttcaaggggttcctgaaaaccctacagaagccattgtgaataatctgaaggagtatgttg

SEQ ID NO: 97643 - DNA, 499 bp, Glycine max
  unsure (1)..(499): unsure at all n locations
  Clone ID: PAT_MRT3847_59186C.1
tcttctgtttctccttctctttgacacatgtagatacatgatactaatgatgagattcaaaataacttgattttaatggcttaagcactattttctgttatattattttttttagttgtaggctaccttagaagagtagtataaattattttttcaatcaaatagattgcatcagttgatcggagtatagtaaatatggtgtgcaatagtgctaaggtaaaagcttggagttgcaatagtactaaggtttctggtttttagttactccttcatgccgtgnacagttaacttggggtcctgtctttatgataagtttaatgtgctaagctgtttcaattttggtatgtgtaaaaagatattcatgaactgttgattaataggagcgattcaacacttatggatataaagaggtntntgngtgtgttgcttaattgctgatttctgaatctgatgcanggctaactcgatgatgtctactccaatatcaatgatatagagt

SEQ ID NO: 97644 - DNA, 548 bp, Glycine max
  Clone ID: PAT_MRT3847_59187C.1
acgattgaaacaccattgtattaggttccaaactggtgaagaaaaatccagtagtacaacttgaaatgaccaaaagtaaaaagaaaaggaaaaacttacaactgaaacaacaaacaaaatttgtgaaagaaatttgactgaatattctttgcatggtttatactattgtatagcattaaagctatcaaactggattgttcttcaccaggtgtatattgcaatatgtgttatgtttcaatctctataataacttaaaattcattgtaattcctctgaaggacattggatcaactctaatatgttgattaccttagccatatcaggacggtttgagggcacttgtgatgcacaaaccaaccccaattttatcacaggaattgctttatctgcagcaaaattacccttaagcttctaatcaacacattgctccactttgtcatcattcaatgcacttattaccttgtaccaagaacacaacatatcctccgtgtattcaaaggcttttcctgttccacctcaaattaaaatttcaaactataatggacact

SEQ ID NO: 97645 - DNA, 591 bp, Glycine max
  unsure (1)..(591): unsure at all n locations
  Clone ID: PAT_MRT3847_59188C.1
tatttttgttcttttggggacattagaggattagcttcgtagtttggtccaagcggttgcttttggtttttcttgcacttcacatgtttttttttgtaacggttttgggtgcgacagtctgcaggactcctgcacgatgtattaacggtcttccggcgtcattagaacattacctctgttcttagcacccaccggatctctggtggtttatcttgcacatcacatgtctctgtactcatcagctgagttgggaaaagcgacagctgcgcagagcgcatagaggtgcggggaacgctatagcatggactcgcggtataatnccaaacgtgcgtatctgcgtaatacggcgttaaggcagtacgagcttanattgcataatccgtctaaactcgcaaacggcgtcataggccgcaaatggggcgattgagtgagtaaggcnnaacagaggcagtncnctgtcccgcgcaccgtaaacgtcacagagcatacgggggtacatatacttaatgnacgctgcaancaaagtaantaccggtgcgttnacagcacgccttgcttanctgagcgtacactnccgccacgtactcgaca

SEQ ID NO: 97646 - DNA, 557 bp, Glycine max
  Clone ID: PAT_MRT3847_59189C.1
atcattatattaagatttttttatttactttttatgaacatattatagtaaagagagtttggatacattggttgcgttgaaaataataaagtgtacagatttgcgtgcaagtaatatgaatgtgtgaacaacaatggtgataaagaaaagtggtgctgtatgagcattgagcgctgtgattatgtcattcgtgttccccaatgcccctagctatgtgcagacccattttgtcttctattctgaatcaaacttaatatgaagctgtagtctcttccacatccctgtgctcatgaagaaaacaaggcaattttttttttttaaaaagttatatacaagagaccccaacaaaattcttttgttagagataattaatcattggttcccatcattgcaaattattaagcttataataataataataataataacaaacaaaaagcttactaatagcaacactgcggtgaggccggctgggacaatgcacagtcgctctaacattcatcaatcatcatctgcataaaaatctttgcttcctaacgaagcattcacattctttt

SEQ ID NO: 97647 - DNA, 414 bp, Glycine max
  Clone ID: PAT_MRT3847_5918C.1
ctcgagccgatactatatagatcggactccggcaagcaacgtctcatgcgaataagcacaaatgactccccaggggagctccaaggctttgattatgtgcgtgatcccactaattgcatcgtctcaggctcaattgttgcttggcttgtatcccagatggtgaacgccggctgagacaataattgtaaactacgtcgtggagcatatccacaacgcttgatcaatagcaacatgatctcataagtaagcccgtccatgaatgtactctcaagggctgtggaggatcacatgctcgtggactgcacaccagggcatcaagctgaaaacgacgctattccagatctcacactgcgaagcgttggttgcaatgaatcaataataatgctagctgaagctgaatgcaccggtgtagtc

SEQ ID NO: 97648 - DNA, 265 bp, Glycine max
  Clone ID: PAT_MRT3847_59190C.1
aaaataaaaagcaccattttctttgctctcttaatcttttgttctttcacaaactcatacctacctggaggcatcgctgatttcgtgctggataatgaaagtaaccctcctgaaaatggcggcacatacgatattttgtctgtacataacagtattcgttggaatatgaagactacccaccggtaaatgaatgaatccctttcactgtcgagcaggcttgcatttttcactacatagggatggtaacagttattgtttgcccatt

SEQ ID NO: 97649 - DNA, 527 bp, Glycine max
  Clone ID: PAT_MRT3847_59191C.1
tcccgcaaagcttgcaactaacgcttacctcacttcttcgttcttccaccctcttctctttgtttcccactcctcatttctttggcgatgaaaccaaactcaaacccaagtcaatttcagtgactcaatttgaatttcgttcaatctgattttcgcttctctggttacaatgttgcacattgctttagctgcaccggtctctcccaccgtcgtcgcttttcaccgcggagcgaagcaatggagcgcgctaattccgaattttcggagaagcaggggaatcggttcgtccgtgttctcaagttctctcaggaaacgattgcaattgcggtttttcgcttcgggagaaaatggcggcaatggaggtgttctggaggagatatctgaagccgaaaaggagcctacgaattttgcgtggccggataacaagaaacctatggtttgcatattaggcggaggatttgggggcttatatactgctttaaagttggaacattggagtggcctgatgataaaaaccaccgattgtt

SEQ ID NO: 97650 - DNA, 347 bp, Glycine max
  Clone ID: PAT_MRT3847_59192C.1
tcaacattcacctttaaagcaggatgtaccattgatattgatgcccggaccgatcgaccttcccaacactactgcacgctgattgatgcttgtgaccctccctgctttatcacaatcatgagctactggtgcctccgcttaccgacagtgctgaccttactattgcctgcaccactagcggctctgattctgctatttttaatgacttactgacccgggagcatgctcttcctgctttcactctaggtgtgaagctcactatctgttgctgaaacaagacggatgccactacccacaactactctatggctaagtatgatgaaatacggaatgaagcctcttcttac

SEQ ID NO: 97651 - DNA, 211 bp, Glycine max
  Clone ID: PAT_MRT3847_59193C.1
atacgcctacaacatctctccaacctaacaacacgcatttaactcaagctcgatgagattcttaaggtcaactacagaccatgatactactcctaaatcatcatcctccctagatctcaaacctattcccaacacttcctaattcctatcaacaaacataccatatccatacgaccaacttcatatatatcaccctataatacttacagcc

SEQ ID NO: 97652 - DNA, 268 bp, Glycine max
  Clone ID: PAT_MRT3847_59194C.1
cggcgaaggaggaggagggtggcgaggaaaagataaagtgctcgagcaagcattgtggttcatgctgcggcggctacgtggctgattgcgtggcagtgtgttgctgcccttgcgcggtgttgcattgttgtgctatggctattgtcaaggggccttctcttgtggggagaaagtgtttagggttgggaaagaacaagaacaagaacaacaacattaaaagggttcaagaggggtgtgaagatggtgttgatgttgatgttgttgttga

SEQ ID NO: 97653 - DNA, 434 bp, Glycine max
  Clone ID: PAT_MRT3847_59195C.1
ccctgcaggggccggccccctattgccgggccctcccacgcctgcgttttcgcctcggccgtttcaccggcataacgtgccagtcccacttgatgcatctgaaaagagtaaccggcattcgtttgatcctgccaagggaccgcacgttagccccagcgaaatactttttcattttaatacaactcaggaagacatcccacattcggcttgcgaccttttatgttggtgcagagcgacaactcggccaaataattaagctgctgaatcgctctcttgcctattgaatactgcaactggccgaccttttccaagagcgggctccaatcattgtcgaggtcatggacaccatatgcacactacagaaagacacaatctaccggagctagacgtccgccttgcatatgatgcgtgcacaattccacaagagagtggga

SEQ ID NO: 97654 - DNA, 275 bp, Glycine max
  Clone ID: PAT_MRT3847_59196C.1
cacgtcgctgctccgtaccagtttcactgcatacatttgagagaaaactctgctaacatgtgagttagtatgaccttcttacaggtgatgagcttctctcggactccttccgttacactgaaattgacaatggaatgctgtgcgaagtttaggggaagcgtgctgttaaagcagcagttgatgttgacattggtgcaaacccttttgctgacggtgcagaagatgaaggaatctatgactcacctgctaaagttgttgacattgctgatacattc

SEQ ID NO: 97655 - DNA, 184 bp, Glycine max
  Clone ID: PAT_MRT3847_59197C.1
ctcgagccgccaaaataaaaaaacttccttttttgcaattggcatttgtcaccaaacaattgttggtaggtcttacaagcaagctttagcaacgacaatgaagaaaggggtcttacagctggacttacatgggggtagaatcaagccaaaagcttttgaaaccgcatcttggcctttaaggggt

SEQ ID NO: 97656 - DNA, 443 bp, Glycine max
  unsure (1)..(443): unsure at all n locations
  Clone ID: PAT_MRT3847_59198C.1
aactgctgatccaaaaagaaaaaaaaaaccataannngaaagcatttattcagttgcctttagaactgtcctagtttaggcattaaagctttctaacacgatgagaatacaagtttatttctttatcacccttaattttaagagatcaatgagaaaatctctccagacgcatccttgtaagtctcctcagctgaattttcatctgaaacttgttttgcatgaactagaatcatgcatgtctttccattttcattatgattgaatgaaacgttggcagcaatgacctctatgttgtgcctctccaacacagaagtgatggtgttcaagaggtgtgnnttgtaggcggagcaaactgtgaattgggcccaattgnnntgaatgttcangaccatgtttgaagaagtccatactttgtnnnnttctaatttcttcttcccattgat

SEQ ID NO: 97657 - DNA, 544 bp, Glycine max
  Clone ID: PAT_MRT3847_59199C.1
gagcttgtacctcttcttcttccactttcattccaaagggttattccttcttcttctggctctccattctcttcgctcttcgatcctcgtccgggggctgctccgaataccaccaccaccacgcgccgatggccacgataggaggcttacgcgactcccaaggctctcagaacagcgtccaaaccgaggccctcgctcgattcgccgtcgatgaacacaacaagaagcaggttgctgctaaatcgccctttgtaaaaatatttttttccacaaaataataatataaagaattgtttttatttttaatcttgttattcgttgtcacttgtttacgtgttttgaatgcacaagaccaggttgctattatgttagtgtttgattcgaattccagagtacaagacaagtttaacagaagaagttgatcattcgtgaactgtgatgttatggccatacagaaacagaaatatatattttaaaagcttaatacatgctggattatttgggaattcttaaagtcaactataaaaaatggtatcatttacag

SEQ ID NO: 97658 - DNA, 667 bp, Glycine max
  unsure (1)..(667): unsure at all n locations
  Clone ID: PAT_MRT3847_5919C.1
acgctatttatttttttttaaaaagtaatagtccaaatcgtcaaaaaattgtatatttccttcttgtttcactaaattcggctcgagctcgagccgctcgagccgattcggctcgagcggaatattaacatttaacaccatggaagccgtccaactcatgtccaccacaacaatcaaggcgtcgagtaacaattacaacgataactcagttcagaaaatcgatttaactccgtgggatctccaattcttccatattggaagcatccaaagaggacttctttttcgcaaagaaaaaaacacagaatattgtcaaatcgagcatctccaacactcactttcatccactctcgcattctttccactcctcgctggccgtcttgccattctcgaacatcacgacaacactgtctcctctcacatcgtatgcgacaacaaaggtgtcccttttgtccacgccgctgcacacaacaccactgtggccgacatccttcaacccaaatacgttcctcccattctccgatcgttcttcgcacttaacggagttaagaactacgaagccacgtcacaaccagtgctggcagtgcaagtgacagagctatttgatggcatcttcattgccctctcaatcaaccacgtcgttgcagaccgcaagtcgntttggcttttc

SEQ ID NO: 97659 - DNA, 308 bp, Glycine max
  Clone ID: PAT_MRT3847_591C.1
cctcctgcaaaaaaggcagcggagacaggacgggggcccaatcctaaatggatcccgcccacaaggctgcttatgatatcctggcgcataggcaggcaaaaccatgtggatcagggagctgtatccagtaacggagacaatggaagtctagccacggcactgactatagaaaaaggccaggtggcaggggagatacatggggattgtaacgcgaacatgtttcaagatggagtacagacatgggcatttatggtgggacttctaactagattccccaatatatgcattctctggccaaaagtcacaag

SEQ ID NO: 97660 - DNA, 108 bp, Glycine max
  unsure (1)..(108): unsure at all n locations
  Clone ID: PAT_MRT3847_59200C.1
ctatatgcaaagctcgtacagcctgcatgtccctatagccgaattcccttgtctacccactctttttcccacgctttcgcccactcgttcgtttagattttnagcacc

SEQ ID NO: 97661 - DNA, 240 bp, Glycine max
  Clone ID: PAT_MRT3847_59201C.1
ttgacatgtgtccaccaaaaccatcttttggtcgatggattaataattaatagacgacgatgcagagcaattaattcagatgtctatatgaatgaccaaatgaacagaagaaaattgatagccgaaaaaattgatcctagttggactacttgggggggctgggggcttgtcacttgacacccccatcaaagagaatccataggatgacaaatgaaagtgtttttacaggccataggtgca

SEQ ID NO: 97662 - DNA, 313 bp, Glycine max
  unsure (1)..(313): unsure at all n locations
  Clone ID: PAT_MRT3847_59202C.1
catatgagataacactgagcatcgtctagctatctcgatcgaactgtccaaggtcctgtcactgggccaaaaattaattaccttaatcgccggggggggggggtattgttggaaagggtgggccaacaactggctataccgccacgtatacacataccgcggccgggccgaagagaccttgccacgcaaaaggtaagaggggctagccaacgttacacaaccggaggatcggtgccccggatacgcagaccccgtacaantgttagtantggattagggccatgttcacnaggcaacatgttaaattaccggt

SEQ ID NO: 97663 - DNA, 127 bp, Glycine max
  Clone ID: PAT_MRT3847_59203C.1
gaaatacaatctaacactcacaagtggtaactttcaatgaggggctaatattttaacttgtaacagacaagtttttggtactccaggacctaggttggcatcacacagtcactacacaacagacaaa

SEQ ID NO: 97664 - DNA, 291 bp, Glycine max
  Clone ID: PAT_MRT3847_59204C.1
gttacaggaccaccatcgccaaaaacttcttcactattttaggagttcctagtgtacaccaaacaggctacaacatattggctccccttagaggtcaattggaatgtttgaacaagaacccatctgcaaaaagcgtgcaacctaagaatattctcttttaacaataggagaataacagaccatcctatatacacaagggctgaaaataaatatataggacggtgaatatgcgagcgtaatacggtaaattcattttagaaagacaattggactctggccttaagcacaaac

SEQ ID NO: 97665 - DNA, 295 bp, Glycine max
  Clone ID: PAT_MRT3847_59205C.1
ggctcgagaaatatgataacctgatgcgcttctctcctgtgtcattatctctgtcttgctatgcttttggctagcgccgctgagatgcatagcactgcattgggcctgatgatcataacatgcgtttaagccttggacatggcgcttgagattccctttatatttgaatcgttatcctctatgaccagaagatagagcggcctggggtagcctacattgggacacttactcagacttgctgagagattggctttgtacgtgcatggcgcttagtagagatgcttgccatatcttg

SEQ ID NO: 97666 - DNA, 177 bp, Glycine max
  Clone ID: PAT_MRT3847_59206C.1
cacgcgtcagacgggtgccaaaagaacaacaaaagggggaacaattgatttggttgatcaaaataacaagaacaattttaagaaaattgaaggcccttgtttcctccgttccccaagttttggcaccacggaattccattccttcgaactgttccctctcctaatggacccttgctc

SEQ ID NO: 97667 - DNA, 720 bp, Glycine max
  Clone ID: PAT_MRT3847_59207C.1
aaccatagttctcaactaattctcatatttcccaaacaaaaaagaagacggtagcaacttacattgcatgtgactctggtcagacataacctgaactattaataaagaggaagcaatattttagtaatatcataaaattgtacaatgtaaagcatgtcttcattcatttaactgacacacactttgtctctttctttccatgacttgagaagtttgtctaatgccacacgcgaagacccaccttctcttgtagcagccttggcttcatccttcgcaaccctgactcggttcctgactcgctcacctctctccgattccatcaactccctaactcgcttctccacctcaatcgccgccacaaaacccgactctgcagactcatgcatccacagtgcaaccttcatttcctccaccaacaccaccctattgaacctctgctccgcgtaaagcggccatgctatcatgggcaccccagcacacaccgcttcaagcaccgagttccacccgcagtgactcacaaacccacccaccgagtcatgactcagcaccgccgcttgtgggacccagtttttcacgactaaccccttttctttggttctgtccaagaaaccctttggcagcaaaaactccaaatcagggtcctcttgtgttcccaaagcaaggttatgcttttggtcgctaacggggtttcgcactacccataaaaatcgttgttctact

SEQ ID NO: 97668 - DNA, 323 bp, Glycine max
  Clone ID: PAT_MRT3847_59208C.1
ctagagcattctgatacccttcaagatcaatcccttcataatcccaatatcaataataaggcctatccttgtggaccaatccactactactacccctactttaaatactaacatgatcaaaatcgtacttagaccgactatgaaccagctcctgagcatccgtattacgccaaacaaacttgttgaacaagcacagaccactcactgcactgcactatatgcttcatatgtgcaggccaataccactacagaatttgaagaatcttacgccgaccttcttaactattatcctcatcagtgccaccatgctgctgatgaagcac

SEQ ID NO: 97669 - DNA, 372 bp, Glycine max
  Clone ID: PAT_MRT3847_59209C.1
ttttatcatgggtccttacaaaaggtgaaacactgacgaattctagaaagagaccccagtttttttgacgcgagcctaaaatttacctatttaatgcatactttagcaagggcgggcccccgggattttcctaactaacccataaaggggaccccccctgaccggaccttcttgccccgtcataacacaaattttaagggcgaacctcccggataaaattcaccggggtgccccttccaaacccaaggaacaaaaaaactttcccttttataaaaaaattgggccctgaacaaaaccccccccaatattgcctcttggggaaaaaacccttattacccccccaccttcatcttttcgggggcggttaacccc

SEQ ID NO: 97670 - DNA, 213 bp, Glycine max
  Clone ID: PAT_MRT3847_5920C.1
gtttttggtccatcattaacatattataccacctaagtctacatgcatggagtgctccagaagtgttgcggccactttatgaatcatccaaggtggttgttcataaaatgacaatctgcgtcgttttgctatatcatgcaaatagtcttatgaaccatgaggtgaggtttgttttctgcttggccaaagccccccgctgttgctgcggactta

SEQ ID NO: 97671 - DNA, 326 bp, Glycine max
  Clone ID: PAT_MRT3847_59210C.1
gacattcaatgcaaaggcgatcaagaaagcatggagatgggagttgccggagcgagccagagaatagagccatatcacatgggacactaggctgacagggaaacaaatgcgataagatcaggtcacgatgaggtggaacatccaaaggatcattgtgggcccaggacctattgaatcttaaattgccctttcccttttgcgaaaataggaaccttgctgaactgagattcccccagggcactttccgcagaggtaaaagaatgcctatgtgtatagggggaggagacttatcgaataatgctattctcatgaatatgccaaatgct

SEQ ID NO: 97672 - DNA, 318 bp, Glycine max
  Clone ID: PAT_MRT3847_59211C.1
gcttgcatgatccgtttgtgttttcgatttgctacatatcggattggtctcgggtcggtcaatgctggcaggtatacgggtgaaggcaatggcggatccggccggaatccggctccgtgagtggtgcaagcagggtgatgcggccgcggcgttgacagggtcacagtgcggcgaaaactgctgccaacaagactgaagcatgctgagcgtgctgcgcgagcaccttgcctctgatatcaccaacgtacgctgcgagcttacgccttacgtgctacgacgccgacccgatacgaccgaaaccaccgatgatactgcgga

SEQ ID NO: 97673 - DNA, 423 bp, Glycine max
  Clone ID: PAT_MRT3847_59212C.1
cccacgcgtccgttcacatctctaatttttggaggctgatctctgtttaagatgtttgcaaattaggagtgtatttttatttattttatttattcacttcttttgtagctgattaattggtttggcaggttaagtatggcataggcatctgaagcttcataaggcatgaggagattttcatgcgatgcgtgtcatgcttaatggtattttgatctgtatctttatattattaaacttatactcatgagcctgcttgtaatttaatttagtacacccaatttatacgtatccattattccatttggtaaaaaaaaaaaaaaaaaaaaaaaaaaaaaaaaaaaaaccataaaaaaaaaaaaatttaaaaacccccccgggggggccggggttttgcgcccccagccctttgacccagggctgcct

SEQ ID NO: 97674 - DNA, 1254 bp, Glycine max
  unsure (1)..(1254): unsure at all n locations
  Clone ID: PAT_MRT3847_59213C.1
ccacgcgtcagcccacgcgtccgcccacgcgtccgcccacgcgtccgcggacgcgtgggggatcgaaagacgcatcttttgcttcactcgtcatcactacgcagatcgcagcaaaccagagattgaactccgacgatgcctcccgtcgctcctcgatccggcgatgccatattcgccaacgtcgaacgcgtcaatgcggagctgtttactttgacgtatggcgcaattgtgcgtcaattgctcacggatctggaagaggttgaggaggttaacgagcagcttgatcaaatgggttacaatattggaatccgattgattgatgagtttttagctaagtctaatgtctcaagatgcaacgatttcagagagactactgatgtaattgcaaaggttggttttaaaatgttccttggtgttactgcatctgtgaccaattgggatgctgatggaacatgttgtagtattgttttggaggataatccattggtagattttgttgagcttcctgacaactgccaaggtttgtactattgcaacatcttaagtggagtcatcagaggagccttagatatggtgtcaatgaaaactgaggtaacttggcttcgtgatgtgcttcgtggtgatgatgtgtttgagttgcaggtaaaacttctcaagcatgttcctgaagagtatccatacaaggatgatgagtgaatttgtttttgtagtgatatatgctcgaggtttttattacttcatttctgcagtattagattatcatcttctgacttgtcctgtgtgtattttgataaagcactaaatacaacagaaaatctttagttaaatcattatcatattggctttgacacgagctacgatctattatgatttcagattgccctatagattttcagtttctcttattgtcttcctcattatatgttatcatgggcttgatacggatgttttagctattagatagtactaattagcaaacaaatttcataattcaaacggatttaagtttggaatccgtgtattatcattagtcactggatatttgaatgccctgctccatttgaaatgtaatgttcctaggatttaaaatcacttatttaagcttccggcttctaatttttttcttcttttggtgtctcagagatgccatttgtcatgtacnnatttnncttttctaaatgaacattaaaacagtcaatctatttaatgttttcccaatatgtaaaaaaaaaaaagaaaggccgcccgcacaat

SEQ ID NO: 97675 - DNA, 324 bp, Glycine max
  Clone ID: PAT_MRT3847_59214C.1
tctactagtcatcgggctcccgtcattttcccaacgactgaatatctgttttttcatgcgttacggttcatgcacactgaggggaattggcctaattgtgccattgctcaatatctatgcaaggtacattcaatgacagtgacaattgttttggtgaatgacaactgcattaactttctggcactaaagacatgggtttacattaattacaattatccagatacactcttgttatgttctgcgaagggaacattaaagacattggcatatgttgttgaagatgcattttatatgcatgtcgccaatcagacctatgacacttgt

SEQ ID NO: 97676 - DNA, 205 bp, Glycine max
  unsure (1)..(205): unsure at all n locations
  Clone ID: PAT_MRT3847_59215C.1
ctccgatgaagnnncnnnaagngcagcacncaanggtttagagggnnnggaccatacggaaagaaccccncnngccacaacngagggnnnnccncangnaccnncacgcaaaaanggngaaaaaggcaaaaggagacccgcccccggggacggcgaagagacgacacngaccccaggaaccagngnngaagaggcccacaacaag

SEQ ID NO: 97677 - DNA, 477 bp, Glycine max
  Clone ID: PAT_MRT3847_59216C.1
atgacgttgcacgcgcgcactcgtcagctcggcagatctgctcgaggcggcttcaaccttgtagttattctctttcttctttattagctatccctctcttgaaaaatctagatctcgttcttccttgatctacgttacgctattagagaccggatctgtatggatctgaaccagatctacacgccgatggtggctaaggcgctggcctatcatcagatctgatgcagtgggaggcgtcagcatgctactggtaacacgaggatacgtgtatgataatgggatgagaacaacgcatatgcagccgcttacgattgttcgatcgctacacacgctcgaatcggattattcatgattgatccatatacagtatgtcttcgctccggctatagtagctgcgcatctcggatgtggtcaaacaagtgtatgaagtgaagctatgggctggaaaatgtggacgccagagattccgggaccaaa

SEQ ID NO: 97678 - DNA, 179 bp, Glycine max
  Clone ID: PAT_MRT3847_59217C.1
gcggtccgcccgctgtgagaagactacagagggggactcaccacttcaaaacacctcataacacaaagcactaagcagagctcatacttgagttagaaaatggccagcagcttcttgaatagcctgtctccatccccatcctaggttgcataggccgggaagttggccccataaccccc

SEQ ID NO: 97679 - DNA, 269 bp, Glycine max
  unsure (1)..(269): unsure at all n locations
  Clone ID: PAT_MRT3847_59218C.1
gngatacatgctaaataattttattatacacataaatgcttaaaaataanaaattactgtaaatcaaaggcatatccataactaacaatcacaagtnataatctaaatacaaaatcaccattaatctaaggcattgttttcaagatgacaacaacaaaattcaaagaacataaggtgtgaaaagtagtactgcaccaaattttaagcaagttgatggagttnatagcaaaaaggaagatgatggattaatataacnngnnatacatagg

SEQ ID NO: 97680 - DNA, 293 bp, Glycine max
  unsure (1)..(293): unsure at all n locations
  Clone ID: PAT_MRT3847_59219C.1
ggagcntnaaaganaganagcnacagcaatataatanacantcanacggngacnagaagaagatcangcaagatatcnagaagcagnaggataagcagaagaagnaaatggtcaatgnagaatttaagnagaaggagcgtcacattgtgangtggagtcaagaggtccttcttgttctncactacaaaaattattttccttnctgtttgatnttncngaattncgccngctttgggagtctaatgagtgtatgngggttgcaggaagatgacatactgagggngcagntaggt

SEQ ID NO: 97681 - DNA, 315 bp, Glycine max
  Clone ID: PAT_MRT3847_5921C.1
gggttgaacacaatgttcttgttgattgctatgaggtagaaggaagggtgggagcagcggcaagcctgaggtagcgaatcatattgagatggggtcgataggtcggataagcatgtccactgtggtgaaagcggtgtatgaaatcaccggcactggcaacacctagatccgcgaatctttcagagagctctgcaccttactacgcatccctcgccaatctcaatccgaaagcgctctaattctcttcaagctcatgatactctataatttaaagagttacggcattatcaaggacacgatttgggagcataaatt

SEQ ID NO: 97682 - DNA, 201 bp, Glycine max
  Clone ID: PAT_MRT3847_59220C.1
gatgacgacgctaactacgttttagtcttctccgtcttcgccaatttccctctctcgatctgcgccttagagttctgagcctctaaagattaccgacccccatccctgtcaaggaaccggatacaacgaaggggaaaggatctgtgcgcaacacctacgtgacctactgggaaaccaggaggacgaacattaaagaattcg

SEQ ID NO: 97683 - DNA, 260 bp, Glycine max
  Clone ID: PAT_MRT3847_59221C.1
gattctgactgggcttcagaccctgatgataggcattctacttctggtgcagcactgtatgttggtccaaacttggtatcttggtggtccagaaagctgaaagtggtctctcgatccagtacagaggcagaatacagaagtttggctgctgtcacagctgatattctatggattcagactcttcaggaacttgcagttcctcatatcacaccgcttgtgctctgtgataattccagtgctgttcaattagcacataatct

SEQ ID NO: 97684 - DNA, 129 bp, Glycine max
  Clone ID: PAT_MRT3847_59222C.1
aggtgaaaatgtgaatggtataactggttataagctaattggcatgcaggatgaaggttcatgggacagtgtcctggtcttaccgtgaccggctcaattctgtctcaaagctaatgctggagcctatct

SEQ ID NO: 97685 - DNA, 305 bp, Glycine max
  Clone ID: PAT_MRT3847_59223C.1
ggctcgaggcaaaggaggctgcttacttcacagcccaagtcatcatcatgaaccaccctggtcagattggaaatggctatgcccctgtcccttactgccacacttttcacattgctgtcaagtttgctgaactcctgaccatgattgacaggcgatccgccaaagagcttgccacggagcccaacattctgaagaacggagaggctggttccgctaatacgaccccaaccaaacccatggatgctgaaacttactacgacaatcctccacttggtagggatgctggtaggcacaagcgacaaact

SEQ ID NO: 97686 - DNA, 172 bp, Glycine max
  Clone ID: PAT_MRT3847_59224C.1
aacattatatcttctacaaacagcttcttctcaattaacccctttacaaaacttccctttttgttattcccacaaacccattcttattcattctcattcttaatacttattaaacattaaatcctttccacttttcctccaaacccttattaaaaacaccttctcatttttt

SEQ ID NO: 97687 - DNA, 482 bp, Glycine max
  Clone ID: PAT_MRT3847_59225C.1
tagaaactttggatgaacctgatggaaagctttcttatcaggaacttggaattgcgaagctttctggttttcgtgaatggcttgctctccatccaatcattgcaggatcagagaatgcttcaaaaatgataatttttgctcatcaccacaaagttcttgacggagtacaggtgtttttatgtgagaaagggataagttttgtgcgaattgatggaaatactcttgccagagatagacaatcagcagtagtctcatttcggtcatcaccagaggttaaaattgcaataataggtattctagcagcaggttttggacttgatttctcaacggcacaagatgttgtgttcttggagctaccaaagtgcccaactataatgctccaggctgaggatagagctcatcgtcggggacaaacaaatgcagttaatgtatacatattctgtgcaaaggataccttggatgaatcacattggaaaaatttg

SEQ ID NO: 97688 - DNA, 402 bp, Glycine max
  Clone ID: PAT_MRT3847_59226C.1
agattctggagaaaagtattttccacttaatatagaatatatctacaagccttcacattgaatcggaaagtaaaaacatcacaaaaacatatctatacacatatatgatatatcatgtcactctatgagccagtccaaatctagcactgctctgaatcttgaatataaaaattattaggctcgtccttataaacctctttccaaatgccagatacctactcgtcacaaatcacatgcctaagagattgcatcgacaatgcatactttggcacattgctaatcatggagcattccctgatgtcaatcttgtccaagctaactagactacctatctcttcaggatagcaagtcaagataacacattgagaaatgtccatatactacaatcttatcatgtgacta

SEQ ID NO: 97689 - DNA, 124 bp, Glycine max
  Clone ID: PAT_MRT3847_59227C.1
ggctcgagcttatatacaacgttcttcattcttaatgatatatccacccatcaatatgtggctatgggatccaatcaacctaagcctactcctcttaatctccttagtagtttccactaccacc

SEQ ID NO: 97690 - DNA, 1455 bp, Glycine max
  unsure (1)..(1455): unsure at all n locations
  Clone ID: PAT_MRT3847_59228C.1
ttctttcgttgtttctcaggctgatgggaatttgtacgtatatgaaaagaacaaagatggcgcctggtgattctctcttctcccaagttggtaaatggatccaaacctcaagttttttcggtttgccccattgcacgtttacaagtaagagtaattccctatatgcgaanattgggcatatattgccccagggtgtcatattaaataagtaatttctcttctcctcgaatgnggattggggcatttctttagcaacctggttgggcgaagaattggttattttaccgaagtgggtttgatctaccttcaaaagatacaactttattattgtggcgggaaaaagttattatggtgctgaattgttatgttgtgcttggagcatggatggaaagtatattttgacggggggagaggatgatttagttcaagtttggagcatggaagatcgcaaggttgtggcatggggtgaggggcacaactcatgggtcagcggtgtggcttttgattcatattggtcatcacctaattcaaatgacaatgaagagactgttagatatcgatttggttccgttggtcaggacacacaattgcttctatgggacctggaaatggatgagattgtggtacccttgcgacgtccttctggtggatccccaacttacagtgctggaagccagtcttcccaatgggacagtgttgtcccgttgggtaccttgcagcctgctcctagtatgctggatgttctgaaaatctctccactcgttacccaccgtgttcatactgaaccactctcaggcttgatatttacccaggaatctgtacttactgcctgtcgggaggggcacataaaaatctggattagacctgcagctgctgagagccaatcaagcaacgctgaaactctcttatctaccagccttaaggagaagccttcaattttgagtaaggttggcaattctagccacagacaatgactaagatcttgctaataattgaaagggtattcactttgaagacccttttaataatttcttcaatgtccttcttagtctccctctatcccttttcacagggctaaaagccatgcaatttacttctcactggtgccttgagtggcctctggttttaaatcgagcctaatggcgctgcgtgatcaatgtagttgacctcacctagtgggttaaagttataattattgtttttaatatggtttatctttttatccggttgattacctagataaatttttcatagtggtaaagataaacctcctggtttcatggtgtactgtataatcagctattaacggatgagcatgccattcatgccgctgataggatggtagagagagttctccccggctgccagctgtaattaaaagcgggctgtccttagaatatccgactagtgactacaggaattatgttaaattggtccttggagatcggtacgttt

SEQ ID NO: 97691 - DNA, 343 bp, Glycine max
  Clone ID: PAT_MRT3847_59229C.1
ggaaaaatctgacttgccatttattttttgcccaaataaaataagttcagtagcgctattacgtaatgcaaccagcaaccagtggcagctgttttaatagcataccagttgctgtagagtacaattccaaatcaggggtcactgctcagaatcacatacccatgtgcctaaaagaattccccccccccccagttacaccgtcttcaagtatgaagattgaagatatccttgtaaacatcttttcaaacttcaaacaatctaaagtgttatgttgctggaaccaaaaaaccaatattcaaagaccctgttagagaaaattttaatgggatcacaagttataacc

SEQ ID NO: 97692 - DNA, 170 bp, Glycine max
  unsure (1)..(170): unsure at all n locations
  Clone ID: PAT_MRT3847_5922C.1
gtacgtagctgatccttagacgccgctttttttttttttnnnnnnnncaggaagaagcaaggcaagcaccgggaagctggacctttgcgttttgcaccgacgaccgggtcacccgaattcgacggaccgaggctacagtttctaaggggcgataagctgcgtaatatggc

SEQ ID NO: 97693 - DNA, 364 bp, Glycine max
  Clone ID: PAT_MRT3847_59230C.1
acagatcttcgtcaaaactctcactggcaaaaccataaccctagaagtcgaaagctctaacaccattaacaacgtcaaggccaagatccagaacaaagaaggaatccccccagaccagcaacatctcatcttcaccgaaaaacaacttaaagacagacacaccctcgccaactacaacatccagaaagaatcaacccttcacctcatcctccatctccataataacatacagatcttcggtgagaccctcaccaacaagactataaccctagaagtcgagagctgcgacaccatcgacaacgtcaagactaagatccaggacaggaagagtatcgcgccagaccagcagaggctgatcttcggg

SEQ ID NO: 97694 - DNA, 406 bp, Glycine max
  Clone ID: PAT_MRT3847_59231C.1
ctcttgaattctatgatatctctaattattggtgataaatgattattacctaccctttactattggccaatggtatttaaatggcttggtgaaagtctggtaggattccattcagtgggttttgtaaggacctgcattggctgagcagaaaatttggctgtggatctgggtttagggttccaagtagggaagacaccccaatttcggcaaattagggggctacttttcattccaaaattttgaacttgagctgaatgttggtaatatttgcccttaaaatgattaatgaatcgtttgaccgtgtgctgcttgagagttttaacactgattttgatatatattcctttcttttcaattgcaggaatgacattagctgagtatttcagagatatgggttataatgtca

SEQ ID NO: 97695 - DNA, 356 bp, Glycine max
  Clone ID: PAT_MRT3847_59232C.1
accactcgtcaaccggtgcgcggtgcaccccatgtgctgcctccattcacgtggcgctcacaggccatgcgctggcgttgcccaccagaagagaccacacaatgacacttacactgcattcgctagcaacgagcggaagaacagcacatgcatcgcaggtgtcggccacccagctggcatagaagaagtttgagacgtctttcctacctcgccagaccttgatgatgcacaattggcaaaagaagtacaataccttcttaggaagggatggattccttgcttggaacacgaaccagaccacggtttcgtctaccgtgggcacaacatggcaccaggatactaccatggacgctgct

SEQ ID NO: 97696 - DNA, 1447 bp, Glycine max
  Clone ID: PAT_MRT3847_59233C.1
tcgcgatctagaactagtttcaccccctaaattctccatcagagacacaatccactccttaattccccaaaccaaacacgccgttaactaactcaccaaccctccctcctttacccgagagatcgattctctctgtaagtaaatcttgccgttaactttctcggaaagtcggaatttcccggaaaatggaaggaggtcgccggaggataacactttacgatcaaatgaaagccggcaacagcagccgatactcactcgccagcctcatgctgggcgatgtcgttttcaagaaggtggaagcagaagaagcagaagaagcagaagccgaagccgaagcgagctgtgagctgagccgaagccggactctccaagacatcattcgcgaagaaaaacctagcaacagcagcaacaacacgaaggatcgcaactcttggagagccttcacggcgaagcttcggctcaagcgcgccatcggctcggcttggtcctccaccaccactatcactaatcacagcaatgatgatagaaatttacctaatatacccgaaactcgccatgactcggacgagttgactcagcagaacgacatcgttgtggacggcgccaacgattcggatccgatcgcgccggccgggtcaccggtggaacacgtggaagccgttggcaactcctccgacggagagaacaaccacgaggcggtggttggagtgtcgctgatggatttgttggcgggaagcgaagcaagaaatggatttatatagagtgagcgatgatgacgatgatgtggcagaatatgagaagagagaagaagaaaaaggtacggctgcgagaagactacagaggggggtggagtataattgctgcgtgtgcatggtgcggcataaaggcgcggcgtttattccgtgcgggcacacgttctgcagaacgtgttcgagggagatttgggtgagcagagggaactgccctctctgcaacaatttaattttggaaattcttgatattttctgaacctggtaataattttcattaatctttcaatataacctttttaatctctatctatgaatttttctttttctttgggtttggggaagaaactatttctactattagattaggatcatgtggttatgatgaatttgtacgtgacatgtgattatgatttgtgattaacaaaatggaattagtaacgtgtcatgaagattggttagaatcaaatgtaaaggagtggattatggatgattttatttacacatttactgtgtgtcatatatttggctcacgtgttcatgtgatgagatgctgtatcttccggtggattctagttgtgcttagacgataacgtgttactagtgagagagtggacaagctatggaatgataacttcaaatgtggtttacacgattgtatatatttatctttttatttttaatttggctattgatgg

SEQ ID NO: 97697 - DNA, 413 bp, Glycine max
  Clone ID: PAT_MRT3847_59234C.1
attatcctttgcgggacgaaccgtactgactgcagaaccttagttcaatgatcagacgaagggtgatgttacagcaaggcatgagcggctgggcactcttaaacaagccggaaggagcaaaccggtggccacacctggtgtttctgggagtactgtttttttggaggcctggactgagaccaggattgtggcgtggcgggccacatatgagcgagccactatctgcaactgggacggtctaggactgactgctggttcaacgacaccgaagactatggcatataccccatacatgcctgctgatgctgggagagcgctaattgcgaagcggaccgaatcaaacagtgagcaaatgggtgatactgcatggaccacacacctcaatgcaagatgtgaccgttaaggttatatgg

SEQ ID NO: 97698 - DNA, 156 bp, Glycine max
  Clone ID: PAT_MRT3847_59235C.1
atcgtacggctgcgagaagacgacagaagggggggctattggggaagtttttctgtttactccccacaacaggagacacgggagatgttcggtcaggccatacgaggggagcaacgacaaagccaagcggactagcgcgagcaaccgcggtatcac

SEQ ID NO: 97699 - DNA, 609 bp, Glycine max
  unsure (1)..(609): unsure at all n locations
  Clone ID: PAT_MRT3847_59236C.1
cgaccctacgcgtccggnaaaaaaaaaaaaaaaaaaaaaaaaaaaaaaaaaaaaaaaaaaaaaaaaaaaaaaaaaaaaaaaaaaaaaaaaaaaaaaaaaaaaaaaaaaaaaaaaaaaaaaaaaaaaaaaaaaaaaaaaaaaaaaaaaaaaaaaaaaaaaaaaagggggggccctttttaaagattcaatttttatttccccttctttcaaaggggggggtttttttttggggcccctaaattaaatttaatggcccgctttttaaaaacttgggaattgaaaaaaccttggtttacccaaattaaatgcttttgaaaaaaatccctttttcccaatttgggtaaaaaaaaaaaaggccccaccaattcccctttccaaaaatttgcccaccttaattggaaatgggacccccccttttaccgccctttaaacccggggggttttggggtttcccccaaggggaccctttaattttccaagccctttagcccccgtttttttctttttttccctttttttttccccaactttggcggtttttccccgaaaattttaaaaggggggtttcttttaagggtcccatttaagggtttaccggccctttacccc

SEQ ID NO: 97700 - DNA, 852 bp, Glycine max
  Clone ID: PAT_MRT3847_59237C.1
ttctggctttcctcgcggggaggattatccgtctcctgagatctttgcgaattggagtcctgtgtatttattcacttcaaaagaggacatggactccaaagaatctgaagcagctttttgcatgggcgggcaggtaacagaggaaggcctaaagtggttactggataaaggatataaaactatcatagatctcagagaagaggatgtaaaagataacttctatcaagcagctgtgtgtgatgctatttcatctggaagtatcaagttggtcagaatccccgttaaagttaggactgcacctacgatgaaacaggttgagaggtttgcatcatatgcttcagattgcagcaaaagaccaatttttcttcatagcaaggagggagtttggagaacatctgccatggtctccagatggaggcagtacatgactcgccctgcatcaaagtttttttctaatcaagcagttatttccaatgacatgtcatcatattatacaattggatctggaaagctgcaggactcaatgattgccgaaggatcctccctgcaaaaagatactaatttgctgcaagagggtttgggtgcaacacatggttctgccggcacatttgactcatgttcctcttcaaaaaagaataacgaaaaaacacaaagtaatggagctttaagtgaacttactcctgatgatattgcttcatcacaagccactgctgctactggggaaggatcttttcccagtttctccagtgaaactcgcccttagaagctcaagttcctccttttgatatcttttccaaaaaagagatgtccaaatttttgggaagtagacagattccaaagccctcacatttc

SEQ ID NO: 97701 - DNA, 471 bp, Glycine max
  Clone ID: PAT_MRT3847_59238C.1
ggctcgagattttagcttgtgtttgagctccccaatcatttccacacttgtacattttctccttgttgcttctttgttttgtcctgtttgttcctcagatattggcaatattggcaacaccccagttgccaatcagactttcaagccgcaagaagaggctcacaagatgaacatcataagaactcgtcttcaacagatcaacaagcccgccgttaagacaattcagagtcctgatggtgatgtaatagactgtgtggtgtctcatcagcaaccagcttttgatcatccaatgttgaagggacacaaaccactggatcctccagaaaggcctaaaggccataaccaaatggacatgagtgagaattttcagttatggaccatgtcaggggagtcctgtccagaggtacaattccaattagaagaacaacagaacaagatatgttaagggctagttctgttagcagatttgga

SEQ ID NO: 97702 - DNA, 387 bp, Glycine max
  Clone ID: PAT_MRT3847_59239C.1
gggttttccctttttttttttttttttttttttttttttggtaaaaatgccttaaaaccccatttttaggagccggagttttgaaaaaataacccaagctttttcacttgggagggaggacctttacttactggccctttttgaggggaaattaaatgcgcgggcgctttgctcccccctacttgggaccaaaaaatgatgcctgaaaaaaactagaccctttttcaaaaaggggaaacccccctctttgccttattggcaagattacaaaatctttaccacctataccaaatttaaccgattccataaccgaagttaaaaattgggccgaatttccagctttcttaccccgggctgcgaaggtataaattttttatagggggcccc

SEQ ID NO: 97703 - DNA, 246 bp, Glycine max
  Clone ID: PAT_MRT3847_5923C.1
cagcccagacggccacgctagggggggggggggcttattgggaatttcttctccttaaaaacaaaaaaatataaaagctttatcccaggctttatctacgctataaaaaaattgtggggtcgtcgggtcctaacccggcacacgaaacaggggattcgcaattatggagtatatctgagatgtgagcaatagactcaccaaatccggcggcaaagagtgggctcacggaaaaacgatcgggcgacc

SEQ ID NO: 97704 - DNA, 336 bp, Glycine max
  Clone ID: PAT_MRT3847_59240C.1
tttttttaatggtaaatttgattaggtattataaattggccatggggacccaatcacaattttttaatccttactggccttataagaaaaccaattgccctggtccattgaccgatgaattttttttttggttcctggtgacccctagcctaaattattatccaagttacccctgggcccatgaataaaggttcttctttattggacctgaatgttgggaaaaaaattcccttggaggaactgcgccctttctttatgttttagggaacctttttccggccttgcttaaattcttaccttaaagaaccttgagggaatggccttttaagtcttacc

SEQ ID NO: 97705 - DNA, 842 bp, Glycine max
  Clone ID: PAT_MRT3847_59241C.1
gtggcgtccgcccaagttttcccaagtcttgtgcactagactccaagagagagtcagagagagaatagaaggacgttgcttgttgtgtgcttccaagacattgaagatggtgaaggagtaaatagcctttcttagaatacacaccaccatgtgttggatagatttggtggaatcaaagcctaggaacacacacttttgttttgtgcatggaagaaaaagaagtagaagaagaagaagaagaagaagacaaggccaatgtgaacaaagtcacacggatttgccaatagaaacaaggaagagaaatctctcaagcatggatttcagcttgtgtttgagctccccaatcatttccacacttgtacattttctccttgttgcttctttgttttgtcctgtttgttcctcagatattggcaacaccctagttgccaaccagactttcaagccgcaagaagaggctcacaagttgaacatcataagaactcgtcttcaacagatcaacaaacccgccgttaagtcaattcagcgtcctgaacgtgtcgaaatggactccgtcccatcttttcagcaccctgcttttgacgaactcgtgtgggtggtatcccttctgctccctgcttcggatcgtcctaaaggtcagagacactgtgtggtgagtcatcagcaaccagcttttgaccatcccatgttgaagggacacaaaccactggatcctccagaaaggcctaaaggtcataaccaaatggacatgagtgagaattttcagttatggaccatgtcaggggagtcatgtccagaaggtacaattccaattagaagaacaacagaacaagacatgttaa

SEQ ID NO: 97706 - DNA, 149 bp, Glycine max
  Clone ID: PAT_MRT3847_59242C.1
caaaattcttaagacgtttttatttatgtctaggcaaacattatcttgtctattttaaatatccatcattcatatgctccttatgtctttatataaatactccctatcattttcaataatttaaattatctccaaattttcaaccaatt

SEQ ID NO: 97707 - DNA, 318 bp, Glycine max
  Clone ID: PAT_MRT3847_59243C.1
agaaaatcaaaaaacttggtggcgctagattacaataaacactggggagggcaccttttgacttgggcatcacagtttttttataaggtttaccttcaaccgttccaatttaatgccccatcatattttgggggggagtattttgaatttttggggggcgcaatacaaacaatttattttccacataagttagcctccttccaaaggaatttagaatcaaccatgccgattcttatttagtcgatcggaccctgcaagaaggggctcttgacatgggcaagtccctgtttcaatccttaaatttcaaggtggcataag

SEQ ID NO: 97708 - DNA, 319 bp, Glycine max
  Clone ID: PAT_MRT3847_59244C.1
aacatagaaggctaggggggattatgaaggcactaaaactcataaggaaggagagaaaagaaaaattaggcggaggagatttccccggagtatggactacaggaatgatgcatcgtggaccagatatgacatggaacaggacatggttgagggcgcagctgctaaccatgattggctgggaggtatattcgacaaggagtactcgttggacatgtacggtagtcgaccctaggccagaagcactgaatccacagccattagatgcacaggcgcgtatagcgctggcgaagctagccaaaagaacaggctgaatcctgag

SEQ ID NO: 97709 - DNA, 215 bp, Glycine max
  Clone ID: PAT_MRT3847_59245C.1
ccagtaccgtagaatagaaaatgtaggctactggttaatattacaaacatatgacatgtaaaatcacaagggcaggtacatgtcatttgtttgtaaagtaaccagtaccgtagaatagaaaatgtaggctacttgagcactttttgtttagaacttagtattgcaagtgatgttaagaatcctgcttcaacttttcaaatcttcactagttgact

SEQ ID NO: 97710 - DNA, 1819 bp, Glycine max
  Clone ID: PAT_MRT3847_59246C.1
gtacgacgtggatcactacctagctagctagctaaaatggaattagttctacatttcctaaacaccacaacaattggagttgtttctctaatcttcctcttgtgtttgtttttgtatggtcccttaaaaaaagttcacggtagcagcaaagaggctcccacagttggtggtgcatggccaatatttggccacctcccattgttgattggttctaagtcacctcataaagccttgggtgctttggctgagaagcatggacccttgttcaccatcaagctcggtgccaagaaggctttggtagttggcgactgggaaatggctagggaatgcttcacaacgaacgacgttgcagtttccgctcgccccaagcttcgtcgtcgctgagctcatgtgctacaacaaagccatgttgctcctggcgccctacggttgctattggcgagaactaaggaatatcattgtgacggtgtttctctaccccagcagttcatagcgacttcaagtttatcgtgtgtccatagttcaaaattcgatcgtcgaactctacgacttttggagatcccaacagatcgaagtggatgatccattccattagatgaaaaaacagaaagcgtttctcaccacccatatagacattgatgttaggggacatcattttgagctattaccatttggtggtggtagaagagtgtgtcctggaatatcctttagccttcaaatggttcatttgattcttgccagtctttttcattctttttcattcttaaatccatcaaatgaacctattgatatgactgaaacctttggattaggcaagactaaagctactccacttgagattttaattaagccacgattatcttctaattgttatctatgaaagcatgtgattcttgtcttagcggtttgtggaaagttcattgttaaactatgtaatctttttttagttgaatcataccttgcccagatctatttaagtcgcaataattcaaacaggaactgaaacaagcattagtactattatttgggcaatgtgtttgatattgaaaaatcctcttatactagaaaataaagcagaactagacatccaagttggaaaagacagatgtatatgtgaatctgatataagtaacttagtatatcttcaagctgtagtcaaagaaactttaagattgtacgctccaggtcccctctcatcacctcgtgaattcgcagaggattgcactttaggtggctaccatgtcaaaaagggaactcgtctaattacaaatatttggaagattcacacggatcctaatgtttggtcagatccattagagtttaaaccagaaaggtttcttaccactcataaagacattgacgttaagggtcatcattttcagctattaccatttggaagtggtagaagggtttgccctggaatatcctttggccttcaaacagttcatttggcacttgctagtttcttgcattcctttgaaatcttaaatccgtcaactgaacctcttgatatgactgaagcctttggagtaaccaacactaaagccactccacttgaggttcttgttaaaccatgtttatctccaagttgttacaaaagtatgtgatatttaattatatgttagttgtgtgtattgttgattgttaaactatatgtaatatgttttggtgtaataaggtttgccttgcaaactattcgaaaactatgtattttgttgctttcattttaatcatcacgaaggaagagatgtatttgaagaattttgttatggattatttggtcataatagtatttgggttaaggtcaaaattatacttt

SEQ ID NO: 97711 - DNA, 786 bp, Glycine max
  Clone ID: PAT_MRT3847_59247C.1
ggacgccttgggtgattgcattgttgcatgcaccttggtataatactaatgaggcacatcaaggtgaaggtgaagacatgagacaggccatggaagagttgctttatgaagctcgtgttgacttggtctttgctggccatgttcatgcatatgaacgctttactcgaatttatgacaataaggctgattcatgtggtccgttgtacgtgacgattggagacggaggaaaccgtgaggggcttgcattaaggtttaagaagcctcctagcccactttctttgtatcgggagccaagctttggtcatggaaggttgagaatagtgaacgaaacacatgcatattggtcgtggcatcgcaacaatgacaccgacacatttgtagctgatggtgtttggattgagagtttaagcaactcgaaagcttgctggaatgcacaaggccagcatgttgctcatgaagagctttgaaagctcaactttgacacccaacaagaaagagaagcactttaggaaaaattattaaatatactctaaaactacaactactatatgatctataaacacatggctaggactataatattatttttcctagaaataagtttatgttgaacattttctcatttttattatttgtgtttgtataactggatatgttgtgcgaaaaaagtattacttacccttgctgtactttttcttttgtaaacaataatgatgaggtttgaatttacgaattcatgtatttgtgttaatgttaaaaaaaaaaaaaaaaaaaaaaaaaaaaaaa

SEQ ID NO: 97712 - DNA, 558 bp, Glycine max
  Clone ID: PAT_MRT3847_59248C.1
taatgtcaaaaaaggaactcgtctaattacaaatatttggaagatccacacagatcttagtgtttggtcaaatccattagagttcaaaccagaaaggtttctaaccacccataaagacattgatgttaggggacatcattttgagctattaccatttggtggtggtagaagagtgtgtcctggaatatcctttagccttcaaatggttcatttgattcttgccagtctttttcattctttttcattcttaaatccatcaaatgaacctattgatatgactgaaaccgttggattaggcaagactaaagctactccacttgagattttaattaagccacgattatcttctaattgttatctatgaaagcatgtgattcttgtcttagcggtttgtggaaagtccattgttaaattatgtaatcttcttttagttgaatcaggtttgcctgataaattatgtcgaaactatgaataattgtctctcatttaataatatcatggattgttaaggaaaaaaaaaaaaaaaaaaaaaaaaaaaaaagcggcccctctagagga

SEQ ID NO: 97713 - DNA, 967 bp, Glycine max
  Clone ID: PAT_MRT3847_59249C.1
gctgtggtcaaagaaactttaaagatataccctgcaggtcctctttcagcacctcgtgaattcatagaggattgcactttaggtggctacaatgtcaaaaaaggaactcgtctaattacaaatctttggaagatccacacagatcttagtgtttggtcaaatccattagagttcaaaccagaaaggtttctaaccacccataaagacattgatgttaggggacatcattttgagctattaccatttggtggtggtagaagagtgtgccctggaatatcctttagccttcaaatggttcatttgactcttgccagtctttgtcattctttttcattcttaaatccatcaaatgaacctattgatatgactgaaacctttggattaaccaatactaaagctactccacttgagattttaattaagccacgattatcttctagttgttatgtatgaaagcatgtgattcttgtcttagcggtttgtggaaaattcattgttaaactatgtgatcttcttttagttaaatcaggtttgcctgataaattatgtcgaaactatgtataattgtctctcatttaattctaccatggattgttaagggaaagtctgatctaaagatttttgttgaggattattcggctataatagaatttgaatgtcaaatggttcatttgattcttgccagtctttttcattctttttcattcttaaatccatcaaatgaacctattgatatgactgaaaccgttggattaggcaagactaaagctactccacttgagattttaattaagccacgattatcttctaattgttatctatgaaagcatgtgattcttgtcttagcggtttgtggaaagtccattgttaaattatgtaatcttcttttagttgaatcaggtttgcctgataaattatgtcgaaactatgaataattgtctctcatttaataatatcatggattgtt

SEQ ID NO: 97714 - DNA, 569 bp, Glycine max
  Clone ID: PAT_MRT3847_5924C.1
attgtattgtacttttactttattttttaacaaaaaagtatacgctaaaaaagtagattaataaataaaaaattattaaaaatattaattaaatcataaaaacaaatataaagttttaattttaaatttgactaatttaattaaatttgaaaaatatttttttttacaaatcaaatttaagctttaattaattaatcattttttattgattaagttatacttatcgtcctgttattttttggacaggtcaagcaggacatgacgtctccaaagtgttttacaactaacttcttagtgtacttgctaagtgtacattgcaaagcctgtggagttgtaggcccacttgaaataattaagattatgcgcggttacaataataataataataataataataataataataataataataataataataataacttttaacttagttgtaggcgtttaattcaacaaactttttttttaaaagaatcttaaaatctcccgtgcattcaatatgttcttgtttaggtataagttttctttggaattttgagggacttaaccagagcatttaaatt

SEQ ID NO: 97715 - DNA, 288 bp, Glycine max
  Clone ID: PAT_MRT3847_59250C.1
ggaaaaggggcaacttttggtccatttgtgttcaaagggccagggttcccccgcagaaacagttgtgctttaaaggaattaagggtgccaatcgtttcccagaacccttgaagaaaaacggcttttttcttaattgaaacgggaatgttttgtttttgaattggaaaaaaattttaggggttagagtgaaaaagaaataaaagggtgagggagaatagaggaggcggcttattgagtttcgatatttctttatcgttttctttgaaggcgaagacggtggccccttct

SEQ ID NO: 97716 - DNA, 966 bp, Glycine max
  Clone ID: PAT_MRT3847_59251C.1
aaaacagattcagttcctaattactcaactcaacagttacagtgatacatcttacaacgtcgtgtatcttccaaaaaaagaagaaaagatggttagaattagaacgccgtgtttgcgaaaaagtgggcgtttcgcggaaggctcgcactcactctcactcgttctgtccctaaaattaaaattcaccctaaatgcactccaaataaatccaaaactcgaatatctccttattctctctcttcccaatctcaatcccagtgagtgctttctttctgtaactaaccccaatcatcaactcattcagcgaatgaatctgtggacggacgagaactcctcggtgatggaggccttcatgccatcctccgatctctcctccatctggccccctcccgctcctccgcagccgcaatccacggcggtcttcaatcaggacaccctccagcaccgcctccaggccttaatcgagggcgcccgagagacctggacctacgccatcttctggcagtcctcttacgactattccggctccactctcctcggttggggcgacggttactacaaaggcgacgacgacaaagccaaggcaaaggccaagtccaaagccacctccgccgccgagcaggaccaccgcaaaaaggttctccgggaacttaactccctcatctccggctcctcctccgcttccgcctccgacgacgtcgacgaggaagtcaccgacaccgagtggttcttcctcgtctccatgacgcagtccttcgtcaacggcggaggactgcccggacaggccttcttcaactcgacccccgtttgggtcaccgggagtgaccgtctctctgcctcgccctgcgagagggcgaggcagggacatatgttcggcttgcaaaccttagtttgcataccgtccgcgaacggcgtcgttgaactgggttccaccgagttaattttccagaactcggatctgatgac

SEQ ID NO: 97717 - DNA, 783 bp, Glycine max
  unsure (1)..(783): unsure at all n locations
  Clone ID: PAT_MRT3847_59252C.1
gcctgcataaaaaatgaagattattcagagaaacggggcaaggggatgaaaagaatattcacttcacaattcacatcaacaaataatcttttggaaacttagttaaggcagctggaggagtacgggctcatatcgttccatgatgataagctgcacttgatcttcttatgattatgaaacttgggttctctaggtatagttggattcttcattgacctcattggaataaaaggtctatcaaaatatggcatgggttgtgcttttggtactagttccttcctcaaccttcttagttcntcttcttctgccaacttctgttgtctctccctttccaatttgtattgctctattaagctcaatttttcttgcacctgatgatcaaactcagcacgatctaatgcccgcacatcactgtgaagtttcaggtcaacaggccttgtgatatctttcaccggaggcttaaccaagcactctggttcatctgttgtccaaggaagaccctgtgcaacaggtatcctttgcttctcttctactgctgccatctcttgtatcttctttacaaattcttcttcttttaacttgcccctttgctcagttcttagcttgaatggcttctggctagtcactttctgctgcttctttttcaaccttcttctcccaaaagtacttgatgattccaggctatttctnctgcttcttcgacccccagtagaagtcctgctagacacacttgcacggctgctatcccacgaagccgaaactgatgccccaggatccaagccg

SEQ ID NO: 97718 - DNA, 235 bp, Glycine max
  Clone ID: PAT_MRT3847_59253C.1
cccaacaatttaaaacaacaccatctgacaataaagaagttcatttttaacacattcataacaaaccttggtggaattttagagtcctattattaatgcgacacaatttatttcaacacaaacccaacttattttcaaggtacattattacacacccacttaaacataaaaattcttcaaatgttttgggaccccatccaacattacacaacacgcttaaaaccccccacgatta

SEQ ID NO: 97719 - DNA, 186 bp, Glycine max
  Clone ID: PAT_MRT3847_59254C.1
gacacattcctaaagagttgggtgccttgactgatactaatgtcgcgggtgaaaatagcgcacaagatatgtcatcatcagacagcggaccttcagtagatagaaatcgacattacgaactgacggacttgagcatatgcatctagcctgaagtgagacactgtatctactttaacttgccatgtg

SEQ ID NO: 97720 - DNA, 140 bp, Glycine max
  Clone ID: PAT_MRT3847_59255C.1
ccactcgacccactcgtcctcccacgcatccgcttacctattctccaaaattactacatcaacacatttcaacccgaaatccgcgactatcatgttaccattaatctacctacattcattttcttctactaaccttctta

SEQ ID NO: 97721 - DNA, 167 bp, Glycine max
  unsure (1)..(167): unsure at all n locations
  Clone ID: PAT_MRT3847_59256C.1
gngtcgcctgcncgcgtacgtncgcncggcgttcggctcgagntangcgggngttcancnccttnnccggtctcatgcataccaacngggacagttactactcgcnntnccctccaccaatatcnactcnnttaggcntcatttnatttnccntgccnatccanatg

SEQ ID NO: 97722 - DNA, 299 bp, Glycine max
  unsure (1)..(299): unsure at all n locations
  Clone ID: PAT_MRT3847_59257C.1
tgcangcacgcgtacgtnagctcggaattcggctcgaggtgccttctnatgaccttggaatggcccctgattcctccatgagcatgcantttggcccagatatggtgccccaggtgtacccaccacactctcactccatcnccccgtatcaaggcctctccccagaagaatcagtcaacgtgttgtcagccttccaggagcctcacctgtcagatgccccccagcctgggccagatgagcctgccctttgaccngcctcacccccaggacctgctgnngnnncagcctcaggagcangc

SEQ ID NO: 97723 - DNA, 126 bp, Glycine max
  Clone ID: PAT_MRT3847_59258C.1
gaaaacacagaatcgcgtttgtaactgaggaatgagtttcttgcagggaataattgattccttgaactccatcgtcacacatgataccaacaacaattatcacagcaccaatgcttcttcttcttc

SEQ ID NO: 97724 - DNA, 632 bp, Glycine max
  Clone ID: PAT_MRT3847_59259C.1
tctttcaccccagcctactgctcatgttaaatgttagttccgcgttccatcgtatgatatttagtgtgtcacaatgtgtcttgtacaaaaatctattgctagcctattgtctgcgtttgattccatgctggtctttatatatggtgtagaaattcgctcctttagctgattcaagatttggtatacgactgtagcaacacattttctattttataacacactttgcatcgtaactttgactagtaaagaattgttagaggttgtgttgctatataacaggagggaagccatcattgtcttgaattgaatcttgagtatcttattagtcctgtttttgttaaacaaaaaaagttgttgctttctttcagcacaggttttctcttcaaaaggttttggcctatataatttagaaaataagaactgagtgctactgtccaagaaagacatcccattcgtccttcacgttgaagcagtaccacttaattgattaacaatgtaagcgaaccaaacagacaccaagggttaattagcccgccgaaactcaagaatgattatttgcaatgcatgtttccacctagaatcccgtcttttctttcaagaaatgctgtttcttccttttgatcatatgcatg

SEQ ID NO: 97725 - DNA, 305 bp, Glycine max
  Clone ID: PAT_MRT3847_5925C.1
gatacgtgctggttcaagtggaccaacaagaattgtacgttattattcaatggccagcgctcacctctcagcattatctccaaccatctctacggcgtcgattgaagggctacgaccttcggctgttcagattgcttacacgggcagaattagaatcgccaatctgtcccaaaggtctatccagagcttggttgtcaaagcctccaccgctgttgcccccaaatacaccaaacactaagcctctgggaaacatactgctgataaaaattaaggaacctatggagaaaactcaaggtggaattttg

SEQ ID NO: 97726 - DNA, 304 bp, Glycine max
  Clone ID: PAT_MRT3847_59260C.1
acggctgcgagaagacgacagaagggccacaaacatacatcacatccacgtacgaaacatgggcgccatcaagtacatgaccacggatgaattaaagctcctaagcatcccgtcagaaatacttaaattctttaaccactctattttcccacataagggacatccgacaaggtcactgcaccccccccatgaacatacacaacatgcacatctcaatgcatttccaacatcatcaacattccatttcaatgtcattctcaacataaacatcatcttatttccatgacatcaccaataaccataa

SEQ ID NO: 97727 - DNA, 757 bp, Glycine max
  Clone ID: PAT_MRT3847_59261C.1
gttccagagagcccagtctctactcagcaccgaccgggaggcctccatcgacatcctccactccatcgtgaaacgtgacattcaagaaaatgatgaggaggcagtccaggtcaaagagcagagcatccttgaactgggttctctcctggcgaagactggacaagctgctgagcttggaggactcctgaagtatgtacggcctttcttgaattccatcagtaaagctaaagcagctcgtctggtccggtctcttcttgatctgtttctagatatggaagcagccacagggcaggaggtcgagctatgtttagagtgcatcgaatgggccaaatcagagaaaagaactttcttacgccaagcattggaggcaaggctggtgtctttgtattttgataccaagaggtaccaggaagcattgcatttgggttctcagctgcttcgggagttgaaaaagatggatgataaagcccttttggtggaagtacagcttttagaaagcaaaacttaccatgctctgagtaatctgccgaaagcccgagctgccttaacctctgctcgaaccacagcaaatgccatctactgcccccctaaattgcaggccaccctggacatgcagtcaggcattattcatgcagcagaggagaaggactgggaaactgcatactcatacttctatgaggcattcgaaagctacgactccattgatagccccaggccatcacatctctggagtacatgtggctgggcaaatcatgct

SEQ ID NO: 97728 - DNA, 351 bp, Glycine max
  Clone ID: PAT_MRT3847_59262C.1
cctcgttgcgggaagacgacagaagggggggggagacccttaaagcataagggcggcgcgtacaactctgcgcaccaaacagaaccctagtatgatcatcccaattcccgtgatcgcgttcgccaaagcagagcgggggagaaaacgaaaacgaaaacgcgcttggtacgaccgcgtgcgggcgacgcaatgaacaaccaataggcgtggtttccgccgctgcatgactaaccggaactattcacctatctggagccattcgtgtcccggatttctccgagctcgaatttcctgaaatcgatggcgaacaattccataagcttcgcgctcgaggaggcgcatggacacatg

SEQ ID NO: 97729 - DNA, 265 bp, Glycine max
  Clone ID: PAT_MRT3847_59263C.1
tcaaacagatgctggaactcttggagacctaattatacttgcaccctttccaccaagacctccagaagatcctaacataattccatttacaagacctgcagacatagttccattttcaccttgtgatcgttactccaaattagataaccatcaaacagatgctggaactcttggaagagtaattccacttccaccgactcgaccagggaccgggattacaaaagtaccgtttccaggaactaacatagccccatttccaaaacct

SEQ ID NO: 97730 - DNA, 201 bp, Glycine max
  Clone ID: PAT_MRT3847_59264C.1
agcgctcgaattcaagcgcttgaattcaagccttgtattatcctcctagcatgtctcctagatctctctaaataattacttgcatacatatatgcgtgcgtgcgtgcgcaagagagaaaaataaataatatataaaaataaaaataaaaactaattggcatccagtgcagctcttcccctttgtcttttgtcatgtgaaaa

SEQ ID NO: 97731 - DNA, 396 bp, Glycine max
  Clone ID: PAT_MRT3847_59265C.1
gcgagaatacgacaaaacgggaataatacaacagaaaataatatactacagaggtttgtggtataattaaaaaattagttgatattttcagagataggagacaaaatttacatggatggtaagtactgcttgggctgctttaatggtagttgtgccattttctatttccatcgtaacatgggtaagaaatgtactatacggatactcaaaattgacttaacggatcaaagtacccattctgatatctacttgggtcattcaatatcttaactctaactattgtattaaaatatttcatttatactaattaattgagtccaaatatacactattataatatacatctgcattttaggttgctattatattctagtagtgtaataataacctatgtat

SEQ ID NO: 97732 - DNA, 1309 bp, Glycine max
  Clone ID: PAT_MRT3847_59266C.1
gggaaaatggggacttgtgggattgtcttgttgaccacagcttaagaaccacaacctcagcctgtgtcagttgatggaaaatggggacttgtgggattgtcttgttgaccacagcttcccctaagccatggccacttcggacatcctcacgacgcactcttccccgcattcgctgctgctctgcttcttctacttcagagctttccccagataagcttccaactagtattgatttgtctgtaactggtggtgcctatgatttctcaaaagcaacaacatcactaacaaatgagttaatctcttcaccaaagaaagtgactcttttaaggcacggtcttagcacttggaattcagaaagtaggattcagggaagctcagatttgtctgtattaactgaagttggggaagagcaagcaaaaaggtgcaaaaaagccttggaaaatatatactttgaccagtgttttgcaagtccaatatctcgtgccaagcaaacggctgaaattatatggcaatggagggaaaatccattggtttatcttgattcgcttaaagagatatctctctatcaccttgaaggcatgaaaaatgtggatgctatgcaaatatatcccaaagagtatacaatctggagagaagatccagccaattttctcatgaatggtagatatccggtacgagatctctggaaagctgcaaaagattgttggaaggagatgttgttgtcacctggagaaagctttctggttgtgactcacaaatccatattgagggcattaacttgcactgctttaggcctgggcccagagaggtttcgttctattgatattaacaatggtgggatatgtgtgttcaacttcaatgtcagaggagaagcaatgcttgaggctttaaatatgacggctcatatgtacagtgatcatgtctatcctggctagtgcaaagttacatcgaggaagacaacaattgttgtttttatagttgattgaaatataccatggaacagcaccagtgaagatttgatgtggaattttcgttttaattatatgaacttccgaatctttggcaagtggggggggggtccaactatttagcaggttcgtccaatgcttttatagcagggggatttgacatagccctctctccctttgatatagatatttagaaacggagaaattaaagtactactataatttatgcaaattagttacgggatttgtactgagtttgttcaatcttgtcattttttaataaataaatattgtttgatgccgtgtcgtgagcccaaaataaaacaaaaaaaaatcccccc

SEQ ID NO: 97733 - DNA, 488 bp, Glycine max
  Clone ID: PAT_MRT3847_59267C.1
acaaacaagcttatctttctctgatttttttccattaaaccaagcgaaatttaacagagtggggtacacagaaaaaaaaggctgaaaccaccaaaatagaagttttctattccctagatatagccctaaaatatactactatctccttgcttccattacaactctcacggtgggatttgagctaggagattaattacaaggagacactccccccctgtcactaacttcatttaaaaattctaccattgctaaaagatgcctctgatattcccctataaatataacggaacggtagttacctccactctgcatttaggctttatttttaatcttaatgacccgattccttgggaacttcctaaccatgctccatagcccaagcaaaaagccttaaactaccgtaataggaggagccattaggatcccaaatgtaaccctggcgcttactatgtcaggatgaacggtgtattccttagcaaacacaaaag

SEQ ID NO: 97734 - DNA, 146 bp, Glycine max
  Clone ID: PAT_MRT3847_59268C.1
gcaccaaacaccaagttctaggtgccgggacagcggtaatttgatgacaacgtgctcttaaaacgtggtgtgcgacatatcgctccttgacattacacctcaccaaacaatgtcgatatctcgcaagatttgttgtccctaaacaa

SEQ ID NO: 97735 - DNA, 483 bp, Glycine max
  Clone ID: PAT_MRT3847_59269C.1
ccttaacaaaacaaaaaatatcctttttaacctaaacttttacccctttaaaaaaaagggcccatagcagggccccaaatccaaaaatagggtcttaaatccttatttaaagccatttgttttcgcatataggctgggaacaggtgtaagtaaccagggcctatgacaacaaacattttacccgggagcattaccatagggttgggcccataacgggctgaaccaaaaggagggggggcccccacaccctaatttgttagggaaaaaaactctttgatgcgttattaaccctggggcaaaacctaattatgaagttggaaaccattttggcatttttttggttaactgttaacaaaatacctaattccttacctttaaagggggatagtatgcaacccttctgtgtcctttttgagggggtggctaacataaaatgcctaatattcctcttggcttttaagctttgcaactaatccttgaccc

SEQ ID NO: 97736 - DNA, 476 bp, Glycine max
  Clone ID: PAT_MRT3847_5926C.1
tttatgactagattaagttagtagtttgtccattattgatccaacacatgcctttttttttcaactatgacccccagaatttttggcctttcaataaacattcggggaacactgggttccttccaaagtgaaaaaggggtggatagccccttcctaaaaggggcttaaacacccttcaaaaaaaaaaccccctccgatttggttaaaaccaacctcttaccagtgctgcccttaaaattgagcgggggcccattcaagggggggaatgaaataggagggagcccgggcttctggtaaaggtgtagtccaagataaaaaagtccgggggttctgataaaaaaagggctgggtctcgaaggggtgaagcccgaatagacaaaagctatctaacacaagctcaaaacaaggtgctggggaagttttttttttttggctcggaagacactcctatggaagatgtccgacacagaggcccc

SEQ ID NO: 97737 - DNA, 330 bp, Glycine max
  Clone ID: PAT_MRT3847_59270C.1
gcatatatctatcttttaataacagttgttcaaaggacaaatcaaacaacaagggtacaaaaactaatgccaaataccaaaacttaaagactaacctgaagagtccttgctgcagatcttttacatgattgatttctaacttcccaataacccttgtgctcactgtaaaccatgtgctttaaatcgcccggctggcaacgaaatgccttaaatttctcacggtgacaagtgatccctgaacgaatggcccgaggccattcacgccagatggaaggttccagggggccgaagtcccagtgtcctaactcctgcttgcgaattcctagctct

SEQ ID NO: 97738 - DNA, 604 bp, Glycine max
  Clone ID: PAT_MRT3847_59271C.1
ggctcgagatcggaagaaggattagggtttgtggagatgcaagggcaaggcgttgatgaagtgagcatagaagagttggcgtcgaatctttccctctacaaagatcaactgaaccaggttagagaactcttaaacgatgaccctgcaaattctgaatatgttgacatggagagggaactttccgaggtcattgccttgaccgaggaactccttgcaactgcaaagcagaatgaaatctctgctcctcctaataatgctgctgcatctccaaccttgtccatacataacgagaatcaattgctagatagtagttctgatcatcaagagaaacttgctgttggcaccaaagttcaggcagtttggagtgaagatggggagtggtatgatgcgacaattgaggcttatactccaaatggttattatgtaagctatgacaattggggtaataaagaagaggttgatcctgccaatgtaaggtcaattcaagaaggttctgttgatgctttattagaagctgagcgagttgctgaagcaacaaaacaggccatcaaacgaaaaattgcacaagctgcatctatcgatttacagtctcggagtctaccta

SEQ ID NO: 97739 - DNA, 144 bp, Glycine max
  Clone ID: PAT_MRT3847_59272C.1
gccatgtttgactctcttactggagctatcaagactttccgagaggggttccgcgcctttttgatcacgcagaatacataccgattggccgccgcgcgcaagttgaaatctctccattaaagaacatggcaaccctcacaagag

SEQ ID NO: 97740 - DNA, 1832 bp, Glycine max
  Clone ID: PAT_MRT3847_59273C.1
catctcgacaccaggaaccaatgaattattaccgagagatgaaattcagttttgaattttcataaaatactgcacctaagtatcgtctttcgaataactaatttaaagctaagaccaacaaaccaacaaatatgagcatctagttaatataacatcaaaatgaaaaggcagcaaaattgcatcatgataaaatagtgaaagaaaaaaaaatatatatatgtggggcgaaagctacaatctagaacagttctgaagtctcgacacatttcagtagataacattgtttggtttgccatcagtgaacctctacagagaatggttgtttgagcatgttacatacaattgaaagggcatctagccgagtcggtgcataacctaatcatcattttcaacagtaccatctttgaggtgaaaatgtttttctctcttctggaactctgtcaaacctttcccacttcccgtcacaccaacctttccctgaggatcatcaggagatttaaaaatactctcccgttttcttccagagaagaaaccaatcttctttgcctttcctttggttgactgaaactgctgccaagcattttgccgcttattttgtgtgacttcaagttgctccatccgcatctttgacttaaaagcatgtattttcttgcgttttgaagctttcacatcctcaggatcatcagcctctatacgaagctttgcaggtagactccgagactgtaaatcgatagatgcagcttgtgcaatttttcgtttgatggcctgttttgttgcttcagcaactcgctcagcttctaataaagcatcaacagaaccttcttgaattgaccttacattggcaggatcaacctcttctttattaccccaattgtcatagcttacataataaccatttggagtataagcctcaattgtcgcatcataccactccccatcttcactccaaactgcctgaactttggtgccaacaggaagtttctcttgatgatcagaactactatctagcaattgattctcgttatgtatggacaaggttggagatgcagcagcattattaggaggagcagagatttcattctgctttgcagttgcaaggagttcctcggtcaaggcaatgacctgtgtaacacaattttagggcacatatttggagttcagtaaagcaagtagtattgtgtttgacgtggatagatcaaaataatgataaaaatctaacttagaatctctgaggagaaagcatgctggacatcaggagacagagcagacctgcacaagaaccaagatagacgtgatgtgcatttggacctaacactcactttttaatgctcctcctgaggttgagcaatttgaatgatattacaaattgccgcagtaatactagtagtagtaccctcaccttttcgaagaaactagtttgattagtagtaatatatagaatgacatcctccgatggaatgggagggatctatctgcttactcgatgatgaatgaatgatagagaacaaggcggaaacaaaacatcaaaactggggttgaattgagcttacctcggaaagttccctctccatgtcaacatattcagaatttgcagggtcatcgtttaagagttctctaacctggttcagttgatctttgtagagggaaagattcgacgccaactcttctatgctcacttcatcaacgccttgcccttgcatctccacaaaccctaatccttcttccgatttcgatattctgactcgtcaatgttcacttcaccaaccccttgcccttgcatctccacaaaccctaattctcctttcttcttccgattccaattctgattcttc

SEQ ID NO: 97741 - DNA, 751 bp, Glycine max
  Clone ID: PAT_MRT3847_59274C.1
cccacgcgtccgcacaattggaatcggaataagaaaggagaattagggtttgtggagatggaaggggaaagcgttgatgaagtgaacattgaagagttggcctcgaatctttccctctacaaagatcaactgaaccaggttaggcaactcttgaacgatgacccttcaaattctgaatatgctgacatggagagggaactttccgaggtctgctctgtctcctgatgtccagcatgctttctcctcatatgagatgttcacactgagattctaagtcattgctttgactgaagaactccttgcaactgcaaagcagaatgaaatccctgctcctcctaacgctgctgctgcctctccaaccttgtccatacataatgacaatcaagtgctggatagcagctctgatcatcaagagaaacttcctgttggcaccaaagttcaggcagtttggagtgaagatggggagtggtatgatgcaacagttgaggcttatacaccaaatggttattatgtaagctatgacaattggggtaataaagaagaggttgatcctgccaatataaggtcaattcaagaaggttctgttgatgctttattagaagctgagcgagttgctgaagcaacaaaacaggccatcaaacgaaaaattgtgcaagctgcatctatcgatttacagtctcggagtctacctgcaaagcttcgtatagaggctgatgatcctgaggatgtgaaagcttccgaacgcaagaaa

SEQ ID NO: 97742 - DNA, 420 bp, Glycine max
  Clone ID: PAT_MRT3847_59275C.1
acgcgtccgtcgtcccatacactaagtatacggatatagcataaacactttgcttccttcataagcaggtggaccaagtatgcactataaaaatgaacggcgaggaccaacaaaaacaatatgaacaccatctattacacctcaacgcgactaaaatatatcgatgggcacatgtgagtatttgaaactaaagaacacatggtaacggtcctcaacaccaatatcactgggcacaacataagactcagaaagggcgaacgcaaccacaaaaaaattatgagacagctcataaactaaatattcgttgacaacttgtcacagcaattcttggtccggcggtaggtcaaactactgatatacactgacacaacggaggcccacagtctacaagcatatccactctaacagataagaacgacc

SEQ ID NO: 97743 - DNA, 312 bp, Glycine max
  unsure (1)..(312): unsure at all n locations
  Clone ID: PAT_MRT3847_59276C.1
gtcgcangcacgcgtacgtaagctcggaattcggctcgagcnaatcannnntntncgnncanatcnnnggnnatnnnctnngtnnnncatncagtnnnnctanttggatngngtccaactgtngannnggnngantnntngcnncnnncnnatcannggnncagngactngnnttngatngttnnnntcngnatccgatgngggacacacnagtgnnggattggagagagatgtaactgntgganaccnccaccangaaacctgcgtcngacncgngantgnnatgngtnntgangntgctgtttcattctg

SEQ ID NO: 97744 - DNA, 184 bp, Glycine max
  Clone ID: PAT_MRT3847_59277C.1
tctcgagcgaatcggctcgaggcgagaagacgacagacgaggatagcatagctgcttaaaaaaggaaacactgctttttaacttttttttgcttccgtcttataggccacacagttgctttgcttctgctctctgatcatatattaatgccattgttactatgactttgagcttcgagaactgt

SEQ ID NO: 97745 - DNA, 1142 bp, Glycine max
  Clone ID: PAT_MRT3847_59278C.1
ccacgcgtccggcctctgttttgtttttaaaaaattgaaatccccactctgtctcctccattctcgtcttcttctcccatctccattggctgaattccattcttttgaatccaaagccacagtcaccagatcaaaatccccaaaacacatcatcgactgaatcgaacaaatgagagagaaagagaaccatccttcgacaaactccgaggacgaccaccgatcctccttactggatctggcgcgtgccgaaatcacggaatcctctaactccaagacccgaacctgcggttcgggtcttggttcgggttccggcacctctgagcctcaggctcccttcccggaccaggtcctcgagaacgtgctcgagaacgttctccacttcctctcgtcgcggcgcgaccgcaacgccgcctcattggtgtgccgctcctggtaccgcgccgaggccctcacccgatccgagctcttcatcggcaactgctacgcgctctcccccactcgcgccaccgcccgcttcacgcgcgccaggtccgtcaccgtcaagggcaagccccgcttcgccgacttcgatcttatgcccgccgactggggggcccacttctgcccctgggcctccgctttggcccaggcctacccctggctcgagaagctccacctcaagcgcatgctgctcaccgacgccgacctcgccctaatcgccgactccttcgccgccttccgcgaactcgtcctcgtctgctgcgagggcttcggcactcccggcctcgccgtcgtcgtctccaagtgcagattgctgagggtgcttgagcttgtggaatctgaggttgaggacgatgaggaggtggattggatttcgtgttttcccgagagccaaaccaatctggagtctcttgtgtttgactgtgttgatgttcctatcaatttcgaggctttggagggtttagtggctaggtcgcctcgcttgaagaagcttcgtttgaaccgatatgtttccatggctgagctctatcgtttgttgcttcgagctccgcagcttactcaccttggaacgggttcattcagtgctactgaggctggggcggtcggggatcaggagccggattatcaggagccggattacgcggccgccgactaatgagctc

SEQ ID NO: 97746 - DNA, 1336 bp, Glycine max
  unsure (1)..(1336): unsure at all n locations
  Clone ID: PAT_MRT3847_59279C.1
catgcttgtggaaacaacatttgtcctattggagaagtccttcatacaacttgatgcgcatcatttttgtggctgtctcatctcttctgtttgggatactgttctggaagcaaggaaagaaaataaatagccaacaagatgtgttcaatgtatttggtgcaatgtactctgctgcactattctttgggataaataactgctcaacagttttaccatatgtggcaacagagcgcactgttctgtaccgtgaaagatttgctggaatgtactctccctgggcctattcttttgcacaggtgctcgtggaggttccctatatattcattcaagctgttgtatatgtgataatcacatatcctatgttgagctatgattggtctgcttataaaatattttggtcattcttcagcatgttctgcaatatcttatattataactacctagggatgctcattgtctcattgacgccaaatgttcaattggctgctatcgtggcttcatcttcctacacgatgcttaacttattttctgggtactttgtaccacgactacgaattcccaaggggtggaatttgatgtattatttatgccccatgacctcggcactgcatgggatgcttcttgcccgctacggacttggactcattgttatgtcagcctttgttgtatagatgccttctgccttatctttggaggagtgttacggtatagttaatataactcatcatcaaatatacatacaggcagtgttggtcgctatggtaattgtcataagacaatggcggtaagggccagagttttgannnngatagacaaaaattaatatcaaatattcaatttttgaaattttcttagggtggagaagaacaattggattgattataggtcaataactgtttagcacctaagcctaagtatcacatcactactttttttcttgttgatatggtaccataaaacctgtactaattatgatcgtttgcattttttttattcctttcttatattgcttgaacctaacactgaaggatgatggttttctcattgcagcgaattcccaagtggtggatttggatgtattatttatgccccatgtcttgggcactgaatgggatgcttacttcccaatacggagatgtaaacaaagaaatttcagcctttgaagaaaagaaaacaattgccaaatttttggaggattattatgggtttcaccatgattttcttggtgtagttggtgttgttctcattgtcatccccattgtaattgccattctatttgcttattgcattggaaacctcaatttccagaagaggtaaaatgatgtaacttgcaaag

SEQ ID NO: 97747 - DNA, 467 bp, Glycine max
  Clone ID: PAT_MRT3847_5927C.1
gggatcacttagtaattctagtctcttagtagggcgcgacacattttctcagttttttcaactgaatataagttgcaatttggaaatctttgaataatcaaagaaggtatcaactgtgaacatggttgattggctcactaagtcagcttatgttaaggaactataaagttatttaacggtgccacttctacaagtgtacaagtgttattcacatctacaagtgtacaagtgttattcacaatgtccttgttgtgttgtatgtttcttcaggttctgtgggtaatgttgggtcttgaaccctttgcttggaaaaaaagaaggaaaaaagatcaaattaacatggtattacatagtaggggacaaggaggaaaaatagtattttctacatcttttgtcacagaaatcactcacatgctgctactgtctacttcttgcgactaagcgatatcaactttcacactcacatg

SEQ ID NO: 97748 - DNA, 292 bp, Glycine max
  Clone ID: PAT_MRT3847_59280C.1
gctattgccgccaggtaagcatatagacattacattggctctttctgagcgacaaggatggttcagcatgggaaagtcttacccacacggaagcgcttattaccagaacgccgtagagaaggcgaataagaggctcagacgcgacatagctgagaagagatgcatcacctctaatgctccgttggacatggcactctatttgatcctacgacttgaactcgaacaccagagggcccttctgatcattaaagcacccctgatagctcgctctctgagctaacagccttcttga

SEQ ID NO: 97749 - DNA, 696 bp, Glycine max
  unsure (1)..(696): unsure at all n locations
  Clone ID: PAT_MRT3847_59281C.1
ccacgcgtccggcgtttatttgaaaagagtgggaatgtaatcttgagcataactgttttgctcctttcaattttctgtttatttcattcattccgctgctgaggtcaagccactcacactgggcgcccacttttccatgggaaactgcttctccgaagtcgccgcaggccgcgccgccatcggcggcaccgcccgcgatttccataatcttgccggcgctccaaacgacgccgtcgataacttcctcaggtcccacggccaccacggcctcttctctcagatcgagttatcgttttccgcttctggcttgcgtgatcgtgatctgctcttcaagagtaatccaatgatggttctttatgcaagaggaaaaaatggagcacttgaggagcttcgccgcactgaagtagttctgaattcatcaagccccacatggattactaaacacaccctcatttatcattttgaggttgttcaggctttagtgtttcgtgtgtatgatgttgatactcagtttcacaatgtagatataaagatgcttgagctagatgagcagncatttcttggcgagggcacctgtgtactatnctcagatatcacacaacctganntaatcattgactatagatctacacacagaagattctatccggatctacccttttccaaaaacagtgggaaacttcatgggtgcattct

SEQ ID NO: 97750 - DNA, 327 bp, Glycine max
  Clone ID: PAT_MRT3847_59282C.1
gggaaaacacccgacataaatttaatcaacggggctggggaccatataaaagggctttccgggtggaaataacacaccaccgttttttttaaacccgggttttttttttttgaaaggacccccaaaataaaggcaaggggggaattccccccattccggggaaacaacaatgaactaggaaaattttggaactgaactttgggaacaaattcaaaaatttggatttggattaccccaacaaaggggcagatcctcaggggggggctctagggttggcaacaggcctccctttttttccaccaaaagcacaggggccaaaccccatcc

SEQ ID NO: 97751 - DNA, 475 bp, Glycine max
  Clone ID: PAT_MRT3847_59283C.1
aattcggcgcgagcaactgttactgttcttccgtggccaaccatggcggccaccagccctacccccgctccggccactttccctggacagtgccctcgcaggagtactcacacccgctcccgcccacaccctccgtcccccagtcccttcccagcctggcggtcagagactggcttgacgcctcccagcagcccggccaccaggatttctacagggtgtatgggcagccgtccaccaaacactacgtgacgagctaacgccacgcaggcggcggggcgctggggaatcttcctccccagcccccgggctcgggagttatgcatccagagacctgcccttctaccttcctcgcctcccctcttcctcattccattgccccaggtcttttccttttggattttgttttggttttggctttggtttttgatttttttttattatgaatctcctggacgcagaggtgacagtgggagct

SEQ ID NO: 97752 - DNA, 194 bp, Glycine max
  Clone ID: PAT_MRT3847_59284C.1
ctttacttatcatcatcagtgttccacatttcagattgaacaacgtaaatatcgggacttagatacctcaccctaaatataaatccaccgaaaatccattcaaaaaaaaaacacaactcacatcttacatttactaccaaacccaataaacccataataaattccattcctatacctaaaatccttccaactcc

SEQ ID NO: 97753 - DNA, 599 bp, Glycine max
  Clone ID: PAT_MRT3847_59285C.1
gaacgggatggtcaccggcgacgggcacaatcggcgaggaacgtgccctatttcggcccaagctctacttcactgctctaaggcagggagaaagaggaagactttcttcgccatgtaagggcatgtaagacttgctcagcgaccctgagagagagcccctgtcatccgctgaagcttacttttggtgagacctggggcgtggttgtcctgatatgggccaagactgatatgactgtttagggagaagaaaagtctcactaagagacctcgagggtagacggctatgggaagcatggaaagcgattctgaatgatgatgatgatgatgatgatggaccactgacacatctaagttctctcttacttatcccaaaatgctttccaatatctccaatgagtgcttgatcactaatcagcgccgacgccaatgccaacaccaatgccattaccaggaagaagttcgaagaggatttggctttgaagcactactggagttgtatgtggagaggttctaggatcttgaccagagattgcagacggttgcactcgcgagcataaggcaatgcatttgaactttcacgagctctatgacttcgatca

SEQ ID NO: 97754 - DNA, 252 bp, Glycine max
  Clone ID: PAT_MRT3847_59286C.1
tagagtcagtggtttatcgctgttcaaatgctccttcatgattgctctccagcatcatcatcatcaccgttaagttcgaaaggggtcatcaagtgtcatcgccatcggaaggcctcatgacgctactcagccccgcactttgagcgcggggtttgctcagttcatctccaggttgatcttcgtgttcgcccgttcacgttccggcaatcccctacagcgtgctcacggacactggccgccgtcactcccgcc

SEQ ID NO: 97755 - DNA, 520 bp, Glycine max
  Clone ID: PAT_MRT3847_59287C.1
ccacgcgtccgcattttattcgtccgccgtcgcccctgctaacgcccccactactaaccctaggatcatactgtcttttggcgtttcttctccggctctttttcgtttgcctgtcggttacaaggtggaacgtcttcagaagcttctccactagattagtgtaaatagtagacttgttcaggtttagtttggttggaagaattagtttctggttcgtgttcatttctgctagcaataatggctgcgatgaacggaaaggtattgggtaaatgtggaaggaacatgaatagtctcaagagaaagcgggagaaccccgctgcatatgatgctgacatattccacaactctgaattgcatcagcaccctgtcaatgattctgctgctaggtttcatgttgataaagaccgcaaggcaaagatcgtgtgccacttcaacaagcaggttttgcagagctataagaactttatgagtagcgcaccacctaaacgtattttgcttgcataggtgcttgctggaagac

SEQ ID NO: 97756 - DNA, 1361 bp, Glycine max
  Clone ID: PAT_MRT3847_59288C.1
acgagtcgttgtgtacgcatcaacattgatttttaattttcccacctccgacaaatgtttaattatgtaaaatgtaaaagagtttatttttaaaataagaagatttttttattgaagttttattaatagtaaaataggtattgagagaatataattagttaagtttaatggaactagttgatattgtaagtctaagataaaaaaaaggtgcagtgaagtggcggctgtggacattccctagggattttgattggggatggcttcgagcatccaacaagtggaaggggacgagtcagttgtgctgcgcgtgactcattccaatctcaaaaccttcgcctccgacatccgcttctcgcttcacctcaccgtcgaagccgtcaaagacaagctctggaaaaaatgcggcacctctgtcaactcaatgcacctccaactctacgacgacgctcgcaacaaaattgccgatctctctgatcattccaaaccccttgccttctattcccctcttgatgggtttcgtttgcatgttgtggatctggatccatcttccgtcacatctggtggttggctcgaagatacttcgctggtcgaaaaatacactatttctgaagaagcctataataagcgaccagacactttcagaaaatataaggagaaatttacatcccagaatactgcaactgcggaggcaaagataccagatgactgtatgggagatctctctgctgatatcaaggtaggatccagatgtgaggttgaacctggggcaaaaaggggtgttgtaaaatttgttggccgggcagaatcactgggtcctggtttctgggttggtgtccaatatgacgaacccttgggcaaacatgatggcatggtcaaaggagtacgctacttcgaatgccctccatctcatggtggaatggttagaccagagaaagtgaaggtcggtgactaccctgaacgagacccctttgaagaagatgaaatatgagtcttcgtgaggaagttgctttcaacgtggagggtttcccttatgtaaatcaaacatctgtttggaaaacttacatttgttgacatttcaaggcagtggatttgtcgaagggtttgattgtggcttttgaattgtttgtgttgtctttagaaaagaaaagcttgtgcaatgtgataaacataaattggaagctcattacaatggtaaaacgagaactaactgggtgggattctactttggagaacattaagatttgtttttagtagagacaccaaaaggaattatatcattttcaaagtgcatataatttggtaaatgccaatacactagcttagacttggttactctgtgaatccttctctatttatggtct

SEQ ID NO: 97757 - DNA, 257 bp, Glycine max
  Clone ID: PAT_MRT3847_59289C.1
gtctagacagcctctggatggaatgatacaaatgggacactatcatataatgtcaattcatcaagctccgatgcatatgcagggcaattcggtgaagagatattgcgaaattcatcactattattgctttcataggtctaggacgagaatataaagttacacggaggctcagctcggtactgagttatcggagacattacagtagaacctcaatgcagagttccagagcctagctatgatattgatgaccacagcat

SEQ ID NO: 97758 - DNA, 389 bp, Glycine max
  Clone ID: PAT_MRT3847_5928C.1
aaagaaaaaacttccttaaaagggaaggccatgttttgaattttgcacccaaagcttcggaaaacaaagggaatttttttccctttggaattccaagttccttgcagggcatacttaagggaaaacggggaagttgttgaatggggatggattgcccacagccttttttagccaaaccaaaggcttaatttaaccccaaacccgtgtccagaaaaaaacccatttttaaagaaacccgaaattaaaaaaacttaccatttgggaagaggggccccattccactccccaggggtttccaaaaggggatcaaggatcttccttgggcacaaagcagggaacacttgtgaacactttttacccggggggaaaaccttttaaccagttagcaa

SEQ ID NO: 97759 - DNA, 1093 bp, Glycine max
  Clone ID: PAT_MRT3847_59290C.1
ggcctcattctttgattccctgagatttctgcaatctacaaaaattcactatgggagtcacaacctttacacaggaatactcctcctctgttgccccatcacgcatgttcgatttctgcattctacacaactgaaaattgcttccacagctcttacctcagtatacaaatgctctgatggtccatcacgcaggtggtgaggcttgattgaataaaccagaaattttgcatgcaaagcgctcacccaaatatgtaaaagatgtgaatgtaatgcatggtgatggtaaatctgtaagcatatgaacaagttaacttcaatgaagataaccccttcaaatatctgatacacaggatagatgtgcttgttaaggacaacttggtttgcaaatacactatgattgaaggggatactattgggtgacaagcttgagtctataggttatgaggtgaagtttgaggctactagtgatggaggttgcctctgcaaaatgacaagcaattacaataccattggagagtttgatgttaaagaggaagaggtaaaggaaggaagggaaagtggtattgcagtttacagagttgtggagtcatacctgctagagaacccacaagtgtatgcttaatcatctatttatttattgtgtcatgtatcataagatatacaaacatattcaaatttttaataacagtgtgcaaccaaatatagggttgtttagaatggttgcaaagacttgaattccttaataagtccttattgtatgaacagccaaaaaatggctagtggtttgccaaaaatatttgtattttggtagtaaaaaagagttgaagagtgttttgttttacctttacatggattccaatgtacttaaacaaagaagcaacaattcatttctattgagtaaagtgtgtttggatggttgtaaacagaaaaaaaaaaacaagaaaaatttattttataaaaccaagactttgagtcacaataatacgagccaataatactctaatgatattaacatgttggacgtacatgaggtatgttccaagagtttccatttataaatgaggtaaggtcatgattaatataattttcttct

SEQ ID NO: 97760 - DNA, 171 bp, Glycine max
  Clone ID: PAT_MRT3847_59291C.1
tttttgcttaaaaggtgtatgtacttaattctttgggttccgtgtgaatatgtaacaaagacacatttttggagaagttatgcacctacgcctatgagaggtttaatgaaaagaaagctgagtcatgactgttgctactttaaatgccattaatagggtatggtgtgtatg

SEQ ID NO: 97761 - DNA, 511 bp, Glycine max
  Clone ID: PAT_MRT3847_59292C.1
ctttgattccctgagatttctgcaatctacaaaaattcactatgggagtcacaacctttacacaggaatactcctcctctgttgccccatcacgcatgttcaaggccttgattgtagactccagaaatttgcttccaaagctcttacctcagtttgtaaaagatgtgaatgtgatccaaggtgatggtgaagctggaagcattgaacaagttaacttcaatgaagctagccccttcaaatatctgaaacacaggattgatgtgcttgacaaggacaacttggtttgcaaatacactatgattgaaggggatccattgggcgacaagcttgattctataggttatgaggtgaagtttgaggctactagtgatggaggttgcctatgcaaaatgacaagcaattacaataccattggagagattgatgttaaagaggaagaggtaaaggaaggaagggaaagcggtattgcagtttacagagttgtggagtcatacctgctcgagaacccaca

SEQ ID NO: 97762 - DNA, 458 bp, Glycine max
  Clone ID: PAT_MRT3847_59293C.1
aaacaaaacatctatccattaaaatctgaggatgagtaccacttagcacgtgttaccattatacattcattcacagcagtgcttgcccatactgaccaataccttgcttgcccactttgcacaatattgaagcaccaatctttgatgatcacgccacccaacaaatatctcatggtgtgggaaggtgaacttccacccttttctacaaacagatgctccttttaacactcttacaagaacaccgagaccaaccgaatacacgtgttttctacgatttttacgaagtcatcgaggtattattcaaaaggggatccgtattctcgctcagaacttgagtctcatttggcgggggaacttgctgctgcattttaaatagcctgctctgacgctttagcaacagtgcagcctttttttggcctaagtctggcacatgctttgcctattttaacaggggaccc

SEQ ID NO: 97763 - DNA, 259 bp, Glycine max
  Clone ID: PAT_MRT3847_59294C.1
ctgccctcccatgggcccgggctcagcgtcagtgcccgcctgtccccctggcctacccccagcccgccaaggctcgggcctcagggcagtgggaggagtgaacgagccctcttgcagctcagccgctctggcctggcatgttgggagtgatgaatggcaggttccaggcaggcagagagggaggtgcgagggcagggcctacgccgtcactgctgtctctgcgtcaagaccttggggaggccttgtccctccccagctc

SEQ ID NO: 97764 - DNA, 387 bp, Glycine max
  Clone ID: PAT_MRT3847_59295C.1
ctgaacaaggtgacaccaaaacgcttggacacttgacaacctcatcccttgtccgtctgcagaaattatgtgtttcctcgtgtggtcatttgacaactttggtacatttaccaatgtcattctccaatctaaaacatttgtctgtaaaagattgccatggattgaagtgcttatttacatccacaactgcaaaaaagttagtacaccttgaagagatgtacataatgcgatgcaaatccttgcaacaaatattggcaagagaattagaagacactactacttcagaggcgatacaatttgagcgactcaacacgataattctagattctttatcaagcctgtcatgtttctattcaggcaatgaaattctgttattatcatctctga

SEQ ID NO: 97765 - DNA, 402 bp, Glycine max
  Clone ID: PAT_MRT3847_59296C.1
cccacgcgtccgaaaaaaaaaaatttaaaaaaaaaaaaaaaaaaaaaaaaaacaagaaaaataaaaagatcccaaccttaaaatacgacatccattctaccatcgcaaatattctatgtgtcacttaactacaatttactctacatccatttacatcgccgtcactttacaacccctagacttacaaaactcaatcgcctctcatcatattcccctttcaccacatgccattttacccaactggcatactcccaacgaccttcccaacaattgcccttcctaaatgttgaacagtacgcaccctgaatcggaccctccatttcgcggcacattaagctcacccgctgttttacctacacacttagcaaccccttaactcaccatccttttactttcttctct

SEQ ID NO: 97766 - DNA, 192 bp, Glycine max
  unsure (1)..(192): unsure at all n locations
  Clone ID: PAT_MRT3847_59297C.1
ggaatncggctcgagcgaagcccgaacgattcctctcgcgttcctactccgacaacaacaccatttaaatccacaaacgacactagctatgctatgtacgcagctggggtggagagtctaatatcaaattgactctctactatttgctaattatgatttaatactctgtatcctgatgaataaattccttct

SEQ ID NO: 97767 - DNA, 394 bp, Glycine max
  unsure (1)..(394): unsure at all n locations
  Clone ID: PAT_MRT3847_59298C.1
ctcgagccgcttgagacttatcttatcccgagtgagtctccaagaataaatttttcactgaaaagaaatcatttttatcattaatattaatnaaaatatgataaaaaaaaaaaaagagagactagagtgccagaaactaaataaaggttatgtgaagttaagaactaaagtgattgatcattacagcagttttgcacctgaaagtcagtttcaagggaggaagtaaagcagtttatatgtcgtctcattatgtggactacatgggacatactttatcaatatatacttcaagttccttgtaagttaagttcttgttaaaatgaaattgatgttgtgcaggcaaaaaagaagaaattggtgtcattcgttaccatatggtacatgtggatgatgt

SEQ ID NO: 97768 - DNA, 860 bp, Glycine max
  Clone ID: PAT_MRT3847_59299C.1
gatccaccccttctctctttatgctctttctttgtgtatgtatgtgtggatcatcaccaatctcttcttgctaaagcaacttcctttcatctcttcttgttagctttcaacacaatccatgaccccacaacattagtctctctctttctctttctctctctatatctctttagtgcagttagtagagtggtgagcttcataatggagaccatgaactagaacttgtctcaaaccatcactcacactcataccttcaaccccttcaaggttcaaagttgagtgtgggtgatgagctcctcatagacaaagactaacaagctggggcagagagaagaagagatggtgggaactccaattaacggaagaacaaggctatcttttggtgctgttaatggtggccatgatcttggccccagtagtgctccaccaagcaatgctggctcagattatggcattatagagttcacaagagaggatgtggaggccttgctgaatgaaaaggccaaaaggaaggaaagatttaattacaaggaaagatgtgaaaacatgatggactatataaaaaggctgaaggtttgtatcaggtggttccaagaccttgagattagctactcactagagcaagaaaagttgaagagttcattggaattggcccagcaaaaatgcacggaaataggttgagatttttctttgtttcttttttcggaaagtcctcatcgagtttggggactaaggcggttagattcatttgattgcagagctgctgctaaaaatcaaggaagaagagctaaattcaattattgtggaaatgagaaggaattgcacttctttccaagagaaattggtgaaggaagattccc

SEQ ID NO: 97769 - DNA, 115 bp, Glycine max
  Clone ID: PAT_MRT3847_5929C.1
gcggcatattctgaggtgttctctcagatctgagtttaccttttcctgaatccaactcaacctgggtcttgttcatttttaacatcgcatcgccattcgctttaacctctcaata

SEQ ID NO: 97770 - DNA, 333 bp, Glycine max
  Clone ID: PAT_MRT3847_592C.1
gggtagtataatgtactgtgttgatcactcaaggctcttctggctattctttggggtcttctcccacgtttaccacgagaggaagcctcggatttaggactcttcaaccttgtttctgtttttttggtttggttttgttctttccttttcaactctttctgcacaagagttgtgctgtaagctatagtgtttgaagtttcggtgatagttggttttgttacttagttggagtgtactatagttaagaattcaacatgtattccaataaaaggtgtaaggacgatggcaaagctgagcctcgttacatcgaaaccgacccaactggtagatatg

SEQ ID NO: 97771 - DNA, 156 bp, Glycine max
  Clone ID: PAT_MRT3847_59300C.1
tttggatccaccccttctctctttatgctctttctttgtgtatgtatgtgtggaacatcaccaatctcttcttgctaaagcaactatctttcatctcttcttgttagctttcaacacaatccatgaccccacaacgttagtctcactctttctctt

SEQ ID NO: 97772 - DNA, 1491 bp, Glycine max
  Clone ID: PAT_MRT3847_59301C.1
ctgtaccgcaattactcgcttcgtgccacgcgtccgcaccaacatcttcttgctcaagtatcttcctttcatcacttctcgttagctctactcaccctccatggccccacaacactagtttccctctttctctttctctcgctatgtctctatctctttagagcagttagtagtgtggtgagcttcaaaatgaagatcatgaactagaacttgtctcaaaccatcactcacactcactcctccaactcctgctacattcaaagtgtcacggttaaaaaagtgatctttttgttgcggttttccaagtttgtgggtgatgagcttcacatagacaaagaccaacgaggtggggcagagagaagaagagatggtgggaactccaattaacggaagaacaaggctatcttttggtgttgtgaatggtggccatgatcttggccccagtagtgctccaccaagcaatgctggctcagactatggcattatagagttcacaagagaaaatgtggaggccttactgaatgaaaagaacgttagcatcaactgatttaaagaccttgaaagatgtgaaaacatgatggattatataaaaaggctgaaggtttgcatcaggtggttccaagaccttgagattagctactcactagagcaagaaaaattgagcacgtctacggctgcgagaagacgacagaagggggaaatagagttgctgctcaaaatcaaggaagaagagttaaactcaattattgtggaaatgagaaggaattgcacttctttacaagagaaattagtgaaggaagaaacagaaaaaacagtggctgcggaatctcttgttaaggagagagaggctaggcttaactttgagaggtcacagagtacactacaggaggatcttggacgagcacaacgagagctccaaagtgcaaatcagaagatattgtcactcaatgacatgtataagcggttacaggattacataacaagcttgcagcagtacaatgggaaactccattcagagctttctacagttgaaaatgaacttaagagtgtagagaaagagaaagctactgtagtggagacccttaccatgttaaagggtcagcttactttgtctatggcttctcaagaagaggccacaaaacagaaggatgcattggctagtgaagttacatctctccgagtagagttgcaacaagtgagggatgatcgagaccgccaattatctcaagcgcaaactttaacatctgaattagagaagtctaaagattttacagaaaagtcctgctctgaactgaacaaattgactttaagaacaaatgaactggagacaaaatgtgctttgcaagatgaacggataaaggtactacaagagaagctaactactgctgaggagaaacttcaggtttgtgacatatctgcaagtgagacaagaatagaatttgaagggcaacaaaaacttgtacatgagatgcaaagacgtttggcagatgc

SEQ ID NO: 97773 - DNA, 413 bp, Glycine max
  Clone ID: PAT_MRT3847_59302C.1
tttcattgctggcgaatttcttgcactttgcttggctattgtctcttgactgttggtgtatcttcgggtcggcatagagagatgatgaagacttccgttcgaggaacaatcctatgatatgaggaacacagagaacgtaacatttgatattcataacaccagaaaagaaaatttggtggcacattactgttttgcttgcctgggatcgttgacgagtttggccaaaatctgaacacgaatatcgctctactgaggtgccatggattcaatctaaaatttattttattactgcagtgtaccttcggataacaatatcctacatgcgagttagggtggacacacacaagctgagaaagttgctgacttgtgcttggatagggataccactatccacaaacggtattttgagacat

SEQ ID NO: 97774 - DNA, 189 bp, Glycine max
  Clone ID: PAT_MRT3847_59303C.1
aaattatttaagattgatatgagtattagatacataggatttatatattatgattaattagaattatgataattattgaaagtatgagcgtcatgagagaataagttggttttattactgttccaagattcggaggacttataatatataaataaagggaatgttactgagctaataataggaatattt

SEQ ID NO: 97775 - DNA, 1193 bp, Glycine max
  Clone ID: PAT_MRT3847_59304C.1
taactttccccacacacacacggcaacacccgtgttgcacttgccctctcttccttcctatttcttcaatcttccaccacttttcatctttccacacaattgaataacagtaggacacaaaaaggaggaagagagaaaaggagatcagattcaatctcgaaaatccattttgtgcatgtatatttttgtctcttttgcgcaatttccttttggttaattaaacacattgccattaaatggaaaagaaagtccttgatctcatattagtcccaagtggtttccttgtgttgttggcttaccatttctggcttctccaccaagtcatgaaacaacccaccaaaacagtcattggtgtcaatgcaatcaatcgccgtttctgggtccaagccatgatggaggatgcgtccaagaatgggattctagctgtgcaatcattgaggaacaacataatggcatcgacccttttggcatccacagctataatgctgagttccctcattgctgtgttgatgagcagtggcaatgagagaaaaaccgtggtttctgaggtttttggggatagaactgagcttggtttgtccataaagttcttttccatattggtgtgtttcttgttggcatttttgctgaatgtgcagtccataagatactatagccatgcaagcatcttaatcaacgtgcccttcaagaaagtgtccccaaacctaaggcatcaaatgctcacagctgagtatgttgccaacactgtgaaccgaggtagttacttctggtccctcggattgcgtgccttctacttctctttccctctcttcatgtggctctttggacccattcctgtgttcttctcttgctttgcccttgttttcatgctatacttcttggatgttacatttgagcgtggatgtgctggggtttctgatactgatgatagtgttcaagttgttgaattgaacaagcacaatgttgatgtggaaattggaaaggccaattagaaattaaagtaggttaattaacttgttgagggtacgtaatggctatacacttgtaaattaaaccttttatcccgtcaaagctagaaatgatcgttgatataacttttaatatttatcataaaagccaacaaacatatatcatgtataataatttgtaatgatgatttaatataaaactaatttatgttattagtgcgtaac

SEQ ID NO: 97776 - DNA, 1559 bp, Glycine max
  Clone ID: PAT_MRT3847_59305C.1
accaaaaaaaaaaagcccaaacaataattactcataaaaaggaagaaaatacatatataatcacagtcttcatgcaataaactcgatcagcgcctgagtatgaaaggtgcttcatgcttggaataagcttttacaactatagtccatataataacaatacatcaccatataggactctctttctatgaaattccctatatttaggggcacaattaattagcgtgggtaaacaaaaaacagaaattacataaacagtgaaccaaaataagttaaaataactgtagagagagatagaaatagctagtataggcaacgatatctacaccgtctctgcctcttttcgcacgttttactaattttacacgtaaaatatagagagatagagattgaggcaacaacactgatcttccaattccatcaaacttcgcaactcaccctctcctctgttttgttgttgtttttgttgatgttgttcttgttgagttccgtttggtcatgagcaacttggtcaagcttcttattctccacagattgttgttgatcttgcttattattctcttccttcttctcaccaatctctatatctccaccctgaggctttacttcttcttcttgtttttcaccattccctgttggagcaataacgttttcactctcaacaatatcccctttgtgttctggtagcttctgatcctttatgggtttgttgtttctgtacattgcatagagaccgatttgaatgactccaaatgttaaccccacaacgttcgggagtgtaacatagatatccttcagggaaataccgtataagagccacataattgcgcttatcagaaggagaagtgaaagagggaaaggaaggaactctacgcttttcgtccgaattaccaccctaataatgcttaaaggtgctgcaaaaacactagtggcaaagactacgcaaatccatcctagaagcttgacacgggcttcttctccttttgctagtaggtgggttaagaggacaattgtgcaaaatcccccaaaatttaacaaaacaatcatcctcaatgtcgacatcctagctttcttcgggcagtaagtgataaatacggcaaggtaaattgtctcaatcacgcaaccgaatgcattgatggtgataagaagcgtttctccggtcttcacataggcataaaagatccaaagcattgcactgaagagtgcagccacatatggaattgattggaacccttcggttgatttcttcttacaaactctataaaatgttggtagtggtgccagaaagcacacgaaggaggcaatgttacctagaatcccaaaggcgaaacttagatgactgtgggacgacatggttttggaatttctctctctctctctctcacacactgattttttgtccctttgtctgaagggagagaaggaaggtgagaaaagaagaagaaactatgaagctctagcttaatttctgtgtcacacaactgccacgagtccccttctgtcgtcttctcgcagccgtacggacgcgtgggtcgaccgttgaacccggaaacggtacctgc

SEQ ID NO: 97777 - DNA, 501 bp, Glycine max
  Clone ID: PAT_MRT3847_59306C.1
atctggcggtgtcgatcgtgggcatttaccgaaaatacacggtgtagaagcccgcaccggtattcgatgcgcgtgtttcaaattcggatagtcacgatggattgcgcgtggtgataggatccgcgctagaagcacgagattcacgcgttccggagattggatgcctggaatatgagggagcgctagagggataccggacgagctcccaatcagtaattactatgattttaagagggagataacagcttgcggattctgcgttagtggctcgtggacagcggctacgactacgccgtatacgatgcaccatttcatcgactgtgcagtacttgccgttgaataaccgctgtccgtgtccgtgctgggtcggaggggaaaagaatgtgggtggagtagacggcgttgacggcattaacggtggaggagataggagagccaagtctaatgggtcttccacgtgtagttcttctgtggtttcggattatcaaagctcttctcgtg

SEQ ID NO: 97778 - DNA, 1965 bp, Glycine max
  Clone ID: PAT_MRT3847_59307C.1
tgttttggcttttgtgtggctttcaaagctatgttttggaaaacaattattcatagtttcataatctccatgcaaacttgttacttgtccatccccactccatcatgcatgagctagccacaaccttatatatagggggttctatcatcctctatactcgtggtagttgtgtgacacagaaattaagctagagctacatagttttttttcttttctcaccttccttctctcccttcagacaagggacgaaaaatcagagagagagagagagagagagagagaaattccaaaaccatgtcgtcccacagtcatctaagtttcgcctttggggttctaggtaacatcgcctccttcgtgtgctttctggcaccactaccgacattttatagagtttgtaagaagaaatcaaccgaagggttccaatcaattccatatgtggctgcactcttcagtgcaatgctttggatcttttatgcctatgtgaagaccggagaaatgcttcttatcaccatcaatgcattcggttgcgtgattgagaccatttaccttgccgtatttatcacttactgccccaagaaagctaggatgtcgacattgaggatgattgttttgttaaattttgggggattttgcacgattgttctcttaacccacctactagcagaaggagagggccgtgtcaagcttctaggatggatttgcgtagtatttgctactagtgtttttgcagcacctttaagcattattagggtggttattcggaccaaaagcgtagagttccttcctttccctctttcacttctccttctgataagcgcaattatgtggctgttatacggtatttccctgaaggatatctatgttacgctcccgaacgttgtggggctaacatttggagtcattcagatcggtctctatgcaatgtacagaaacaacaagcccgtaaaggatcagaagctaccagaacacaaaggggatattgttgacaacaacaatgaaagcgttattgctccaacagtgaatggtgaaaaacaagaacaagaagtgaagcctcagggtggaattatagagactggggagaagaaggaagagaataataagcaagatcaacaacaacctgaggagaataagaagtttgaccaagttgttcatgaacaaacgaaactcaacaacaagaatacaaacaacatcaacgacgatgacaacaacaaaacaggggaaagggtgatcagttgcgaagtttgatggaattggaagatcagtgttgttgtctcaatctctatctctctctattttacgtgtaaaattagtaaaacgtgcgaaaaggggcagagacggtgtagatatcgttgcctagttatttctatctctacagttattttaacttattttggttcactgtttatctaatttctgttttgtttacccacactaattaattgtgcccctaaatatagggaatttcatggaaagagaatcctatatggtgatatattactattattataacatgaattttagttgtaaaagtttaattattccaagcatgaagcacctttcatactcaagcgctgatcgagtttgcatgaagacagtgataatgtattttcttcttttttatgagtaattctttttgtgctgttttttttttggtacacaaaattttatactattgaaaagccttcgtgtcttaatttaagataaccatgtcgcaactagggacaaaattttagcaaaacttgcaagggacacagaccactcaaacgccaattcgccgcaaaggtcaaatcaagtagagcatagttaatattgtatgttctgctctgttctttggctttgcctttgttttcccccacaaaattaaatcgtgggagtgctttgttaagcagttagttaattttatgatcccatgaaaggttaactcttcactcagaaataaacaataataaaagttatatatttggc

SEQ ID NO: 97779 - DNA, 864 bp, Glycine max
  Clone ID: PAT_MRT3847_59308C.1
gcctcttcaagatcatttccagctgttatacagaaacagttggagagtccaatgattctgaatcagaagaggcctgtatttgacatagatatgcctaaggtaagaaaaaatgttgagacggttaatctagaacataagatgaccttgaaggaagttcttgagactactcatttcaatggagttttaaagagtcctgtcagagagcctaaggttcaggtccatcattccattgatccacattacaaacattttggcgatttacctcccattgtacttatgaaacctcggtgtactccatatcgagaatgtgcaaaaagttatgagcatgttgttcctccagaagagttatcccttagaaatctaaaagcaaaatttctcccttccaaagtattccaacacagagaaggctcaaccaccaacatgggaaagaaaatggaagaatatgtatccaaaaggcttgccaaagaggaaagagctaacctcctcagcgagggtgtggagctgaaggaaaaagaaatcaagcctgttgaaaatgagaaagctccaggaggtttcaaaaccgcaaagtcatgtcagtcacaaatcacatgtaaatgaaaccgttgataaaaaagctaaggtaaagaccattaccactagtaaaaagctatcagaaaaggaggtttcaaaacccaaacaacaacaacaacaaagccttatcccacgcggtgaggttccaaaacccaaagttgtgaagaaatctcaagataaaggagaaattagctctacaagtacaaagttgaggaagccccaaagtgggtccagaatttacaaaaatgagattcccagcagaaagagctctgcttcaaattcaaaccccctctc

SEQ ID NO: 97780 - DNA, 344 bp, Glycine max
  Clone ID: PAT_MRT3847_59309C.1
ctgcttaaagcaaaaagttattcgactttttgagcataccacacaaacatgggggaggatggaattaagattagtggagagggggggttactgaaggttgagccaaaacccatcaatggtttcacctcacaagcggtcgatctgtctgcagaaattggcggagaagtccttgtatgatgcttcactgccccatcactacttcactggtaatttcgctcccgtgagtgacacccccccaaccaaggaccttcctgtccaagggtaccttccggatcgcttgaacggggagttgtcatagatggcccctaatcctcaatctgctcctgtcgctggatatcactggc

SEQ ID NO: 97781 - DNA, 273 bp, Glycine max
  unsure (1)..(273): unsure at all n locations
  Clone ID: PAT_MRT3847_5930C.1
cantagtagtagtagtaaatcattgntctacgnagctcccctcggatacagcattgaanacgtnagaccaaacggtggaatcaaganatncagatctgctgcttactccnactgcgctcgcaaaccttccttatatccatccagattggtagttnattgnatggnancntagttttattnggngtnncttcnttgtgctcaattnggnttttgctgctctccttcaaacnccggctttccggntcctctcgtngnggnngtgaccggtgctgc

SEQ ID NO: 97782 - DNA, 370 bp, Glycine max
  Clone ID: PAT_MRT3847_59310C.1
actttctttgctggtaatcggactaattctctttatatctctcatccccctcctgttactcctccgcttactctgcaatccctattctgttatatcatctgctatttcaacctcctgatttttcttggttttgcctcaccaataatgattctaaactttgaaaattttttctcgaaagccattgtgttttcataatcgagatccagctttttttttgcttggttttaaaaaaatattattttctttcgttcaccctcgaaggttgttttttgatcccctcaaaaagctctcctttctttcttatctttccttggtattttaatgggttgctctattattatacctacttccaatacctttttttgttggt

SEQ ID NO: 97783 - DNA, 454 bp, Glycine max
  Clone ID: PAT_MRT3847_59311C.1
ggaaaaggggaaaaaaaaccccccaaaaaaaaagggaaaaagcattaatccctttataattaaaaaaaatttctaaaaaaaaaaagaacccccctcattgaattacatcagcaggacacaggaaattttttaaaaccctcccccaaaagggaaaaagggtaaaaaactttggaaaaaacaaattaaaacccttacaagcattgggggccataaaatgggaaaaaaaaaaattttgctatggccaagaggatgggggggggccatcccacccacaataaggctcctttttttaaaaaaaacaaccagccagggggacccttattgggtcctaaagtggggccgggaaacaaaaaaaaaaaaggtgccaaaatggaaaaggaaaattcccgtctttcccaaccaaattggaacctccaggccctgaattaaaaacaaaaccctgcctggcccattt

SEQ ID NO: 97784 - DNA, 545 bp, Glycine max
  Clone ID: PAT_MRT3847_59312C.1
actagctgtcgatctgtggctagcaatgtaccaggtacctgtcacgactaagtattagtgggccagtaatttgttaagggcgggataagagccaatacatttgtgttgggcaagggcactagcaagggcggtaaaatatcctaacacgcaaagtgcggcagagctagttaatgcacttagccaggtgatgcccgggcgaggtaccaatgagggtgagggccaatgagtacataaacatgcaacacaacgtgggaaaaagtactcaagtgttacgcacagtactaaacggtaggctgtcccaaaatgccaggcggctactgatccagcataaaaataggtatcgtgataaggagcataaaagccaaaacagacgacaagggctccaatagaaacaggagagtaccacgggactgcggtagttgcgttgcttagagcgaagagtactggtacagcagtaccggtgaaaaggcgccaaggccaacaaaccggccgtggcagagcacaatgggcaaccctatgtataggagcgcagctaacgcctaggt

SEQ ID NO: 97785 - DNA, 411 bp, Glycine max
  Clone ID: PAT_MRT3847_59313C.1
aaaataacaaattctagtacattcattcattacagacattacttataaattgtacattgctgtctaatcttcaatgttgaaaggaaccacaatgtcgaatataaacactcttcggtcttcacatgtcaggatggaaaaaaacctcctatcgattaatgcttcattaataattgccgggtcaagggagaagctagtcttgcttactaccaagggtaaaagcacgaggattagaactcttcaacaccctcagactcttcactgttgacacaaacatgtgccacggtacatctccaacaagcatcctgactccttcgttaacctcataaacaagagtatattgcccacttccaaccaagagaacccgaattggatgtcgtgttactgatcccttgcttagaattccaccagcac

SEQ ID NO: 97786 - DNA, 638 bp, Glycine max
  Clone ID: PAT_MRT3847_59314C.1
acaatagataaagaatgggatgaatccgcacatatctcacatctctggtgaaagctctctgggcaatgagttgaggagatccgtcagcgagaagcttcatcacgttgatgaggccgatgctgccaagcaaggtagggttctaaagtatatacaaactgagaagcgacggaggaggagccaccgtgcagaagaccccataagaaccttgatgttcttaggctctatgaatcacacgtgacatatgatattattaatgaggtatttgggcctatagccttggtgttgaaattaattaaccccctttgactaattgggggtgaaaaatcaaaaccgaaattcatttcaattgtcacatatatgttaatacagcagtgatgtaaatatgtcatggaccttcatatctatagctagaagtatcccttacttcagattgtttatattttgaaactatataccaaaaaatatcagcctatatgtatatgtttatatcatctaatatccatatagttttaaactttctgattccattactgctgcatatattatggctggatctacgcgtgtatttatattttataatataagatctgatataatctattataatgagaattttcttgatcctaataaaaacaaaa

SEQ ID NO: 97787 - DNA, 757 bp, Glycine max
  unsure (1)..(757): unsure at all n locations
  Clone ID: PAT_MRT3847_59315C.1
gtcgaccattaattcgacacacaatgagtagtgacgccgtcaagccgctgcaaaatctgctggacgcgtttggcgcgcgtctggcacgtctagagacgcaactgggtatggagggagcgcttacctctgcgcatgttgtgactgctgccgtctcgcccgccgccgtttccgaggatttgtcgccacagctcaaggcgtacgacgagtacgtggctcagtatttcccgcccttcctggacgtcagcaataagcttggggatgacacgcaaaagcttgcaaaggtcatggagaaggcgtttgcagcccagcgtgcgtacctgctgatggcgagccagtgcaagaagcccgcgacgcttaacccagagcacctgaaggacttgcaggcctgcatcaaggagatcaacactctgcgtgacaaccgcagtgactttgccaaccaccagaacatggtaaacgagggtattcaggcacttggctggctctgtgtggagcccgcccccaagccgttcatcgagtcgtatgtaggtggctcggacttttggggaaacaagattcgtgtgcagttcaagacgtccaatcctgaccagattgcatttgtcgcatcgtttaaaagcttgttgaccgagctcatggcctacgttaaggcgcatcacacgaccggcgttacgtggaactncaaggcggtgacgtggccaactacgcacccgcagcaactccaatctgccgtatctgcaggcggtatagccaatgtctttgc

SEQ ID NO: 97788 - DNA, 377 bp, Glycine max
  Clone ID: PAT_MRT3847_59316C.1
actactattcactctctgccactctgtaccctgtcgcgtgcgacatcacctgatgacatccacatcctgaaagatacatggtgaccacatgtccccaggcttttccgccacattgtctccttgaagggagtgcgagcccagcggaggacctgcctgcctgtgtgcagacctccatcctgctcaagctctgtctagaagcgatcggtaccaccatccccaccatctacctctgtgtgcccaccgtcgtattcaacagcaagtctttcacactctggggtggtggttgcctctgcactgccaacccgttgtggaggcactccttgtgacacgctcagggatacactcgtgctttccacagcagcaacagtgacagagct

SEQ ID NO: 97789 - DNA, 826 bp, Glycine max
  Clone ID: PAT_MRT3847_59317C.1
gcaccaagaaaaacaattcagatatagccaaagtccaacccatatagtctcattgctttcaattttccaataccttttctgagtaccaaaacagaaggcatatccgcacatacacattccaacgtacaaaatgaggcactttttagtactagtaccactgatcttgcttgtttttgctggtttcccatccaaagcaaaagggtctctgctaccattcacaaatcatccaaataccctcttggctgatctatggtctaatcatttccctgatccatttcgcgtgttagagcaaatcccatttggggttgacaaagatgaaacattcacagctctatcatcacatgcaagagtggattggaaggagacaccagaagggcatgtcataatgctagatgtgccagggttgaagagagatgagatcaagatagaagtggaagggaatagagtgctgagagtgagtggagaaaggaagagggaagaggagaaggaaggggatcactggcatagagtggagagatcctatggcaaatcctggaggcagttcaaggtgccagacaatgtggacttggattctgtcaaggctaagatggagaatggagtgcttactctcacaatgaacaagttgtcacctgataaggtcaaaggtccaaggttggtcagcattgcaggggatgatgagcaagctcccaagctcaagggtaatgaagacaagcaggagctttgaattattcacaaatgataataactttatcatacagacttcttatgtgtgtcagtaaaaaagggtttgtaatttgtagttagttttgtgaataaaggtttaaaa

SEQ ID NO: 97790 - DNA, 288 bp, Glycine max
  unsure (1)..(288): unsure at all n locations
  Clone ID: PAT_MRT3847_59318C.1
angtngnatgnangngtagtnagntcggaattnggctagangattccnnnaantggnttgangnnatnttcaagnnagtagangggaatgtnagagngtggnttaaagatggattgaanattcattggtaaanctanngcnattgaggaaangttaagtagnntgagtgagnaattcagtgntangtnnangaggaaggntttntngcattggtatacaggggaaggcatggaagagatggagttcanagaggntgagagnaanatgaangatntcgtgtcggagtat

SEQ ID NO: 97791 - DNA, 458 bp, Glycine max
  Clone ID: PAT_MRT3847_59319C.1
aaaacaggaaaacagccctttccaccatgaaaattcgtcggcatacgtgtttgtatcaaatcagattgcttggtgccgtttgaaaaattggctcataaaaaacttttgggaaaaaattataatttttcttcttcagagagatgtggtttaaaaccccctctgaaatcatttaagggagccccatttttttcttccccattttccatttcaagtattttttttcaatggccacatcccatgtttccttgaccccaggcttggttgtgggggcccccaactgaaatgttgaaccttcttcatgttggatgctccatgaaagaagctggttgcttggcttttttaccggtgctcttggggcacagtgaacgggggctgctagaaagaatggtggctcaccaaaagcttttgaagatagaacacctctctggtgatgcccactgttgaggttttgaacctta

SEQ ID NO: 97792 - DNA, 592 bp, Glycine max
  Clone ID: PAT_MRT3847_5931C.1
tacggctgcgagaagacgacagaaggggaggaacaagaagcgaaaatataacaaataatttgtactttcatcaaaacaaaatcccgttgtatttttctcagatggctcgaacgaagcagctggcgactaaggcggctcgcaagtcggctccggcgaccggcggcgtgaagaagccgcacagattcaggccgggaaccgtggcgctgcgcgggatccggaagtatcagaagagcacggagctactcatccggaagcttccgttccagcgcttggtccgcgagatcgcgcaggacttcaagaccgacctccggttccagagctccgccgtctccgcgctccaggaggccgccgaggcttacttggtcggtctcttcgaagacacgaacctctgcgccattcatgccaagcgtgttactatcatgcccaaggacattcagctcgccaggcgcattaggggcgaacgcgcttaaacctaatccctgtccttttgtatagataatttcaagcgttcttagttagattgaattgcggttttctttgagaattctgtaatgttaacgctttaccaatgaaattatcgcttttgttctcc

SEQ ID NO: 97793 - DNA, 421 bp, Glycine max
  Clone ID: PAT_MRT3847_59320C.1
tgcttgcatggaaagcttttcaacatgttgcttcctatgactcagcagtatctgagtggttgtggaaacagagtgtgggaggtacttctgtttctagtttgtgaggattattaattcacactcattgtgagatggaaatgtcaattactggaaaatgcaaataatttataaatataatcctagaatggtaaagctcaatctacagccagcagattaattggtgtactaattttcatatattttctagttttgaagtttttgaaatcagtgaacaaaattgaaatcatatatttaattctaaaataactggcagaatgtgttagtttaaatatctcaagtgatattattaattctgatgcgctccattcattgacttattttcattatgatgacagataaattccctgctagcttgacagtg

SEQ ID NO: 97794 - DNA, 450 bp, Glycine max
  Clone ID: PAT_MRT3847_59321C.1
atacaaaggcaattaaagaacaacaaactctgcataagactgatgctacacattaaaaatgacctggttaattaccaaccccttattatttctcaatgtaccccgaaaaaaggttttatttagcttctttccaaaaggaaagcttctttcattctacttttggcacctttcctaaatgaactatgcacatgttgttgtgaatactctcatgtaccaaacagcaggaagcatcatgtggaatatttcatacttgacatggctcttggagggccaaacgatatgctgttgcacctttctcaccatcatatggattgaaagatacctgtttcaagggatgggaaggtgtatataattcaaatttggaatatgcttcgcttgatcaaaacagcaggagatgcctcattcaccatcttaagaatggaggcacatggttatccgatcaatgaactg

SEQ ID NO: 97795 - DNA, 1088 bp, Glycine max
  Clone ID: PAT_MRT3847_59322C.1
gcaaagtagggttacacaacccatttgggggacggggcctctgattgcttgaagagtgtttttgtggctattagccgttgcgttgtgatcttttgttgcaacgttcaaattatttgaacaatttacgcaaatagggtttggtgaattccgcaacggctagtacaacctttttaagccacaccttttcttttttttttcattcacgaacacaacccctctttcttcttcttcttctctctccctctttgcaagaaggaagattcagattcagatcactgttttccttcttctccttctttctttctgcaactctattgttattcattcaatcaacacaatatggctgccactaataacattcatgggaacactgaatctgctcaatccaacattgctcctcccactaagcagcctctacatccttctaagactgttgattctcaatctgtactcaaaaggctgcaatctgaattgatggctttgatgatgagtggagattctgggatatctgcgttttctgaggaggacaacatattcttctggaagggaacaataacaggaagcaaagatactgtgtttgaaggcacagagtataagctatcactctccttccccaatgactaccctttcaagcctccaaaagtcaagtttgaaacaacctgcttccaccccaattttgatgtgcatggcaacatatgcttggacatactccaggataaatggtcatctgcttatgatgtcagaacaattcttctatctatccaaagtctgcttggagagccaaacattagttcaccactaaaccaacaagcagcacagctttggagcaatcaagaagaatacaggaagatggtggagaagttgtacaaatctgcaaattgatcagtcttttgcaggagagaagaaggaagggtccatagagtctgcttctgagaagagaaaggatgaagccgttatttgtttttaggtgtccttttctgatgggcctgctttcatataatataatcttacaatttacgaattgttgcatgtttctttctcttctttacaattggaagttaaaaaaaaaaagattttgtttttaaaaa

SEQ ID NO: 97796 - DNA, 526 bp, Glycine max
  Clone ID: PAT_MRT3847_59323C.1
caaagggatgctcttcctgttccttttacttggaatcagtttggtcagactaattcctcatgcatatgatcctctttgaggctcctgtatatgttgatggttcatccttatatgaggatgagattgcagactattactccactgcttgggatataatcattcctttggtaagcctgatgtttgctgcaattatccatttgcaacaacagtttggcggttgcagcattctttcttggagaatcaataccaagggtgtagaagaatataaaaaagtgcctgtggtaactgaagcatagatccaaagaaatgtggtgtgctatatgctgatgctgagaaaacagaatgactcaccctttggcatatctttttcctcttctataagcaacaaaatttgtagcatttcagattttcatcaatgatttccaatctattaattgccatgttactactattaatgatgtgtagactcaattatggatgttgaatcctggattcaaaagcacactaggattactttttgtcaagg

SEQ ID NO: 97797 - DNA, 1047 bp, Glycine max
  Clone ID: PAT_MRT3847_59324C.1
gccacaccttttctcatctcattcattcaccaacacaaccctcttcttcttcttcttctttttcttttcctctctctttgcaagaaggaagattcagattcagatatcactatcttctaatctttttcttccttctttttttctttctttctttctttctttctgcaactcaaaattgttagtcgttcaatcctcacaatatggctgccaataataatattcatgggaacactgaatctgctcaatccaacattgctcctcccgctaagcagcctctacatcctgctaaggctgttgattctcaatctgtactcaaaaggctgcaatctgaattgatggctttgatgatgaggggagattctgggatatctgcgtttcctgaggaggacaacatattcttctggaagggaacaataacaggaagcaaagatactgtgtttgaaggcacagagtataagctatcactctcctttcccaatgactaccctttcaagcctccaaaagtaaagtttgaaacaacctgcttccaccccaattttgatgtgcatggcaacatatgcttggacatactccaggataaatggtcatctgcttatgatgtcagaacaattcttctttccatccaaagtctgcttggagagccaaacattagttcaccactaaaccaacaagcagcacagctttggagcaatcaagaagaatacaggaagatggtggagaggttgtacaaatctgcaaattgatatcagtcttgcaggagagaagaagggtccattcctgtctgcttcggagaagagaaagggatgaagccattatttgtttttagggtgcccttttctgatgggcctgcttttatatattacaatttacgaattgttgcatgtttctctcttctttacaattgatagttaaaaaaaagatttcgtttttcctacattttgtgttctttgtgtgatcatgtttacgaattaaatttaagttttaacaatcataaaagacaattttgaggtgtttagggcttattgaaattgaaataagcgtttgtat

SEQ ID NO: 97798 - DNA, 1218 bp, Glycine max
  Clone ID: PAT_MRT3847_59325C.1
aattatacctaggtttcaggttcatcaagcattttcttattcctttgtagtgcattggaatggaagatcagggtcagcagcagcagcagcagcatcaagtggaggcaaagagtccaaggcaaggcaccgagaggagtgaagcggttcggtcaaggtggactccaaagccagaacaaatcctcatactcgagtccatcttcaacagtggcatggttaaccctccaaaggacgaaaccgtcagaataaggaagcttctcgagaaattcggcgccgtcggcgacgccaacgtcttctactggttccagaaccgccgctccagatcccgccgccgccagcgccagatgatgcaacagcaggctactgccaccgccaccgccaccgtcaccacctttgatcaccctcagcctcagactcagactcttgttaatgttggtggtgcaattccacatgatcaccacaccttgggaaaccttgttgttgcaactgaaagtagtgctacttcaaccatgggttttggttgttcttctcaatcttcttatggttttcttggttcctcttcttcttcttcttcttgtggtggtggtgtaattggtggccaacaacaaggcatggatggtttcttctcatcggtttcttctcatcaaatgggtttccctgatcaccaccacacttcacctgcttcatcagctttgtaccctcctcttgatccaaatttgacctaccaggctggatatgggggccctaatatttcaggattcattacagtgtttatcaatggaattgcaactgaacttccaaaggggccaatagacctcaaaaccgtgtttggagaagatgtaatgttagttcattcctctggagttccaattcccaccaatgaatttgggttcttgatgcataaccttcaacatggcgatagctactttctggtatcaaagccaacataagtatgaaaacatcaacctagcatcaatggaagcttccgtttagtgtttctctgattgcctttgtctgctcagcatgtccttttaactatttcttcgtaatttcatgtgtctcaaacaatagacataatatctattgtgtgattatagaagtcaatatctatatatgtaccttagcaaatatatatactgtaccttcttatctttgtttttagcacaaatatgtttttcaaactctatattgtcatcaagttgtgtaaattaagcataaaaa

SEQ ID NO: 97799 - DNA, 275 bp, Glycine max
  unsure (1)..(275): unsure at all n locations
  Clone ID: PAT_MRT3847_59326C.1
agggccattgttgttgctattatcatccncanctgcgttgattctcaccgcagacagtgagccatggccgtctgaaagaacaagcgcatctccaaggggaagaagggtggcaagaagaatgcagctgatccctttgccaagaatgattggtatgacattaaggctccttctgtttttcaagtgaaaaatgttggcaaaaccctcgtctctcgtactcagggtaccaagattgcttctgaaagactcaagcataaaatgtttgaagtctccttggc

SEQ ID NO: 97800 - DNA, 641 bp, Glycine max
  unsure (1)..(641): unsure at all n locations
  Clone ID: PAT_MRT3847_59327C.1
caataagcccaaaaccgagtacgtccaaacctttggtcgtaagaagaacgccgttgctgtagcaacctgcaagactggtaacggtctcatcagagtcaacggcctcccccttgacgtccttgagccctccactttgagaattaaggtatatgaacccattctccttttgggtgccaagactttcagcggtgtcgatattagaatcagagttagaggaggtggttacactggtcaagtctatgccatcagacaagcagttgccaaggctatagtcgcttaccaccagaaattcgtcgatgagaactcaaagagagaacttaaagaaagattactacaatacgacagaacccttttggtcgctgatccaagaagatgtgagccaaagaaaccaggcggcagaggtgccagaggaagaaagcaaaagtcttacagataaacgcaaagggatggaagaagactctggtcggtggagatctggtcttttgcctttcgatttggcaacgaaggggaggcaggagcaaccagagatcagaaggaaagagatatatacgtacatacataccaagtcttattttgatcgttatgtttgcatcttaaaaaaccaaagaaaacaccgntttattttgcaccgcgacttgtgg

SEQ ID NO: 97801 - DNA, 220 bp, Glycine max
  unsure (1)..(220): unsure at all n locations
  Clone ID: PAT_MRT3847_59328C.1
gaaaataaaaganaaaatgaaaattttgagccattgcataatggacacactttttagttactattattattgatagtggtgttatccgaatttcatccactactacggtggcttgtgaatcattgaatagaatttgtgaaccacggttgtcagtagaggattaagttattattttaatgattattactactattataattgaaatgtgattctcttggga

SEQ ID NO: 97802 - DNA, 469 bp, Glycine max
  Clone ID: PAT_MRT3847_59329C.1
gtgaaaccgaattttgtagcgaaaccccattacgtattggtgcgttgagacgcgggactgggatgagaactggccctttctctgtgcagatagcgtgccctaagcctgaccatggcacacgcagaaaacgaggaggtgctcgggtcgggtcagtctgcctccaccaaccgctcgccacctgccgccaatagcacactactcaaattgaaccctcccgacatacatgctgatgaagctgcatcacacgcctctcttgctgcctagaataaaaagagaggcggccaacggtctgttggacctgataagagtgggagaggtctccgccaatgtagtatgaaagagtgtgagacggtataaagcacgcgaagaacagcacactaggaggtggcagatgagcttgttgccgaatttgttgaaccaagcaatactgtactgcccactgatcagcatcaatatgatgagaaaaaca

SEQ ID NO: 97803 - DNA, 870 bp, Glycine max
  Clone ID: PAT_MRT3847_5932C.1
ccacgcgtccgcccacgcgtccgtacggctgcgagaagacgacagaaggggaggaacaagaagcgaaaatataacaaataatttgtactttcatcaaaacaaaatcccgttgtatttttctcagatggctcgaacgaagcaaacggcccgcaagtccaccggcggcaaggcgccgcggaagcagctggcgactaaggcggctcgcaagtcggctccggcgaccggcggcgtgaagaagccgcacagattcaggccgggaaccgtggcgctgcgcgagatccggaagtatcagaagagcacggagctactcatccggaagcttccgttccagcgcttggtccgcgagatcgcgcaggacttcaagaccgacctccggttccagagctccgccgtctccgcgctccaggaggccgccgaggcttacttggtcggtctcttcgaagacacgaacctctgcgccattcatgccaagcgtgttactatcatgcccaaggacattcagctcgccaggcgcattaggggcgaacgcgcttaaacctaatccctgtccttttgtatagataatttcaagcgttcttagttagattgaattgcggttttctttgagaattctgtaatgttaacgctttaccaatgaaattatcgcttttgttcttcaattgaatttggttctcttcaattttaaagcttgtttatacgatgtagagttctgttgaatgcttgtcaaagctatttgagtgaattcaagatttaacgtctgccctctctgtatgaaagaataagggccaccatgcgggtttaaacatacctcttttcatgaagattgtatatttgaaacgtgaaatttgttgaactatatggtttgatatt

SEQ ID NO: 97804 - DNA, 1280 bp, Glycine max
  Clone ID: PAT_MRT3847_59330C.1
gatgatttatatgtattggtatcaatttgggccgaattgatcctccttcatcatagctgcccaccaagtatttgatgcattgcccaactgatatcctcccccacatccagacttctacccaattccaataccatattagaaagagaacatcaactatcaaatcttaacaaagtattcacgagttatcacccaccccttttcctctttgtctctgcatcgcctcaagatgacctcatccgagacccttgcattcatggagctcgccatacaacaggcaaagttagctttggatgttcttgaagtgcccgttggatgtgtaattgttgaggatggcaaggttatagcctcaggcaggaatcgaactaccgagacacgaaatgctaccaggcatgcagaaatggaagctatagatgtgcttctcgggcagtggcagatacatggactttcaatgtccgaagttgctgaaaaattctcaaactgcagcctttatgttacctgtgaaccatgcataatgtgtgcatctgctttatcaattttaggtataaaggaagtattttatggctgttcaaatgataaattcggaggctgtggatcgatactgtcattgcatttaagtaacactgcaccgctcaataatgaagttccatccggaaagtgcttcagatgtactggacgtataatggcatcagaagctgtccttctctttcgaacattctatgagcaatgaaattcctcaattttagggccaaacaggcctctagcacgtcaggaatgaagtttaatttgtatatcactagttgctgatgtggttatccgtcatgacctgaggatctgtgctaccatagcattgtgggcgggttgatgctgttattaaatgtcataccgggctttataattcgaaaaatcaacttcatgtattgattattcatgtatgatttgaaagatgaatcaaaggttcccgtttgaaatgaatcttactggattaagttcatactaatagccactcatatggttatccgtcaaggactcgagaatctgtgctaccgtagcattttgggcaggttgaagctgttattgaatgccatacagggctttttaattcgaaaaatcaacttcatgtattgattattaatgtatgatttgaaagatgaatcaggggttgccgtttgaaatgaatcttactggattaagttcatgctaattgccaaacggaatttaagcttctcaattttgttaaatatttgtattctgaaggtgcagtgagtttccattttttgtat

SEQ ID NO: 97805 - DNA, 202 bp, Glycine max
  unsure (1)..(202): unsure at all n locations
  Clone ID: PAT_MRT3847_59331C.1
tttggtttacctacgcgaccgtccacatcgtccgcccacgcgaccgctaaaacggcngagtttttttaagttgtatgagggtaagcatatccctgtatctaatattagtgcaggggagaatcatgtagttcaaatacccttaatggctcaggaggtaattctagattatacttcaagtgattttcagaaccgctttggtgag

SEQ ID NO: 97806 - DNA, 154 bp, Glycine max
  Clone ID: PAT_MRT3847_59332C.1
ggtcgcggatcctccttctttggaccagacgaccccttccgaggcgaagcgcgtgctcaaccgctgctccgtatgcctgccgaaggtcggactcacctgccttcggtgcctgcgcggtgagctcttctgcgccgagcaccgacactccgtccgt

SEQ ID NO: 97807 - DNA, 2582 bp, Glycine max
  unsure (1)..(2582): unsure at all n locations
  Clone ID: PAT_MRT3847_59333C.1
acgaaatcaatgccttataccatcatcataattaaaaaatattttctacgtttcccacactatgcatacaacagaaatccgtaaaaataaaattaaaaaaccaaaacatacaaagaaagggatcaaaatctaattaaagattagtgatttaccccacactatcactggtaaaatttgttggcttcccaagcactagaatttcctgtaaaaagcactctcatttttccaatagatagttacccacgcgtccgtacggctgcgagaagacgacagaagggtacggctgccaaaagactcttcgagggaggcagaggtgaagcttcatggattttggtatagtccctacactttgagggtggtatggaccttaaagttaaaggatataccatatcaaaacatagaagaagaccgctacaataagagtcttcaacttcttgaatacaacccagtatacaagaaaactccagtgcttgtccataatggaaaacccttatgtgagtccatgcttattgttgaatacattgatgagatttggtcacataattcattacttcctgctgatccctacgagagagctctggcaaggttttgggttaaatatgctgatgatgacatgttttctgcagttattgcattcttccttagcaataatgatgaagagcgagaaaagagcatagagaagatatgggagcatctcagggttgttgagaatcagtgttttggtgatcagaagaaattttttgggggagacattattaacattatggacatagcttttgggtccatattcaaaattcttgtggttgcagaagatattcttgacgcgaaggtcctggaagatgagaaattccctcacttgcattcatggtataataatttcaaggatgttgcagttattaaagaaaacctcccagaccatgagaaaatggtggcttttgctaagtttattagagaaaaacgtttggcatgtacctaagaaagtaatcttatatgagatcaagtatgaatcactttgtatctgtctgaatcgttttgttatgcgtgtttctttagtttccactccattattaggatgtcttgacatatctgtgaaagcaataaaagtttaatgggatgaaagttagtagaataagataaacatttgaattataacttccaatccgcttctttatacctttaacaacatcctttgcttgcccagggtcatgattgagcatgtcgcagatctcgatgttcatggcccaatcaggccctatgagcatgtcgctcgtggcgcgttccaccatggaattcaccatctcctccggtcaccggtgcgattcgaaactctcagcgagatcggcgattctccgacgaccataaatcgaaccaccggtgcaatcggagaacacgattccgacaccgcgctctctctctctctctctctctctaaagaaacgaagattgatgcgagagtttggtggattccgttgctgagggaaaggtttggatcgagcctgtatggaactcctttgcatgtgacggtacaacttcggggtttccccattccacagtcgtgtacaaaattcagtattgtggcattgaatcatgcttattttaccttaactgaatcttgtactgcccttggatatggagttaaataatcctttgcgccaataaggagacaagaaactctataaccagttagatctccttgtctaccaaccttctcaagcaaatctctggatttcttccatgaatgttcatctgagctcaccaacaacagtcaaggaagttccaactggaactacccgtacattccagctccccaaccagttcttgcacaattgtttcttgaaaaattccaatgaactgcaatcacagatttaaataccttaaattaccttgaaagatttagctttgatggaattcttggaagtattatatgagtaaaagataatcaaaagaatactacatagataagtataagaattcacatttatatcgttaagatcaaccccctttaaatgtannnnatantcnnntcttgtcatagacaaaaacagctacatcacatgctgccaaataacccttatttgacaaaacattcgatacttcactctctggtatctcccgcaacacaagagtttttctggttccccctattaattcaatggaatttgctgcaaacctctcaacagttgttggagtataattgtttgagaaaggccttcccaataatgaatccaacagagcagacttcccagcatttttagaaccaaaaacatagcattggaacacattcttttctgttgcttgcttcttgcgatctactgctcttctacgggtaacacgaagagcagcagctggattaccactatatccaatgtaaatcaaattagccaggctacatggtggatcaagtaatgtcataaggacccactgcgccaggaatccattaagagatatgtaacccatgttagttctctcagcagcatccttatatagagcatcatcccatggactttctggtgcagtacaaaataacttatcaacttcagcaggtcgtagggctcgatctttatctgtatctaacagtcgaa

SEQ ID NO: 97808 - DNA, 1280 bp, Glycine max
  Clone ID: PAT_MRT3847_59334C.1
aagaactgaaatatttaattccaaacaaactccacaagagacatcagtgtaattacatctagtcaatgtaacttaaacttgaaatatacacaatgaaaatcaaattgaaaacagacacggaccacaatcatattttggcagctatataagaagccaatatagcaagaaaaataaatgaaattagtaacactgtacaaaaaatatattctaacttaaagttaccatgagattagtgtgcccaatactgaacacgaattcaacagttaatttaagtcagctctgccattataaattttcttgatgactaaccagaggaattctttttaactgcatatgcacgacatgctgccaaaccaacaaatgccatagcagtcccaactgaggcaaaaacaagagagtgctgaagaagccgatggtattgctttcttttcctcccaatctcagtttctggaatgcttaaatgagggtgctctgcagcattgacaatcttatggtacacgttacttgaatcgcctaatttcatacttacatgaataggtgcctctattcccaattcctcagtaaccttaactgaatcttgtactgcccttggatatggagttaaatcatcctttgcggcaataaggagacaaggaactctataaccagttagatctccttgtctaccaaccttctcaagcaaatctctggatttcttccatgaatgttcatctgagctgtcatagacaaaaacagctacatcacatgctgccaaataacccttatttgacaaaacattcgatacttcactctctggtatctcccgcaacacaagagtttttctggttccccctattaattcaatggaatttgctgcaaacctctcaacagttgttggagtataattgtttgagaaaggccttcccaataatgaatccaacagagcagacttcccagcatttttagaaccaaaaacatagcattggaacacattcttttctgttgcttgcttcttgcgatctactgctcttctacgggtaacacgaagagcagcagctggattaccactatatccaatgtaaatcaaattagccaggctacatggtggatcaagtaatgtcataaggacccactgcatcatacaatttaagagatatatcaataactcattctgaagaataaaaaacagcataagttaaccccacctgcgccaggaatccattaagagatatgtaacccatgttagttctctcagcagcatccttatatagagcatcatcccatggactgcaattcacaac

SEQ ID NO: 97809 - DNA, 482 bp, Glycine max
  Clone ID: PAT_MRT3847_59335C.1
gtgtactctatattcactttcccatggaatcaacaaaaagcatgttcatgtccttggccgtcatcctcttcatcgctctcttctccgccaccgcctctgctcagggctccccaacaccggctcccgatggcggagcagccggaacagtttcaagctccgcctccatgatcggggctgcggttgtgatcaccatgcttgccatcttcaagcactgagtcatccgtttctatatacagctttaccgagtgatgtttattgtgagtttggtgtttgtatatatatacagaatatgagggaatttttaaggtattttgtgttatttattgtagctcataggggaaaataagaaggatcttatatgtcttttcctacgtacgtttattcttttcttatattatattggaatcggaatattgttatttgttattttgttcaaaaaaaaaaactttctttttgggaactctgggtttaaaaaaaattag

SEQ ID NO: 97810 - DNA, 1196 bp, Glycine max
  Clone ID: PAT_MRT3847_59336C.1
tacggctgcgagaagacgacagaaggggaagtcaggatggcagaggtgaagcttcatggattttggtatagtccctacactttgagggtggtatggaccttaaagttaaaggatataccatatcaaaacatagaagaagaccgctacaataagagtcttcaacttcttgaatacaacccagtatacaagaaaactccagtgcttgtccataatggaaaacccttatgtgagtccatgcttattgttgaatacattgatgagatttggtcacataattcattacttcctgctgatccctacgagagagctctggcaaggttttgggttaaatatgctgatgatgacatggtaatttttaaaaacttaatcatgtagtactacttaaagtttctagcctttgatcttgatcaagagcacctgcatttatacaattaatattaaatttatctgaactttggcaataattaacttagcataccatcttatattttctcattaattactttatatgctgcaacatttcctattttgatccaagtgataataatatttggggtcaacttttgaagttttctgcagttattgcattcttccttagcaataatgatgaagagcgagaaaagagcatagagaagatatgggagcatctcagggttgttgagaatcagtgttttggtgatcagaagaaattttttgggggagacattattaacattatggacatagcttttgggtccatattcaaaattcttgtggttgcagaagatattcttgacgcgaaggtcctggaagatgagaaattccctcacttgcattcatggtataataatttccgacatgttggtgttattaaagaaaacctcccagaccatgagaaaatggtggcttttgctaagtttattagagaaaaacgtttggcatgtacctaagaaagtaatcttatatgagatcaagtatgaatcactttgtatcaaaatgaatcgttttgttatgcgtgtttctttagtttccactccattattaggatgtcttgacatatctgtgaaagcaataaaagtttaatgggaaaaaaaaaaaaaaaaaaaaaaaaaaaaaaaaaaaagaaaaaaaataaaagaaaaaaaaacaaaataacaacaaataaggttaaaaaagcggagaaaaactgcacaagaatcaattaacataccaaaaga

SEQ ID NO: 97811 - DNA, 229 bp, Glycine max
  Clone ID: PAT_MRT3847_59337C.1
gcaatattggataacatgcatggtctttccttatatatcgatggtggcatttctgattattacagtgaccatgtggatattggatgtttttcagagattcagaaatggatttagtttcatgctcccattcatctcgagtaccggtcacttgagtctcttccatgtggctccatggatcactaccgtagtcgctggtacacatgatcgtgactacctcgcattcgtggcg

SEQ ID NO: 97812 - DNA, 445 bp, Glycine max
  Clone ID: PAT_MRT3847_59338C.1
acgaaaccaaggccttataccatcatcataattaaaaaatattttctacgtttcccacactatgcatacaacagaaatccgtaaaaataaaattaaaaaaccaaaacatacaaagaaggggatcaaaatctaattaaagattagggatttaccccacactatcactggtaaaatttgtgggcttcccaagcactaaaatttcctgtaaaaagcactctcatttttccaatagatagggtatggaactcctttgcatgggacggtacaacttcaggggtttccccattccacagtcgtgtacaaaattcagtattgggggattgaaccatgctaattttaccttaactgaatcttggactgcccttggatatggagttaaataatcctttgcgccaataaggagacaagaaactctataaccagttagatctccttggctaccaac

SEQ ID NO: 97813 - DNA, 308 bp, Glycine max
  Clone ID: PAT_MRT3847_59339C.1
ctactactatgcctgcacgtctacactagatgatcccctcgctgaatcccaattttatattttcaagaaataacgatgcaaaaattgtcatatttaaattttgggtatttgttttcttattactcctatcctgaatccaaatgaaattacatcttaattcctcggtaaattccaattccacattttcaataaataattgaatcaaaaatgttcatatattaattgtaattatttcttttcttattattcctatcctgaatccatatgaaattatatctgaattcctcttataattccaattacacatt

SEQ ID NO: 97814 - DNA, 189 bp, Glycine max
  Clone ID: PAT_MRT3847_5933C.1
gtaagcctactttagtggtttaaattgaaaagcttctactggcataatatcaccatactgatggattgacaaaactgtgcgacttgcaattaaagtagcagattggatttctaagagaaacttagcaagtctaatgttgtgggtggctcctgggacaggcagttatggcacaactcattatgtcggtat

SEQ ID NO: 97815 - DNA, 142 bp, Glycine max
  Clone ID: PAT_MRT3847_59340C.1
tctcttggtagagctcggaccactaagtggggggagatgaaagtatttcctatggccactccaactagggagcaaatagctcaggcggagcaggaggagcttttataagcgtaaccacattaccatgccgggggtagatgct

SEQ ID NO: 97816 - DNA, 514 bp, Glycine max
  Clone ID: PAT_MRT3847_59341C.1
ccaaggtatgaggctttgcatggagaatcgtcgcttattcgatgaccgattttcaagagaaagaagctctggacaccttggatctgttatcaccgattttgtgctatggcgcactccgacgaagagttcgatatggatcgtatcatacgcttcatgatagcgaggagggacactacctacgcggcgctaacgtaggtcttctggctgatttccaagcaccctgaagtggaggaggaggtggttcacgaggttatggagaaatacgcgtcctacacacacgtgtatgatgaggtgaaggacatgggatacacacacgcggtggtgtcctacagcatgaagctgtccccggcggagccgcacgataccaaggaggcggggggagactactctttccctgatgggacataagtgaagagcgggtggagagtggcgtatcatatttacgcgatggagcgctcgctgaagatatcgagggctcattggtgcgagtttaagccagagaggtagctgacta

SEQ ID NO: 97817 - DNA, 600 bp, Glycine max
  Clone ID: PAT_MRT3847_59342C.1
ataatagagcctctgcattataccaacgaacacatattaagcgggcaatacatgtgtcgaacggacaagatgctccctaggaacaaattgcccaaaggaggcaaagaagataaaataatagcaacccctattctcagagatcatagaagtgcacatgaaaaggatgctgccgaagattttcacaatccttgagcgtgaagttacaattctatgtaattcaaaacagtgcatttgaaaccccggacccatcacgaagagatgtctggcatctacatgcaaccttgaaactctgtagaacatcactgatgctcatcaacccatgtcacttcaagtttgatctttgatgagcccactgggcacctcatcataaaagactgtaagacgcggtagggatgacagtttaaagaccacccctgaaggactttttacaagcttacaacaaactgcttgactgaacgacccctttcattgccaacattgtagatcccaacattactaggctgagccttttccaagcttttacatgagcatcagccaggtgaggttcataaatatactggggaacaccagttccctcaaccaacttatagggtgtttctg

SEQ ID NO: 97818 - DNA, 232 bp, Glycine max
  Clone ID: PAT_MRT3847_59343C.1
cgacggatgggtccacgcatgcgtaaaaaaaaagagtacagaggattatggcatttgataacatactcgtagcaacgagagacagagaacaataagctgccgtgacttataattacctagaagactgagtacatactttggagctgacctgtcatcaatacaacgctcgatctgcgtgagccattgatggcatctcatatttggttcagatcatgctttgaaatataacatt

SEQ ID NO: 97819 - DNA, 310 bp, Glycine max
  Clone ID: PAT_MRT3847_59344C.1
cgaggaccaatagtcaaatagcatttccttgtaaaaccaagggtattctaccaaacaattgaactactggtacatgattgtttggaaatatagtgccttcactgatcacagaaaactgttacaatgctatgtgctcaagcacatgctgtacgtgcatgaaatattgagtagcaatataaatctgactatcatgctcttatgaacgaattggaactatggacattcgatcgcaaaggatgactggactcagcctgagacaaggtcataaacgctaacctgcgacagggaagccaagcaatctgatcaacat

SEQ ID NO: 97820 - DNA, 356 bp, Glycine max
  Clone ID: PAT_MRT3847_59345C.1
cttgggaaaaaaatttaaatgggtttcgttgccccgtaaaaaatttagggtccccctacctttcagcccttttccctaaaagggaatcttgcttctgactttaaaaaacaaagtaatcgggggggggtcccaattaattaattctcttcaaaaattaaaacctagtagttataattaagcttctttaattccccgggaaaggggctaaaggggggagacctcgcgggggtccaacactttttcccctcccacattttactttaggggcttggtaatttccctccccaatgggcaatgggagcccccagggcttgaatgagagttaagggtgaggggggccccccactttagcataa

SEQ ID NO: 97821 - DNA, 371 bp, Glycine max
  unsure (1)..(371): unsure at all n locations
  Clone ID: PAT_MRT3847_59346C.1
agnttactggtgganatcnagggccccagaanatgcacttggtggcatatacggngttctgaacnagaagagaggacatgtattcgangagatgnaaaggcctggnacnncgctctacaacatcnaggctttnctcnctgtcatcgagtccnttgggttcncaagccagctgatggctgcaacctctggtcaggcgttacccantgtgtgttnnacnactgggncatgatgggctcggatccttnggangctggctcccangctgccnagctggtgctggatatccgcaagangnnggtctgaaannacagatgatccnctnnatgagtntnaaganaagtctaatcttacgtttnntactgtactggtnt

SEQ ID NO: 97822 - DNA, 1109 bp, Glycine max
  Clone ID: PAT_MRT3847_59347C.1
gtcttctcttctcttctcttctctaggagtgtaattttgttgttgtggttagtgcttccgtgacactcacttgtttgtaacaagtggaggggagtgttataggaacataatttggagggagacatttcagtttcagaaacgttacaaaatatctgttgtgtgtgtgactgtgaaagttaatataactaacaaaatggatacacgaagtgaaatgaggcattcaaagttcaagaggatttgtgtgttctgtgggagtagccccggcaagaagagtacctaccaagatgctgccattgaacttggcaacgaattggtctcaaggaacatcgatctggtgtatggagggggaagcattggtctaatgggtttagtttcacaagctgttcatgatggcggtcgccatgtcatcggagttattcccaagaccctcatgcctcgagagctaactggtgaaacagtgggagaagtaaaagctgttgctgatatgcaccaaaggaaggcagagatggccaagcattcagacgcctttattgccttaccaggtggatatgggactctagaggagcttcttgaagtcataacctgggcacaacttggtattcatgacaagccggtgggattagtaaatgttgatggatactttaattccttgctgtcatttattgacaaagctgtggaagagggatttatcagtccaaatgctcgccacataattgtatcagcacccacagcaaaagagttggtgaagaaattggaggattacgttccctgtcatgagggtgttgcttccaagttgagctggcagatagaacagcagcttgcttaccctcaagattatgacatgtcaaggtagttgggttacttcacatgcacggaacatgagaccatatagaattttggagctggaacgaagttatattttcgactatcgcactattctgcttttatccttttaatttcttgtgtaaattaccaggattgaccttaattaatatgtgatactactttattagttattaccttgtgaaactttgatgctcttgaatttgtaagtaccccccgcttctgaacttactattatcattcaatgccaattaatttttaagtat

SEQ ID NO: 97823 - DNA, 197 bp, Glycine max
  Clone ID: PAT_MRT3847_59348C.1
tggtaatacacttatgccaactttttctgttccacaggctatcgctatatcttctaaaaaggcttaatcctctacatgatctggaatttgtgttttctttcgtttgttcattgggttaactcactaaaggaacttccacatcaccctcttgttgattacgctatgtctattcttacattttccacctctcttttaat

SEQ ID NO: 97824 - DNA, 928 bp, Glycine max
  Clone ID: PAT_MRT3847_59349C.1
caacacacgggtagctgctgctgctaacaatgtgacatttgtgacaccaaacattgctttactccaagcacattttttcaacaagtgcaaaggagtgtacaccacagatttcccttccaaccctcctttcaagttcaactacactggcactccaccaagcaacatctttgtgagtagtggcactaagacagtggtgttgccatacaacaccagtgtggagctggtacttcaggacacaagcattattggagctgagagtcaccctcttcaccttcatggcttcaacttcttcattgttggccaaggaaatgggaactttgaccccaaaaaggaccccataaagttcaaccttgttgaccctgctgaaaggaacactgctggtgtgccatctggagggtgggttgctgttcgctttcttgctgataatccaggtgtttggttcatgcattgccaccttgaagtgcatactagttggggcttgaaaatggcatggatagtccaagatggtaaacggcgcaatcagaagctgccacctccaccttctgatcttccaaaatgttgaaaaaatcgacaaccttaatgtttcgcttttctttgtctatttttggggttagatttggaagtatttgctcctgccttttgttttcaattttgtccacatcttccaattttgggatttctatcctttgtagccaaaaaagaatgtttgggggaattagattgttatggtttgttttagttcttatgtgatcactctagttagaaaaattatgagtgcatgggagagttttatgtaggttacagtattcaattatcttcatactgaattgtaatatatacattctctattctgaaaggactaaagctcctttagtaaagatttgtgtatcttatgcaagttatcataaatttcatttcccttaaactt

SEQ ID NO: 97825 - DNA, 1869 bp, Glycine max
  Clone ID: PAT_MRT3847_5934C.1
ttctcttcggctgcgagaagacgacagaaggggacgctagcaaacagtttctgagtttcttctattttctgttcccaatgtgaatcggatctgtggtgacgaaccctatatgtgacgttaattcaccatgatctgaacacaacgtgggatgcatctcatccgccgcgtggggacctcagggcaataacggaaaggtgaagaaaacattgacttgtgctggctctggtggagttgaagacatgctagtggggtgcctatggttgaatgattatcttgtcactgtttctcttggtgggacaatatctatatttttagcaactgatcttgataaagccccgacaacattttctggacatatgaaaaatgtttcctccttaactattcttagaagtaaccctagggtgctattgtctagcagttatgatggcttaatagttaagtggattcaagggattggatatagtgaaaaactacaaaggaaggaaaattctcaaatcaaatgcttagcagctgtagaagaagagattgttacatctggatttgataataagataaggcgagtttctttacatagggatcagtgtggagatactgaagccattgatataggaagtcaaccaaagggacttgagtgttgcacttctttctcctgaacttgctctagtttcaattgattcaggagttggtcatgttgcgtggtaccaaaattgtgtcaaccataaatcttgggttttattgtgacagcatctgctgtctcacctgatggaagtgaagccattatcggtggacaggatggtaaattgcacatatattctgtttctggtgatactcttgtagaagaggtagtccttgagaaacataggggtgctattagtgtcatacgttattccccagacgtttcgatgtttgcatcaggggatgtcaatcgagaagctgtagtgtgggaccgtgcctcccgagaggtgaagctgaagaacatgttgtaccatactgctaggataaactgcctagcgtggtcccctgatagccataggattgctacaggatcactcgacacatgtgtcatcatatatgaagttgatcagcctgcatctagtagaattaccataaagggtgctcatttaggtggggtttatgggttagcatttactgatgagtatagtttggttagctcaggtgaggatgcttttatccgtgtttggaggataacccctcgttgactgatcaaggtcaatttggaagataagtgaatttgggaaatatttgttggatttcaaatttcttcctttagaaggcttataaaagtcaagactggtgaggatgtgcttatcaccataagttggtcatacacaatcctcttgcaaatttcaagcatcggtttggtggtcactcttgacattggtggtataaagttggggccattttcttgttgccttttataagtagctgctttttgtgagttttgatatctagactatgatggtaccagtgtacatcactatttgtcttggtttgctctggaatctaaaagcaatttatgataccaaagatttttaatagttgtgtcaattgtcaaaaggatcttgtgaacatttcaggggatcaatatagatagttcgagtttttgtgttaaaagtgttgatagattagagaacacagatagtgatttctcctcacccaaacccccccaattctttagaggatacactaaatcagctgcccctgtttgaggccagattgattgtaatgtttctttgtagttggaatgcagttttgtgtgtttgttgtttttccaatgattcaatgtagttaacaatttttttttttttttcaagaattaatgaagacctctgtaatgatctcacgagg

SEQ ID NO: 97826 - DNA, 394 bp, Glycine max
  Clone ID: PAT_MRT3847_59350C.1
tacaactagttaagaaatagtcatatctgaactcatatgattgttaataacagctctaattagcattcaatatatgatgtttaagcaaaattttcagtttcatttcttgcctattttcaaaataagtctggttgcgtgagtttctattgcttaatcatgtcaaattcagagtttgccaaaagaatcatgggccagaggagtcttcaatgatgttgataaccttactgaagagatagtggatgaaatattgaacaagtttctcagagatttcaaagaaggttcactggaaagtaaaggctggcctaagtatctgagtgcctacattgtctctaaagctgctatgaatgcctacactagaatcctttctaagaaatacccttcattctgcatcaat

SEQ ID NO: 97827 - DNA, 401 bp, Glycine max
  Clone ID: PAT_MRT3847_59351C.1
ggacttgacatttttaattcttacaagcccagacaactcactggatttcagacggaaacgtgactaatgccattatgcatcacaattattgaaccgatcggatgccgagggacaggaagtcaactctatgaacaacccttgactgttgccatctccaaccaaagaaatcacattttgaggctccacagaaatcacctggtgacatttacaatggaccgatcccttcttcaaagagccttagtggtccttgttactcgacactcagtacttgttctgtccaagaggatacaaccttccaaacagggttatggatatcatacaaaggctgggcttgccactgaggtacctacctcatctcggtccatgtgataacttgaccatcctgccatgcaatatccctg

SEQ ID NO: 97828 - DNA, 541 bp, Glycine max
  Clone ID: PAT_MRT3847_59352C.1
tttttgaaaaaaaaagaattgtgaatgagtaacattcaagacaagttgactctacagaaatctctctaatctcttctactctcacaatatcattatatacgtgcagaaatcgagtagaatatttgtgagtaaacgcgtcttctgatgacccacttcgtagtggtcttccattcgcaagaaacttgaatgaaatacaaatcaatttccttctttgttgtaattttctacgaaggagtcacgctttcaaatcgacgacaccctctgatcttgacgcgaaccacactagagttcaccccatctgcgccgtccattatctcgcagcattgccttcgtggcgcctttttccacttgtccggcacaaagcgcgacgcataaacgtcgacgtattgaacttccaaagcccgcgcgtactcctcacgcgcgcactccttccccgaaacgtccacggtttttctgtaccaagatcgggtcatgtccccatccacattacgaaccccatccagacaacacgtgcggcctctcgcacgtgtcgacactgacc

SEQ ID NO: 97829 - DNA, 431 bp, Glycine max
  Clone ID: PAT_MRT3847_59353C.1
ccacgttagtttcctggtacctgatgatcctgcattggatcatgaagttaagcaggagcttcttgatttagctcaagctatggaggctggggttgcatatataatggggcacacacatgtgaaggcaaggaaatcatcctcattattgaaaaggcttgtgatcaatgttgggtatgcatttcttcgaacgaattgcaggggtccagctacggctcttaacattcctcacatcagtctcattgaagttggaatgatatattatgtgtagttggtggaagtaatcatagtaggacttacaattaattagtcaagatcaccaacagttcaacaagaacaacaggtgcaaaatttttagttacattttggttcattatttaatgcatgtaaattgtttttgatggtgaggatttctttcaattgaaaattcaaat

SEQ ID NO: 97830 - DNA, 475 bp, Glycine max
  Clone ID: PAT_MRT3847_59354C.1
gcctatgtagtttgttgtaggttggtgtaggtttaagatgtaattggttgttcttaggatttctgttatgtgtttgattagaagtataatagtataatctgctataatagtttgttgaaaaatactaaccagtgcccttggggattgaaaagtacaggaatcaaaagtggaaagtttttattgtgaagtgtaatatttgttctccttcaatcctttgtgatttacattgcaactccttttatataaactttctattgattgattccttaaccactggttagcaagaccatagtgctctaaataaaattagaatttgaatgctctgaattccattcacaattctgctatcaaatggtcagtggtatcaaccaccttgttcttagcttcattaccaagcgctagaatctgtgttttccttcattatggtaggcagacattactggcaaatggtgtcaatttttctgggttacagatg

SEQ ID NO: 97831 - DNA, 557 bp, Glycine max
  Clone ID: PAT_MRT3847_59355C.1
aacatagcactttctttcttatctctgttctgttcgatcattcagaaatacacctacgtctttcattacgttctcaaattggttacttatgtatctctcagacattgaggttcaaaaattagctgaaaggatgctcagatggttaaaagatgctggatatatattctttagagaatcttgtttccaccaatctggagattcaaagagaaaatacaaccctactcactacagggaacccagattttacacaaaggtatttaaagagtgccatatgagcgataatactgggagttcctgtaaatgcattggagcttatgttcgaaacaagaagaaccaaaaccagatttgctggatatggcagaaagttaggtcacaagatgatagggatttccaatgcttctaggatagagttgaatacagctacaagagtattttacggtctgaacggatgtatggcccaggctttgtgagcactggtggacttgaaacaacaaaggaatttgtgacaaaactgggactaaagcctggtcagaaagttctggatgtttggttgtggt

SEQ ID NO: 97832 - DNA, 249 bp, Glycine max
  Clone ID: PAT_MRT3847_59356C.1
ggggaaaaacacgacctaattaaggggtttttaaggtttggctttaatttgcgattttttccacccccacgaaattaaccttcccccaagatgggggttcccataaaggggccccagaaatttcctaaacctattagttttgggctttatgaaggggacttttcgggcaacagccttccaaattttttgggccggatccccctccttagggggggactggaactaaaagaaacttttaacccttgggcc

SEQ ID NO: 97833 - DNA, 916 bp, Glycine max
  Clone ID: PAT_MRT3847_59357C.1
cgagctcggttataaccttcaaggtggaaagaaaaacccacccactatcccaattccaataaataccttcctctctatattttcgcacaataccctctcacccttcaacgatgagttactacaatcagcagcaaccacccgtcggtgttcctcctccccaaggttccattcttaatttattctctcaccgtttttttttgttaagattagattaggtttacactgttacacgttggattttcttgaatttttgtctcacagatttctgattatgatgacgactaggttacctcgagccgcggaaaggacgcgtaccctccgccagggtaccctccacagggaggataccctccgcaggcgtatccagcacaggggtaccctccaccctacgcgcctcctcagtacgctcagcctccgccgcaacaacaccagaattcatctggcccgggttgcttagaaggatggtacgtttctctctctctctctctgtgttataaaatcaaaattgagtgagtgaaggtggttgtggcgactcagatcgattgattgcggttgcaaccatcatctatggtgcgcccgcggccgatcattgattagctgtagttgcgctgtctcactgctttcatctcacgcgcgcacgttactcgaactgaatgtcatctttttttcggtgggccccgccacttgcgggtttatcaagtaacctaataagatatttattattttaagaaaataagcatcgataaatctttattaatttgaaataggaaataatatactacctacgtccgaatatatataatcgtcccgatacacatatgattttttaattaattcacatcttttacgaaaattgattaatttaaccagtgacattaataattttgtaaaaattattcttaaaattatttttaaa

SEQ ID NO: 97834 - DNA, 399 bp, Glycine max
  Clone ID: PAT_MRT3847_59358C.1
gaacacggaaagtttgtgtcaggagcacgtccatttttttctgtgcacagggtctttgcctgttcgaccgccatcttataggctgggcttaaaacttcctttataagtttctgagcggatgttgagactttgtgatgctgggaaagagatttccgcgcacttttataccagaatcaaccctcattaacgatggagcaatagtatgcaacagatctatatgtcttggatttaaatgtaaatggcttgttgcggtgcgattcttagtttaaaaccactgagtggatgaggaacgatttgaaactatgtatgtagatatttgatgacgggatagtaggataaggaggaaaataagaaggaggggggacgaaaaagaagtggaaatgcatgaagaaaaggtaa

SEQ ID NO: 97835 - DNA, 408 bp, Glycine max
  Clone ID: PAT_MRT3847_59359C.1
atggctaagatctcatccagtgaatgcggatgtcaaaagtgtaagtttgccactggagagctgccagccagtcatgaactcgtggtttcagagcatttaattgaggcttgcaagcatgagacaatagcccaaagaaaaagtgagagttttgaggccattgactcctgcacttcccagttgcttcctgtacttcctttttgtcttctagaatgtaaaattacattccgagatacactcccttttttggcttctggaatgacaaatttgaaaggtcaaaaaatattccaaaaagagtgcaggaagcaacagctggattttgagtgggcgtacttgagatttacgttagttttgtatggcactgttgggccactcgtgctggagtcttatgtgcactttgtctctatttga

SEQ ID NO: 97836 - DNA, 731 bp, Glycine max
  Clone ID: PAT_MRT3847_5935C.1
gtgaaaaacaacaaacacacaaaactgcattccaactacaaagaaacattacaatcaatctggccctcaaacaggggcagctgatttagtgtatcctctaaagaattgggggggtttgggtgaggagaaatcactatctgtgttctctaatctatcaacacttttaacacaaaaactcgaactatctatattgatcccctgaaatgttcacaagatccttttgacaattgacacaactattaaaaatctttggtatcataaattgcttttagattccagagcaaaccaagacaaatagtgatgtacactggtaccatcatagtctagatatcaaaactcacaaaaagcagctacttataaaaggcaacaagaaaatggccccaactttataccaccaatgtcaagagtgaccaccaaaccgatgcttgaaatttgcaagaggattgtgtatgaccaacttatggtgataagcacatcctcaccagtcttgacttttagaagccttctaaaggaagaaatttgaaatccaacaaatatttcccaaattgcacatatattctatttctggcgatactcttgtagaagaggctgtccttgagaaacataggggtgctattagtgtcatacgttattccccagacctttcaatgtttgcatcaggggatgtcaatcgagaagctatagtgtgggaccgtgcctcccgagaggtgaagctgaagaacatgttgtac

SEQ ID NO: 97837 - DNA, 257 bp, Glycine max
  unsure (1)..(257): unsure at all n locations
  Clone ID: PAT_MRT3847_59360C.1
cccccacgatcagttgccgcccatttttttttttttttttttctcacaaaaaagcaaacccaggggtaaatgatgattctcccttaaataaaaatctacccaaaatcgcttatnnnaaacacaactatgtttacttttataattaatcatactaatactccttttttttcacgattgcccaaaagaaattcactttcttatgtttnnnncgaataaccaaacacttttttatcccaaaacttacttttcaaaatact

SEQ ID NO: 97838 - DNA, 867 bp, Glycine max
  Clone ID: PAT_MRT3847_59361C.1
ctctgccgctcaatttcccgcgctccgtgtctccctacgtgactcaccggaaatccgactgcgaacgccgccgggaaaggctattctacggcacgccgcagatgaacgctgccgcgtgcgacggcggagcagcgtcggagaaccggagacacggtggaaggttctggatcctctcgaatttattccgagccagatcgaacaagaccgaatcctcgccctctcatcctccgccgtcatggttctcgacaatccttcacgcgcgccggcacaataagtgtcggcacgcggatcgaggattgtcgccgttgacagaggtggagaatttcaccgaattctctgctgacacagcgcaagaccgatcggactcgggaatttcgtcggaggattcgccggcgaagcagaatccgacgccggtgacggggcaccggcgatcgcggatgggacccacaggaaaaggattcacgagcatggcgttttgtctgaatccgttggttcgggcgggtccgaaccggcattggagccatcataataaagggttggcgcaggaacagggcgggggtggggcccaccacatatccaatgcggcgtcgttttgcgcgaaccggtcgcggaagcttgcggatttcggaaggggcgcgcacaaccgttgatttttggctcgcgcgcggggccgtggtacggtggttatgtttttgtccgtttgtgtttgtagattaattattattttaatatttttttctaccgacataaaacataatcatttttcttctctgttttttttctctctatgtacagtcaacacagttcattacagctttcaagagaaaaaaaaaattgttcttttaagaaatgagattgattgggatt

SEQ ID NO: 97839 - DNA, 750 bp, Glycine max
  Clone ID: PAT_MRT3847_59362C.1
gacccacgcgtccgcttggttgacacttggcaggtttaattcgaaagctccgttgctagacgatcacggttgacgccaattgctccctccctccatgagatgagagagaagaaagcctccaaaacttcatcttcaacctctccatgtgctcaacttcgcgacgcataccacaattgcttcaacaggtggtacgccgagaaattcatgaagggtcactgggacaaacaagaatgcgtttccgagtggcaaaaatacagagcctgtctttctgaacatttggaagataagcatctgattcgtttcttacaagctgacggcgttgttcaagacagtggtgttgcttctcagtaacttgtagggagtaaggtaactaactacgaagcttattcatgtgacgaccactgttgatgtggtatttgaagttacgctgcctgtacgttgtatctttgtttgaacagtgcaagctttgtatttccgtcagaaatcttggtggttttaaatcatggtctattgcaatgggttgaaatgaacatttggtgagggtgaattatggtaacttggcaagtgacaattttttaatgccatctttcaagaaattctaaaggaaaaaagaatgttaaaaaaaaacgccagtgaagagatttccaggacgaaggtgaagtttaaacgtcctctctaaaaaacaaaggtttaattagtctggggtctctaaactcttacaaatttacaaataagtccctgatttttttc

SEQ ID NO: 97840 - DNA, 593 bp, Glycine max
  unsure (1)..(593): unsure at all n locations
  Clone ID: PAT_MRT3847_59363C.1
gaaaaacactcagcttccaacattttcaagatgaaataaaaaatatttcaaagaatacaatgcagtactttgatttctgattctgacattttgacattaccttaattgttaaccactatcacaagtaaaaggaaacattatatgaacaacaatccctccctaccctccatatttaaaattggtttcaacaatgcaaacatgggggggaaaatggtccgtagacatattactaagccaaaaacttgttactgaaacattcttcaataacagagtcctaagaggaaaccattcaatttttctgcagcaattcatgcatcttaagactaacaatcatacaaagtgagaaagaatgtactcgccaggaatggtcaagcttttataccacaaaaatcctccaaatcaaaagctcttcatatccatattttcattcactaactttagtagccaataactccatatcttccttatccttctcttgccccaacctcaactgctctgctccttgtctccacccatcctccaacaactcgtcgaacatatcctttatccggagcagaggatcgcggtcaatcaactcatcgnctctgtacgct

SEQ ID NO: 97841 - DNA, 530 bp, Glycine max
  Clone ID: PAT_MRT3847_59364C.1
caacccattgcaatagaccatgatttaaaaccaccaagatttctgacggaaatacaaagcttgcactgttcaaacaaagatacaacgtacaggcagcgtaacttcaaataccacatcaacaggggtcgtcacatgaataagcttcgtagttagttaccttactccctacaagttactgagaagcaacaccactgtcttgaacaacgccgtcagcttgtaagaaacgaatcagatgcttatcttccaaatgttcctgccaaatgttacagagcaattttcacaaaacgcaagcatgtaagtaactgtgtaagtaaggacatacagaaagacaggctctgtatttttgccactcggaaacgcattcttgtttgtcccagtgacccttcatgaatttctcggcgtaccacctgttgaagcaattgtggtatgcgtcgcgaagttgagcacatggagaggttgaagatgaagttttggaggctttcttctctctcatctcatggagggagggagcaattggcgcggacgcgtgg

SEQ ID NO: 97842 - DNA, 647 bp, Glycine max
  Clone ID: PAT_MRT3847_59365C.1
gggaaaacactcaaatcccaacatactattattgacagtttaagtacaacctatttatatgaacgttattcttcaaacatgttgaaggagccagaaggacatttcccacaaaaatcttcgcctccatctattaagaacaacatataacactcaatctatacgtcaatgtctccaatcagattatgtacagtcagaaactagcatcactctttgagatgctactaatgttacatcaagttcgctgcaactcaggaacttgcatttgaagaaactttcactttctttcactcttcaccaactttaatggcactgtgactttgtgaattatcttggtccagaaagttccattgcttgggcaagtaatgaagagtcatcagtgagatcggagtagcgctccgaaaatgaaagttcattgcctctacttcttgtggattcagcactctgtgaggcctcccatttttctgcaagaccatttccttcaagcattctaaccacttcagacatctttggtctgtggcttggaaggtattgagtacataaaagagccacttgaactatttcatcaagcttttttttatggtacaggttcactcaagttattataagagatatccagaaaggcaagctgagtcatgttagccaaagag

SEQ ID NO: 97843 - DNA, 305 bp, Glycine max
  Clone ID: PAT_MRT3847_59366C.1
gtctatttttgttcagatctcactcgcattcgctatgtggacgaagtaccttttcctgggagcgagatactcccatctggtctccggggcatggatagaccgcatacgtctgttgtgggacgagcacaaagagaaattactgcaccgctggaacgtgactgaggatctgacgcggttaaagtgcttcgctcataacgtggcccagatcaacaccttcaacgcacagtaggaggacagcgcgcagtactggctgaacaagttcgctcatctgtgccacgatgagttctgacgccagtacaccgggc

SEQ ID NO: 97844 - DNA, 566 bp, Glycine max
  Clone ID: PAT_MRT3847_59367C.1
ggtgggaggtcttggattgttgttggtttggctgaagtattttctaatcttctaagaatgttactaacatcaaatttgttattggtaataaaatccttttgtttaggttttacttccaatgttttcttgagcttttctagaaaatttttcttttcctgggggtcaggtatagaattaattgcttcaaacatgaggtcttgttctcttgttaaagtattgatttttctttcatcctctgtagatgacaattgatcatcttgttgaattagattgagattttcatcagagatcatggaggatgaagtttttgtttcttcttcctccgaactttctatgagcaaattattaatttgctcttcaatggctggttctaaattaagatttcttaattttctttttaacctataatatttgctaatgtgaccttgttttccacagttatagcatgttactttagattttagtttttggtttggggtttctatttctttactaattgaaggcttgtgccagtatctccttcctggaaatatctttttggtaaccaccttattttatggcctttt

SEQ ID NO: 97845 - DNA, 298 bp, Glycine max
  unsure (1)..(298): unsure at all n locations
  Clone ID: PAT_MRT3847_59368C.1
tccacgtaaatacaacacaanaaacgtacgttttataaattcacaggtaaaaatcatcacttcaaattaatctatatctagaaagattcataggtagctatagagagagaaacagatgtcatggatcgtttgcaaagatctgaagtgtctttcacgagacagggttcatcaagtcttgtttgggacgacaagttattgtcaggggaatttaacaaagtgaacaacaaccaataccaaaatggtggtggttctggtggtcaccttaaccttaaagttataactacaccacccaacacca

SEQ ID NO: 97846 - DNA, 419 bp, Glycine max
  Clone ID: PAT_MRT3847_59369C.1
aaaaaaaccgggaaataaaaaaattcccttaaagctaaggggaatttttttacagggggaaacatgaacccctttttttttttaacaaaagggggggggtcttttcctttttttttttccctttaaggggggacgggggggaaccccctcagggggtttaacggggaacctagccgtggcggcccaataattataaaccttttggttagccctaccccacataagctgggggttttggggcaagttcaattcgaacaacgttggttcctcccaccaatactttttatcctcggtggtggtacagtttttaaaattttttggtgacctccccgggacggggcccccccccccttttatttgaaattccttttagggggcaacaaagggggcggggttccaattttttttcacaccacccc

SEQ ID NO: 97847 - DNA, 311 bp, Glycine max
  Clone ID: PAT_MRT3847_5936C.1
gaccaggaaaatcaaatgccctctactgggtttgtcgttggcattgtaccgttaccatctaaaacaaacacgtccttatctctttcacatgctcgaaccaaactgacattttcataggcacaaggacaacacaaatgaacatcctcgctcccacttttgaggccccgagaccggggggaatggccctccccgaagggatatgaggcctgctccccaaacaaggatgccgggaactgcggtcaagtctcttcacttattggctctaagagcgggacctgcacaaagacgggttttgagccggtttcgcacga

SEQ ID NO: 97848 - DNA, 408 bp, Glycine max
  unsure (1)..(408): unsure at all n locations
  Clone ID: PAT_MRT3847_59370C.1
ggaagctttgctcaaccagaagacagagtttctatcaggaaatgctgatctctgtggtaagcctttgaagattctttgcactgttccctctactatgtcctctgctccacccaacgtcaccacantcttcanccagccattgcagnccataccccaaaaacaattggactcannaccccttcaacanaactcaacagggaaccaccaccagtntctcangaatgggtctcacaaagtggggcctaaaaccnntgccaccatagcnnagcgattgtggtagggaangacttaggctggcattggccnncttttggcnncctgatncnngttctctttcattctaaccaacccagnaggaaaggaaaaaggattatcccaaaattcccaaaaacctaccaccaccttaat

SEQ ID NO: 97849 - DNA, 554 bp, Glycine max
  Clone ID: PAT_MRT3847_59371C.1
ccccaccccccccccccccccccccccctttttttttttttttttttttttttttttttttttttttttttttttttttttttttttttggggccaaaagggaaaaggccctaaaattaatcccaaaaaacaaaaaaaaggggccccaaggccaattaaaacgggacaaaaaaaacaattcaaaatttccaaggcaggaaaaaacccttaaacaacccaaccccccaaaaaatttcccccttttgaaggggccaaaggggcccccaaaaaaatttagggggcactttaaaaaaaaacaccccccgggaggttttccaaaaccccccttgggacccaaaaaagggggggaaaacccccacccaaaaaatgggttaaaaaaaagcaaaaaaaaaggccctggaatttgggggggagggtccaacccgggaaacaggggacccccccttgaaaaacccttgaccaaaatgggggggccccctttaaaagaaaagggttttaaagaaattggtgacaaaaaaatttggagttctaaaatcaaaaattgctaaaatggg

SEQ ID NO: 97850 - DNA, 263 bp, Glycine max
  Clone ID: PAT_MRT3847_59372C.1
ctaaagcccatgtcgaagccccatcgctgggtcaatagtacttgccgcagtactcttaaaacaaggcggctatggtataatacgcctcacactcattctcaaccccctgacaaaacacatagcctaccccttccttgtactatccctatgaggcataattataacaagctccatctgcctacgacaaacagacctaaaatcgctcattgcatactcttcaatcagccacatagccctcgtagtaacagccattctcatcaaac

SEQ ID NO: 97851 - DNA, 126 bp, Glycine max
  Clone ID: PAT_MRT3847_59373C.1
gatgaaccgactggctccagttcctcatcctcatgacgctgcccctacccctggtgtgacagctgctgttagacagtcggatccgcgcagggtcgtggatcctggtgcgccagacttgagagtgca

SEQ ID NO: 97852 - DNA, 381 bp, Glycine max
  Clone ID: PAT_MRT3847_59374C.1
gaggcgaatgcaattacagaagaaccaacagaattttcatttcctcatttaacctcactgaatctgcatatgttgccacaactcagttgcttttatcctggaagatttacgctggaatgcccagccttaaatcatttagaggtgttgtcttgtgataacttggagaaatttcaaaaccaacaagaggcacaatgttctacttcagttactaagctaccccttttctccgaaggaaagactattttcattctggagtcattgaagctctattgggaaattgcaaggatgctatgcaacaaaaaatttctgaaggacatgcttcataaattagttgaacttgagctggattttaatgatgtcagagaggtaccaaatttcgtg

SEQ ID NO: 97853 - DNA, 473 bp, Glycine max
  Clone ID: PAT_MRT3847_59375C.1
tgattcgacttagcctactggataggcctcgaccgaaaacaaattattcctattcattttgaacattcatgcctccttatttcttgaaaatggggaattggaatcccccaatggatttcgaactcatttgctttgccttcatgatgggcctactaagaaaacaaataaatccgcctcatatgtgagcattttggcctccttattaatcgaaaatgcggcatgggatttcccagatggattcccatcttgtggactaaggctactagccttgtcccattagataacaaaaacagccaactcatatatggacatttttgcctacccatcccttgaaaacgtggaatagcaattgcccttagggaaactctttagtaaacctccttgcattgccgcttgggcctccttcacgagggactaccccagcggccttttacaacgaaagactgggacttcacttgcgaaacccaaacaaa

SEQ ID NO: 97854 - DNA, 410 bp, Glycine max
  unsure (1)..(410): unsure at all n locations
  Clone ID: PAT_MRT3847_59376C.1
tgagtctcacaatgtcataatcgtaggaaaaagaagcaaagaaggaagcttttagaaaatatctggaaacaagtggagctgtcgactctctcacgggaggtgatattttgctttggcaagaggattgctaaatctaacactcaaagtgatattcctttgttgccgttgttgctgaagttctggtttctttgtacgagcaaaacgacaagccttcttctgccgtcgagttcattcaacagaaattaagctgtccttccatctcataatatgaaaagttgcaagccgaattctccgatctgcaaatcaaatacaatgacctcttagctgcacaccagaaaacctgcagagagttagaacaaatgaaaaactcgcatgccttggcaacngcatctaccaaaggaacaactgat

SEQ ID NO: 97855 - DNA, 515 bp, Glycine max
  Clone ID: PAT_MRT3847_59377C.1
accagcttcgattctgttttgttgatgtctaatggggaaatcatacaagctgctccttatcatcatctgttgagctcaagccaagaatttcaggaccttgtcaatgctcacaaggaaactgctggttctaataggcttgtggatgtctcttcttccaaaggagactcaaatactgccacagagattagtaaaatatacatggacaaacagtttgaaacatcacaagaaggtcaattaattaagaaggaagagaaagagaaaggaaacaaagggttcaaacctcacttacagtatctgaatcaggacaaaggatatatatacttctatgtggcttctctttctcaccttatatttgtgattggccagatatttcagaacttatggatggcttctaatgttgacaatccttatgtcagcacattgcaattgatttttgtgtacttgttgatagggtttatttctgcatgtctcttgttcatcagatgtcttgttgtagtttctatgagtattcgatc

SEQ ID NO: 97856 - DNA, 570 bp, Glycine max
  unsure (1)..(570): unsure at all n locations
  Clone ID: PAT_MRT3847_59378C.1
caaagccctggaacggcacatcggtgatgcccaccagcccgaagtggccgttctcgccgtcgagcatgcgcccggtcaccggctggtccagatactggaaccaatgcacaccgacgatcgacggctcggccatggcctgtttgaggaagttgccgtacgccgcgccgcggtcttcttcccgggccagttgagtgacgccgggccagaacgggtcgcgtccagccgagccaaagttgaactcggtgatcagtaccgggttgtccagcgcgcgcaaggcagcgaagtcataaccgtcctgaggcttgagggtgtacatattgaagctcatcacatcgcaatactgggcgcaggacgccaccgattcaggcgtgctgacggcataccggccacccagcaacaattggttgggtgcgtgccatttcagcgaatcggagatggtcttgaagtaggcatcggcgaaggtctgctggaagtatttaaagccagcttcnattcccgggtgctcggggttcgggatcggcggttcgaaccgcgggggttgcatcacctgccagtcggacaagggaatac

SEQ ID NO: 97857 - DNA, 262 bp, Glycine max
  unsure (1)..(262): unsure at all n locations
  Clone ID: PAT_MRT3847_59379C.1
agcgactcactgaccaaggcatggtgatgagcaccaagctctatgtacctagccggtgcgggtgtctgaaagccttataggcagacctaggcttcggcaaatgtaaggaaaccgaggtggaagaagaagaccctgagctcgggacatgcagacaccaatgctctcagtcacagcaatacactgagggtgacaagctggtatgcttgcaaagatgtcgcnaacatgattcatggtctgacgcatgacctagagagacacatcc

SEQ ID NO: 97858 - DNA, 279 bp, Glycine max
  Clone ID: PAT_MRT3847_5937C.1
aattcccgctggacgccacgcatcctgttacctcacaatgagctctataattaaactcctagatcaaaaaaagagcgttcaattaaactcagaggcccgtaaaagcaatcattactacactgaatataattcctatacacctaatttgaacaccatagcatatcaaatctcatctactcataaccatcaattaccatgaataagaactttcaaaaacatatctctcaattatacaactaatgcaaatacaaacttaactatcatacacactcattacat

SEQ ID NO: 97859 - DNA, 357 bp, Glycine max
  Clone ID: PAT_MRT3847_59380C.1
cttcgtagtttgatgatggcttccacacacaagcacacaacaattggatgatccccgtgtcctgtttctgcgtttcaacttcttcctttcaggagcaatttgcagccgagccaggaaagcgaggagcattattctgaatcgaagattaaagaggttaaggatgcaatcgagcccttatctggacgaagcttgaagtactgcactgataattgtctgaggagatatctggaagctcgtaattggaatgcggacaagtcgaagaagatgttggaggacacactcaagtggagatcaacgtataagcctgaggatattcgctgggatgaggttgccatggaaggagcaacagggaagttg

SEQ ID NO: 97860 - DNA, 1411 bp, Glycine max
  unsure (1)..(1411): unsure at all n locations
  Clone ID: PAT_MRT3847_59381C.1
acggctgcgagaagacgacagaagggcacctaccacgtgcctacatgcattgcacatacatacaatatatatatagagcaccccataaggcactgcacccactaccggcttaataatttctccttgctacttcaattctgattgcaataacaacaacacctccaccttccaacatgggcggtatcagccttgaggaaatcaaaaacgaaaacgtcgatctggaaaaaattccagtagaggaagtgttcgagtcgctgaaatgttcaacagcaggtctaacatcagacgaaggagccaacaggcttcaagtttttggaccaaacaaattggaagagaaaaaggagagcaaacttttgaagtttttgggtttcatgtggaaccccttatcatgggtcatggaagctgctgctataatggccattgctttggccaatggtggaggaaggcctccggattggcaagattttgttggtatcattgctctcttgttcattaactccacaatcagtttcattgaagaaaataatgctggtaatgctgctgctgcacttatggctggtttagctcccaagactaaggttcttagagatgggagatggactgaacaagatgctgcaattttggtcccgggagacataatcagcatcaaactgggagatatcattcctgctgatgcccgtcttctggagggtgatgctctgagtgttgatcagtctgctctgactggtgaatctcttccagtgacaaagaatccctctgaagaagtgttttctggatcaaccgttaagaagggtgagatagaagcagtggtgattgccactggagtgcacaccttttttggcaaagctgctcatctggttgatagcaccaaccaagttggtcacttccagaaagtgcttacagcaattggtaacttctgcatttgctccatcgcggttggaataatcattgagctcatagtcatgtacccaatacagcaccgcaagtacagagatgggattgacaatctgttggttctcttgattggaggaattccaattgccatgccaactgttctgtctgtcactatggctattggttcgcacaggctttcgcagcaaggcgctattacgaaacgtatgacagctattgaggaaatggcaggaatggatgtcctctgcagtgacaaaactggaactctgaccctggctcagtggattgatatatacatatatatattttctctctaccattcttcttcttccctctctttctctctctcattccacagaaaataaataatcagtgagcaatttcattnttgcatttttgcatcctttattcttcccaactccagacaacaaaacataaatcctttattttcttcgggtaagcttacactaattacaccaaccatgctttgagttttttc

SEQ ID NO: 97861 - DNA, 410 bp, Glycine max
  Clone ID: PAT_MRT3847_59382C.1
ggaaccctaagcctatggttggctataaattaaatcgggataaaacaaatttttctaaaaatcagatacccagatttttcccgggttgggccggtttttccaagggttctgggaaaaattatgggagtttaaaagggttttaaagggcagggggtaaagggttaattccaaatccggggaataaccattggcccaaaaattagtaatacccccccatacgggcaacacaacaataaaaaatttgaaagcacaggttgggtatccaacttattttgggaatcaggtttaaagcccgcccatttaaaatttttgaaaggcgcgttattttcccaaaaatccacgtccctaaaaaaaataaaaactttttctataccctttactttaaccacattcggcccataaggaatttt

SEQ ID NO: 97862 - DNA, 464 bp, Glycine max
  Clone ID: PAT_MRT3847_59383C.1
gtgtttatggttgttgatttagttaataaataattgtgttaaaaacaattcaatgtaaaataaagaaattaagttaataaaatctttatacctccttcaaattgtgcgttttcttcaattatagagttgttatttcggttggcttcattagagcttttaattgattgtccttttgcttgtgattgaccattgctttgaatgatattcaactttttacgctttcacatagtatgttaaataaatcagtccaaataataaaataaaaattagatatagctacattattggttatgaatttcttaatcaccatgccaaaaataaaagaaaaataaagtagtaataagtggtgtgactgaaatgcgaatttagattgcttttaagcttctttttctcaccaatctccaattaccaaaaatcaaacaactaaggaaacaaccaaataaatttcgatagaaaaacaagca

SEQ ID NO: 97863 - DNA, 475 bp, Glycine max
  Clone ID: PAT_MRT3847_59384C.1
cgacaccacgcgtgcgggttgttagaatagcttcaatccaaccacgtgcatcatcttcaatttcccaacccaacccgactttttcatcatctgaatcaaatgcaaactcacaattcaacaaatctttgctctcatggaaccgactcaagcctccctcaaccaaatgcaacttccccaaactccgccacaagtggaagcaataccaaggaatcaaccactgggaaggcttgctggatcctcttgacgatgacctacgctgggaaatcctaagatatggccactttgtggatgctacatatagctcctttgactttgacccttcttctcttacctatgccacatgtctttactcgaagaaatcgctattgaacaagtgcgggttgggaaactatggataccgattgactaaatatctacatgtcacgtgtgggattcacatgccaacatggataaataaatgttttaaacaagcctg

SEQ ID NO: 97864 - DNA, 395 bp, Glycine max
  Clone ID: PAT_MRT3847_59385C.1
gtgagtctgatagtgacatgttggattcttgtctgttacacctgctagtaaaacataacctacacttgctctaatgagatccaccaataatgctaggcgcctacgacccaaactacgttgttgacaacggtcctggttctactccgagacaacctccattccatatacctagactgatgctcctcatccttgttacatggtcaaacgacgatcaatgcgtgcatgcagaagaatcctatcatgactgtttgactggactgcggacacataataacactaggcgacccttccgaatatgctgtcttgtatgaagtatcgtgcagaggacgagacacttgtgaacaagctctacgattagaccagatttagggtagcgttgtgacatgcatactggg

SEQ ID NO: 97865 - DNA, 109 bp, Glycine max
  unsure (1)..(109): unsure at all n locations
  Clone ID: PAT_MRT3847_59386C.1
ctcgagcnacnataccaagnnctgaagcaatntgcaatattcatgcaataangccatggcctatggccaaaggagancagattaacacttgcacgggcaancacacagc

SEQ ID NO: 97866 - DNA, 292 bp, Glycine max
  Clone ID: PAT_MRT3847_59387C.1
tctttcttcgttcggaggacacatgggtcacatgatactggggaactaggtgacgatgcgaacgaatgtgttggatatcaacagcactaccagcgctaagggtgtcatcagaaccagccttaacatcattggaggagacgcggacaccgttactgttatagactcccacatctccatccagctaattagtgtcaccctggtgtgagaacatgggaacggatacgccggaaagagctccaaccgaacaagacaagtgtcattaccaacctcgggaagcagcaaatatgcatac

SEQ ID NO: 97867 - DNA, 446 bp, Glycine max
  Clone ID: PAT_MRT3847_59388C.1
cggctcgaggataaaactactctcatcagagagtgcagcagaagcagaagatggagactctgaaagctgcaattccagaaaacctgaagcgagcgataggggatagcgatgtcgatgaccttcgcagcacatgctcttctcttcaccgcttctttctccacttccacccatttcaccagatgatcactgaactcgcagatccaaagtatgctctgtgcgccaagaacaaggacgctgcgttgaaatccaggctgcttggtaatcagtgcttctccaacgcagattatgctaaggccttggactgctacactcaggcattgcgcgaggctccattagacaccgccagtgatatggagagtaatcttgttgttgcaacattatatatcaatcgggctactgtattgcataaaatgagtcttatagtagaatgcttacgagattgcact

SEQ ID NO: 97868 - DNA, 504 bp, Glycine max
  Clone ID: PAT_MRT3847_59389C.1
aaatttctatttttgcaatcaaacacactttttgttaatgcaaaacattctttcctaaacacgcctgttggaaaatgtgaataactgccaaaaaaccccttccatacacactgggggtatgaaaaacaatggcttcgttttttggggataatccgtagttatactggtgccccaaccaagaaatgcgattgattgagcgtaccatagccggggtaaatgtgatgcaaaatacctggcaatatgaggtggacttgcctattggcgaatgctccatccccgaggttaagtgaccacgaaagctgggcactggggaaagcgtgactatcaagctaacggctaagaccgccaggcgaccaactgaagggttgaacctttcagaggacttatatttattatggcaatttacccgcatgattaggtttataaagtgctcggggtgcggcgcttacaaaccgggatataccctgccggtgcacaagtaatgggaggggaactgtcacaaaa

SEQ ID NO: 97869 - DNA, 387 bp, Glycine max
  Clone ID: PAT_MRT3847_5938C.1
caggatgtaactcctggtgtgtacagaatcaaacattcctgtgctgcgaagggcttgccaggatcaatacattactttactggctcatctagtgcatccgcagtagcatattaaaggggggcatactgaatgattaaacgtgcttaatggatacaacaccattactactctcttgaggataatcgtactgaacttgtgcagaatacattaaaagtaaatgcaggatgatctctccggaaaatttgaaaggcgaaaaatcgccgggcggtcctcgactggtaacctcgtagacccggaaaatacttacctaccggtgcctgcagacatcccagatttgcctatagtgaggcgcattagagctcggccaaatcatattcatcactgaca

SEQ ID NO: 97870 - DNA, 1205 bp, Glycine max
  Clone ID: PAT_MRT3847_59390C.1
ggcttttggtaatgatatgaaatctgcaaccattcaggtcaaattaaaattagtttgaaccaaattatgaaatctgggagacaaaccgggtaccaatttatgttctccaatcgttctaacttaaccacgaacatgtagtgaaagtaagcttggaattatcagttctctattgcagccagacccagagcaagcgtggatgttgcggaagtactagttatgaagtcccacattgctgagaagagaaaacaatgacctgatgttttattataaaatgcaactctggagtgtgaacaactcatacctttctcggccttttggctaagatcaagtgtagtatctgttcttatcagtttaatatctgatatgtgggccattggtccacacgatattaaattacttttttaatggggagagaccaacacagtagcttgctattgggtctctcgcgtgtcgtccatgcgttgcactatagcttgggcctggcacaccctattgggagttaaaaaatttagttagtcctgggtatccgacactaatgtgaacctgttatttttataccttgtccagacaaaagacagcggaacaacctaattttctcagtttaatttttgacttccagaagagaaattaaacagagttaaggtaggtaatatatatttatatacatatatatatgtaagtttattctcgcgtgtgggttcatggaaaatggaagaattgctattagtatgtggagcactcctgagtagcgatgaagagttcatgaatacggttagaataacatgatatagaattagcagctattgatcagtcgagaaagtaatgtattatcagtggcgttaacttcataatgaaggtgagttttgcctgatgttttgattcttttctttttaaagttaaggaaaagtagatagtttgttacttttgagaccgatatacgtgtctatgcatgtaacaacaaaattggaactactcaagcaagggattaaacgtgtgcagctactcattaaatagaataagggagcatataaagaaacatcccccagcattttgtagaggtgggattcagactgactttggttgtattttaatctggggatgtgtataattgttagtcacagtttctctcgttggtatatgcacatccattgatgctgtttatcctattttctttggtttgtcttgagtttatttgcagtatatag

SEQ ID NO: 97871 - DNA, 460 bp, Glycine max
  Clone ID: PAT_MRT3847_59391C.1
ggatgaacattttcatactttacggagaaagaagatatagtagtactctaggactaataggataaataggatgacagtcacaagtataaatatgctgaacaacattagcctggaagaaaatacctaattaaatacaaataactaattagttagggaatgctggtaattacgtatctacagcaataagagcgcggtaactttctcccctgattaggacaggctatgaaggatcaaacaatgtcttgcaccagctaagatgagacgctttgatattgagttatatcataactgtgaacatcgatatgtattatgcacgccagcattcatcatgcatgaccacacgtgtaatgcaagtaaaagcattactgcaggatggagagcgcatggcctatgactgtcataccaggagagaaaacgcttttatatctacactaatatggacgaagggattgtgtgaaag

SEQ ID NO: 97872 - DNA, 804 bp, Glycine max
  Clone ID: PAT_MRT3847_59392C.1
ggagtaggaatagttttctgaaaataacctgaagtgcaattgaaattcaaggggaacaattgtcaatgagaaatcgaggcaaaaggaacaaaatttccaccttttgtcagtgatgaaggaagtgattataaaaccaaaaagctaaggctgtttctcactgcctttttcttttctcctttgttcaaaaaattatgagagtccatggtgctgaaaatttgagaaaacagaagctgatgatgagtgatgacgtctctgtgcacgcccattttagcacaggttcttttctagagcagaacacagcttttgtgcccaacacaacactggagaaaaatgtttctgctaaaacttattttgtttggacttcctaacctgtcggccgtgggcgttgccaactcctacgacaacaaggaacacccatgttgacattttgacattttcctctcttcatgtctgagatgcagacactgtttcctcctttggcttccacggcgagcccttggtgacccggctgcatcgtcgaggccacgcaccacgagaggactatggagaccagcgtactcgtcatctctctttgcggctccgagtacttcccttccgcccacctttgccccttcccgattttcagatctgtgttttttctctcaagtctgggtttgttgattggtttgttcaattttgcgatgttggttcatggatatggtaccagaggatatattggagaaggtggctgtaaccaagctgaaattggacaaggatcgcaaggcaaagggtcgtgtcgccaccgacaaggagaagggtaccaag

SEQ ID NO: 97873 - DNA, 369 bp, Glycine max
  Clone ID: PAT_MRT3847_59393C.1
atgggggaaaaaaaccctgcgactttattttataaaactggagatccactaaacttacttttaggtcccgggctttgaaaccgcataaaggtaaattccataatcaatacctaacaacccaaggggaaaatactaaagactgggtagctaaaaactcagttggatgccccccaggcctgatgggcctagcaaattttttttttatgatacaaaccagcggacgatccagggtcattggtctcattcacaggcgggtttgggaccaaagccgctccagccaatgatccagggccatcggtctcattcacagggtgggtggggctcaaagctgcccaagcatatggcaaaagcttggaaggccaaaagggg

SEQ ID NO: 97874 - DNA, 219 bp, Glycine max
  Clone ID: PAT_MRT3847_59394C.1
aatggtgcatctttaattagcttaaatgcagaatttttattagtagaatttttcacatagaataccccagagaagggggactaccagaaagaacggagccttttcaggttcaacccttcccaccataataataacccatttccaacgaaatggtcggtggctattccggataccaaagtgccaaggaccaaggggggtggataacggatatagcggaat

SEQ ID NO: 97875 - DNA, 358 bp, Glycine max
  Clone ID: PAT_MRT3847_59395C.1
cggctcgagattaaacaaccgaaactccttattaaacatagttttacctcctcggagcttataggggcggctgcttttaaaagctttggccccacctacgcaacaactctactcactcactatcgattcaaactgctccttgtaacaaaccacacagaacacactgcttcgaaacgaccactctcccatcgcctcctcttccatcaaaatccctcttccttccatttccaaacaccctacctttcctctgcgaaccaggcactctcacatccccaacgccacaaactccattgcgcaacttattaacacactcacctctcactcctacaagttgactccctccttgatacacaaatcg

SEQ ID NO: 97876 - DNA, 247 bp, Glycine max
  unsure (1)..(247): unsure at all n locations
  Clone ID: PAT_MRT3847_59396C.1
atcacaatctgctaactttctaaattgcaaagngggaacacctttcttggacacggccgtgaaccttatttaaggggataaaagagtactttctagttcttaaaagcaaaagggagatggaacaccaaatattggaaacttttcttgtggataaggaactcccttgtcatttggcttgcggtgggaaaaatgaaaaatgggttgttatcacctaggaggacggcactgtttagtttatggacaaggg

SEQ ID NO: 97877 - DNA, 704 bp, Glycine max
  unsure (1)..(704): unsure at all n locations
  Clone ID: PAT_MRT3847_59397C.1
cggacgcgtgggtttaaccaaatggggtatttctatttgaaatataccaaatgaggatattttttaattaatcctcaaataagagtaagtggtaggaagttttatgacatgtggatataaaatcgtaaaaaaaattcatgatttcgatttttttttatagagaaattgtaaaaaaatttaactattttaattatttatataaaatcaaaattttcatgacttgattattttttttaaattgatttgaatgactttaattataaataaggattaagaataaaaaataaaagttgttagattataaaagaattagtcgttttaattataattattgtttaaaaaactttaagtcgtaaattataaaaaaatattaattataattatttttaattttaaaagaattaaataataaaatataaattataattaaaatgactttaaagtcattcaaaattaaattttttaaaaaattaatcacgacaactttaaagttgtgaaaaattgacaattttatataaataattttttaaaaaaactaaagtcgttagatttcttaagagttcattattaaaaaaaaaatanaaatcaaaggcatgaatttttttactacttcatacctaanagtcataaaaaatcttactactccctagtttagggattaattcaaaaaatattttgatttcataaatttcaatggaattacc

SEQ ID NO: 97878 - DNA, 435 bp, Glycine max
  Clone ID: PAT_MRT3847_59398C.1
aattcggcacgagaaaaggtttgattgctaaaggagtcactttttgctgtggtgaaatgatgaattggttttattatttttcatggttgatgaatcatgttatcaaatatcattggaaattttttcagcagccggcagtcttttggagataaaactggttttggtatttacttgtgttatgttttatatatacctcaagttattcagtcatcttttgaatctcattatgtacctgacatgaaatgattgtcatgattgtctaaatgctttgttgatagtggtgctgttggacatggctctattagcttgcataagttactttctgtttgttgtcaattgtgaccttgcgtttatttcccttctttctttaatctgattttatagtgcttttgtttgaacacgtgggtttctgaagacctctacatataatgctca

SEQ ID NO: 97879 - DNA, 242 bp, Glycine max
  Clone ID: PAT_MRT3847_59399C.1
caattgagtgatcagtcatggggaaagccgtattcgaatactaaacgcgactcacatcggtggatgatcgtctgatcctatccgaaccttcatctgaggtggatctgttaatcggaaagatcaactacactttgtgccggaccttactatttgatctcattcccacccaacacaacaactccggcgagccctcctgctgcctgaccgagcctgacaagaataagggccccaaatctaaatcc

SEQ ID NO: 97880 - DNA, 382 bp, Glycine max
  Clone ID: PAT_MRT3847_5939C.1
tgtattctgtacgtgtacttgtacaagttactacatatagttgaataatgatgctggcagaacagtgacttggtcttaaaaccaatttttttatgaagtggcaccagggccacacactttgctcaacttgcaaaacaagggtacacaatcaacgcccaattttccgggaggaagtcggtgatataaggagattggcattagataagatagccgaatcacttgaactgccttgcagatacatttctcttgggggggcccagatatttcccctttacagcaaaattaaacctggggctatttgtaactttacaacatacaaatgcccctatgccgggtgcacaacggtatggggagggggatacccccagccctgttgcccatt

SEQ ID NO: 97881 - DNA, 337 bp, Glycine max
  Clone ID: PAT_MRT3847_593C.1
ctttatccttttcgactccatactcaaaaccgggtcagactcatacaaaacatctacaacaatatacttggctataggcgctagctcggaagaaaggttagtaccaggtcatgatctgcctgtctgggaatgcacctttcataatgaacgattggtactcagcgacacataggtgttaaactgacagcagccctgccaaacattgtgatgcctgtttgatgacataaatcaaaccacatgcgtgggtatgtataccgccaatataggcatcgggtgcttataataccattgccatgcggagttcggagtgggcaaaacaaacgtcatggcctttgag

SEQ ID NO: 97882 - DNA, 920 bp, Glycine max
  Clone ID: PAT_MRT3847_59400C.1
ttgttaaataagttaagccacttatttcactaagtattttaatggtaattattggtttgattatcatttcaatatttaaattaaacttaggtattgatttctcatccggaacaagagcagatattcaatctaaaaatgctataacacaagcacaggttgagaaaactgtaaaatcagttggattggaaccagatcaaatacagattaatggtagtggaaataaaaatgccacagttcagtttaaaaaagatttatcacgtgaggaagacaataaattaagtgctaaggtgaaatctgaatttggagataatccacaaattaataccgtttcacctctcataggccaagagctagctaaaaatgctgtaactgcattaatacttgcttctataggcattattatctatgtttcactaagatttgaatggcgtatgggtctatcttctgtacttgcattattacatgacgtatttatcatcattgcaatctttagtttgtttagattagaagtagatttaacatttattgcagcagtattaactatcgttggttattcaatcaatgatacaatcgtaactttcgaccgtgttcgagaaaatctgcataaagttaaagtaattacgcatactgatcaaattgatgatatagtcaaccgctctattagacaaactatgacacgttctattaatacagtgttgactgtagttgtagttgtagttgcaatattaatattaggtgcaccaacaatatttaatttctctttagcattactaattggattattatctggtgtattctcgtcaattttcattgctgtaccattatggggcatgcttaagaaacgacagtttaaaaagacaaaaaataataaattagtagtacacaaagagaagaaatctaacgatgaaaaaatcttagtt

SEQ ID NO: 97883 - DNA, 369 bp, Glycine max
  unsure (1)..(369): unsure at all n locations
  Clone ID: PAT_MRT3847_59401C.1
acgaggaagatgcaggtctttggtgcgcaaccatttgcttaaagaacttgccaaatggtctaatgagtatatcaatctgcttggtggcataaacaaatttgaggaattaaagtgatccatacttgttgatcaattattcacggttaccatggataaggggatgaatataactgacatgggatatgtgattgcatcaaggtataatgtgatccttgtttctctttttctccaacaaagcatgatgtttttttcctcgtagaagtcaaccaccaacatatttttctgtacatcgcgtaatatgtatcggtcatgtatatgactatcattntattcaggtatctctaagatatcgttgtcccttacttgcac

SEQ ID NO: 97884 - DNA, 815 bp, Glycine max
  Clone ID: PAT_MRT3847_59402C.1
caagattcttccgcagaccttaggtaacccagtcccataataacatcagtcaattgaccagcacgacacagacggcaattaacctgcacgcgccgtcgcgtcgctatgaccgaacctcaagaccccttctcctaccctcccattgaccccgtcaacttcgatctcatcatcgtcggcaccgccctatcggaatccgtcatcgccgccgccgcctccgccgtcggcaaaaccatcctccacctcgaccccaactccttctacggcagccacttcgcttctctctccctccacgatctcacttcctacctcacttccccgcactccctcccctccgccgcaaccgcgccacatcctctgactctgacgacatcgttgtcgtcgacctcgtccaccaacccctctgcaccgacgcggaaaccgcgacctacgatgaatccgcgtttctcagcgaaaattcgcgaaaattcaacatcgatttgggaggtcccagggcgctgttctgcgcggacaagacgatcgatctgttgatgaaatcgggcgctgcgcagtatttggagttcaaaggaatcgacgagagcttcgtctatgaagcgaacgcggatttggcaaacgtgccgaattctcgaggagcgattttcagagacaagaagttttcgctaaaggagaagaatcagttgatgaggttcttcaagctagttcagcagcacatcgatgatactcaggaggagaagattccccaaggaggatttggagattccgtttgttagtttcttggagaagatgaagttgccgcctaagataaaatcgattctttt

SEQ ID NO: 97885 - DNA, 641 bp, Glycine max
  Clone ID: PAT_MRT3847_59403C.1
gtcgcatgcacgcgtacgtaagctcggaattcggctcgagggaaacatttcgttatctttaaggtcatacagaccatagggaaaaccggcagctgtgttttaggagccttctgctgggcctctcaccctgggcttttaggttaccgtgcagctgggcagaagctctggggaggcagtgtaccttgaaagcatccacacgggagagaccatattgctcacctcttttctttcatacaagttttaaaatggtgactccatgttcttcccccaagcccagtcagttctgcgccttcagtcctctctagagctcctagtctgaaaagcctggaaccctctcagagtgcagttctagggttgttctctaggtaccctgtggtggtttgaatacacctggcctagggagtggcactattaggaggtgtggccttgttggagtaggtatggccttgacagagttggagtagtatgtcactgtgggcatgggcttgggagccagtcttttcttggtggccttcagatgaagatgtagagctctcagctcctgcaccatgcctgcctagacactgtcatgctcctgccttgatgataatggactgaaactctgaacctgtaagccagccccaattaaatgtccttataag

SEQ ID NO: 97886 - DNA, 465 bp, Glycine max
  Clone ID: PAT_MRT3847_59404C.1
gtgacgcggggccaggcggccgtacagcagctgcaggcggagggcctgagcccgcgcttccaccagctggacatcgacgatctgcagagcatccgcgccctgcgcacttcctgcgcaaggagtacgggggcctggacgtgctggtcaacaacgcgggcatcgccttcaaggttgctgatcccacaccctttcatattcaagctgaagtgacgatgaaaacaaatttctttggtacccgagatgtgtgcacagaattactccctctaataaaaccccaagggagagtggtgaacgtatctagcatcatgagcgtcagagcccttaaaagctgcagcccagagctgcagcagaagttccgcagtgagaccatcactgaggaggagctggtggggctcatgaacaagtttgtggaggatacaaagaagggagtgcaccagaaggagggctggcccagcagcgcatacc

SEQ ID NO: 97887 - DNA, 539 bp, Glycine max
  Clone ID: PAT_MRT3847_59405C.1
ggtttggatctttcttatttgccgatcacagaaaaatgtcttaatcatatccttcaattagaacatctagaagatttgattcttgaacactgtcttggcattgaggatcatggccttgcaaccctccaagcaagctgcaagtcaatgaagatgcttaacttgtcgaaatgtcagaacattggtcatattggcatagcttctcttacaagtggttctcagaatttagaaaagcttatcttatcctccagcgtgattgttactactgatctagcaaaatgtctgcaaagtttttcaagactgcaatcggttaaacttgatagttgtttgggtacaaagtcaggattaaaagccatcggtaatttgggtgcctcactcaaagaactgaacttaagtaaatgtgttggagtcactgatgagaatctcccgttccttgtgcaaccacacaaagatctagagaagttagacataacatgctgtcacacgataacacatgcatccatatccagcctaacaaattcatgtttaaggcttacttccct

SEQ ID NO: 97888 - DNA, 257 bp, Glycine max
  Clone ID: PAT_MRT3847_59406C.1
ttactcttgggtggaaacaaactatggtgaatggagctcacgatgatgcgcctgcgacaagaggttggcacgtgaaacctgaatacatctcacggcaccatcgagctgatagaaccaaacattggtggaacgattcaggttctgggtcccacgaccaatggtgagtcagagggcagaactggagcctgtgtgggttaagagaacgctgatgggacctcaggaatgatgacaatgaggggcactgccactacatctga

SEQ ID NO: 97889 - DNA, 444 bp, Glycine max
  Clone ID: PAT_MRT3847_59407C.1
ctgaaccatctgttgttcaccttcactctcattatcactatcaccgcggtcaacggccgtggttccacagtcatcaccaccgtcatcggccttggttttgcggccaccaccaccctcacctacgacatgacctaccacaaccacgtctttcaccaccgacgcagaacgcaaaaccttggatctcgttagcgacacgcgcatacacgggaacgacgtagtcgccctaccggaggcggatgacggagaggtcaccgcatgcgagtttgacattgtagtcctcgatggcttccgacggcgcggagggggaactagcggtgcggtggcagtgtcgtccggccacggtggacgacaacgacgaagtggccaaaaccgttgttctggcggtggttacttgaacgccactgtaatgtaaagtttaatttggttgttttctccatttgtgtc

SEQ ID NO: 97890 - DNA, 158 bp, Glycine max
  Clone ID: PAT_MRT3847_59408C.1
aattcggctcgaggtcgattacccatgtgtgcctttactgaaaatccctgctcattattatggtatatagtttgatagaagagctaattttattacattgtaagtataacttattacaaactatataccataataatgagcagggattttcagtaaaa

SEQ ID NO: 97891 - DNA, 106 bp, Glycine max
  Clone ID: PAT_MRT3847_59409C.1
gccctctactgatcgctcactgtctagactgttacgctgaacacactctcttgagaagaagcatgaatattgctgagaagggaggcagcaactttctttgagatct

SEQ ID NO: 97892 - DNA, 620 bp, Glycine max
  Clone ID: PAT_MRT3847_5940C.1
tgaatcgcaaagcacatggccagctgctcagctagctggcactgtttcataatataatagtgatgcactataattttggtagatatacatttaaatcactcttcgaaagggttttcaattaaaaatcattaagattattgcatttaatatttgaacaactcacaacgtcaaaaataaaatattgaactactcaatagaaaaagaaaacattagtatttgcaactcttctctttaaaattatgcttgactgattaaactgaagttatttatttgtggtgacgttattatgttattatcattctgcccaattcgaagggttcccgaaaccagtggcggatgagtgttttaaaaggatgggcacaagcacaactcacaagtggcttacacccgacgcatactggactgctagttagattagatcacacgtcatttacactacttaggtggattagtaatggaccagccacgcgtcaaagccagaccaattggtgatggagttttgatagttaaatttcatttaacccagacttaataatatataagagaagttaaatttgatatattaatataacattatatttaattaaaaacataaaatttaaatttaaatatatttatta

SEQ ID NO: 97893 - DNA, 346 bp, Glycine max
  Clone ID: PAT_MRT3847_59410C.1
caattgtacccttattagaaacgaaaatgacttgacatcctctgatctgatctatatttctaggtctctgtttactactactcagctaagctatacttatagtggaacttactccacagggaaacgcataaacatatcttaattcctgtgaagaaagaaagaaacataatgtgttcttcgtagactatcaacatcaatgctagtacacataaacttgatcttgataatcgaattgctctccgcttctactacataatctccgataatatcctcaaacaggctgatatcttttttgcataaacaaatattgttgatctgtatattatgctcctaaaatttttcagtt

SEQ ID NO: 97894 - DNA, 150 bp, Glycine max
  Clone ID: PAT_MRT3847_59411C.1
ggcacgagaaaaaagcagccacagcactaaagcacaacacgccaagggcccaccgggggggaataaaagagcaaaccgggcagaacaccagcgaagaaatagaacaggacaagagagccgcacagaaacgaaaggaaagcgaacaccaag

SEQ ID NO: 97895 - DNA, 607 bp, Glycine max
  Clone ID: PAT_MRT3847_59412C.1
ccaccctcttgttctctgttggtctaataacccctggccctgtctctactttgagctttttccttatcccttctcctatccctctcaaacactgtctcacggatcctatcgctttccttttctcttctgctatccctatcatcctctctttccctcctatctttttctacatcccttctgtgcctctcacaactcctctcacgttctttttcccttctatgcacccaattgacctccctattcctactcctctcttgttctttttccatctttaagtctctatcaacatctctatcgctactcctagccctaccccaagcctcctgagtatgataacttgtcctgtgttcccttcttttatccaccaccaaatctctactctcccttctgcttgccatcattctttcatcatcaaggtcatagtcagtcttcagtctactagcatatgaatcatccccctgttcaccagagtgctttctctttgaacgagcatgttcttccactatactaccagaatgagacctgtccgtagcatgaccagttgatcttgatcgacttctatatctatcacgagaatgtgaatatctggatcttgtatctttctctc

SEQ ID NO: 97896 - DNA, 2218 bp, Glycine max
  Clone ID: PAT_MRT3847_59413C.1
gtcaaagcctctttaaggttccactggatgcatacatgatggactttgtattctctgagagtgaacatggtggagtttttgataacaaatttggaatggattatacataccagtttttggaagtattgcaaaggaaccacctttgcatatcatccatattgctgtggagatggccccaattgcaaaagttggaggccttggtgacgttgttactagtctatcccgggctgttcaggatttaaatcacaatgtggacatcattcttccaaagtatgactgcttgaaccttagcaatgtaaaggactttgaccgtcacataggatttcggctcgaggggactgaaataaaagtatggcatggaaaagttgaaggcctctctgtctactttttggagcctcaaaatggattctttcaggttggctgtgtatatggtcgtgggaatgatggagagagatttggttttttttgtcatgccgctctcgagtttctactccaaagtggatttcatcctgatatcatccactgccatgattggtcaagtgctccggttgcatggctatttaaagacaactatgcacattatggtcttagtaaagcacgagttgtcttcacaattcataaccttgaatttggagcccattccattggaaaagctatggcatatgctgacaaagctacaactgtctctcccacatattcaagagagattgctggtaatcctgtaattgctcctcatcttcacaagttccatggtataataaatggaatcgacccagatatatgggacccatataatgataaattcattcccgtatcatactcttcagaaaatgttgttgaaggaaaaagagcttcgaaggaaaccttgcaacaaaggcttagtttaaaaaaagctgatcttcctttagtgggaattattactcgattgactcatcagaaaggaatccatctcatcaaacatgccatatggcgcaccctagaacgtggtggacaggttgtactacttggttcagctccagatcctcgtatccaaaatgattttgtgaatttggccaatgaattgcattccgctcatcatgatcgtgctagactttgccttgcatatgatgagcctctttcacacttgatatatgctggtgctgatttcattctagttccttcaatctttgagccatgtggactcactcaactcacagcaatgagatatggttcaatacctgttgttcggaaaactggaggactttacgatacagtattcgacgttgaccatgataaggatagagcccaagcgcaaggtcttgagccaaatggatttagttttgatggagctgatactggaggtgttgattatgctctcaatagggcaatatcagcatggtatgaaggccgtgattggtttaacagtttatgcaaaagggtgatggagcaagactggtcttggaaccggcctgctcttgactatttggagctttaccatgcagcacgcaaggcagaatgagatttaaatgaacagaggaagtaagatggaaattaaaattcattccttttatacagatttagtggtaagctattagtctttagaataatttagttgcatatagccaatcttagtgaaaaataaccgctaggtgacaccagtttgtagagacaaaactcaaatggttcattattttgttagcacgcaataatatgtaggtaagctttacatggtagtatatgctaagagatcatgtttttaatttgtggaatgcattgcagaataaatcgaaaaatgcaagtatcttttgttcattacagagttgatactcaaggactgaggaattcttttattctgttgagttcattaatgactacaatgactcattagcatatctccgcccccttataacccatgccggtgcttatcgtatagaaggtttttatttagtttccactaattcagttatgacttgttcctatatcacactattccaggtatcatactcttcagaaaatgttgttgaaggaaaaagagcttccaaggaagccttgcaacacaggcttagtttaaaaaaagctgatcttcctttagtgggaattattactcgattgactcatcagaaaggagtccatctcatcagacatgccatatggcgcaccctagatcgtggtggacagggttgtactactttggtcagcttcagatccgcggatcccaagtgactacgggaatttgtcc

SEQ ID NO: 97897 - DNA, 389 bp, Glycine max
  Clone ID: PAT_MRT3847_59414C.1
ctttgtctttgatgcatgtatggccgtcgacctcatgatgggatatcgaaaccacaatttcggccaagagaatgccgttcgtgaagctgcgtcggggctagagagcgtcgagaaactcatcaagttgctgtcgcagacccaacaacaattccagacaacatctaattcaacctcaaactcaaagtcttccatggcaaacatcgacaccgactacagagctgtcgctgacgtggccgtctctaagttcaagaaggtcatttcgcttctgggcagcagcagaaccggtcacgcgcgtttcagaagagcccctgttgctccccctcctccacctgcggaacccatagtctaccgtgctacgccgctgcatcagatcccgccacccaaccttc

SEQ ID NO: 97898 - DNA, 1165 bp, Glycine max
  Clone ID: PAT_MRT3847_59415C.1
tacggctggagaagacgacagaaggggacccaaaaagaaaaagaaaaaaattctcaccataacaccatcccctaacatatatcaattatgtatacttcattcaagcccaattctcacaatcacaaacaccagaaagaccacaatgtaacaacaaccacaacaaccaacaccaaatacagcgagatatcacacttcagccacaaacaacacaagctagcgtttgactactctgaatcccccttcaaatgtgacgggtgcaaggaactaggcatagggtcacgctacaagtgctccatctgtgactttgatcttcacacacactgttccattccttctccttctttgttccaccctttctaccccaaatgctccttccacttcctctcccagccccccggcgacacttcgcgctactgcaacgcgtgcgagaagccggtgaaggggttcctctaccactgcttctcgtgcggcttcgacctccacccgtgctgcgcgaagcttccgacagtgctcggaagcgacgagcacggcgtgaggttgtttttgtacaggaaggtgagctcggcgtgccataggtgcgggcggaaggggagtgggtggagctataggtcatcgtgcaagaggtacaatttgcatgtggcctgtgtgagggagatggtggtggagagttggcatgaagggggtgggttgatgaatgttgtggagagtgggttgtcataaggggaggggcaaaggaagtggcggtagtagggtgaggaggtgttgtgaggtggccggaatggcggtgcaggtggctgtgtccgcggtgctgggcgatccgaccgttcttattgccggaatcatggggtccttgatgtcaagggcttaataaagtaagagaaattattatatagttgaagatgttatgatgtcaaactaatttagaaaactaaagactcatacatgttattattttttttattgtatattaaaaaatgtgacaacatatcataaaaattagttgagaacatatgattctgaaccatatatacaataatttcttgattgtcatgaaattgagaatggtcagtttatgttgtatttgttggagatgtacaaattaattagttaaggggttaaccacccgtgaaaaaagaaatagatatatttcttaagtgttttttgc

SEQ ID NO: 97899 - DNA, 827 bp, Glycine max
  Clone ID: PAT_MRT3847_59416C.1
cttttgcatctgaaaaatctttgcatgaagttaaatgctggtgatgatgaacaaaggactaatggaaagggggaatctaaaacttctggatttggtccggaagagtatttaattgggatcatagctaacatgctaaaggaacttggcaaaggagatggtgtatctacttttgaattcattggtagtggtgttgttgcagctctgttgaattatttttcttgtgggtatttctctaaagatcgaccattagaaacccaccttcccaagcttcgccaacaagcacttacaaggtttaagttatttatagcagttgcactaccttctactattgaagttgggactgtggctcctatgactgtcttggtccagaagcttcaaaatgccttgtcctccttggagcgtttccctgttgtgctgagtcattcatctaggtcatctagtgggagtgcacgcctctcctctggactaagtgctttatctcagcccttcaagttgcggctttgtcgagcccagggtgaaaagtcacttaaggattattcatccaacgttggactggttgatccattagcaagtttagcagcgattgaggaatttgtttggcctcgtatccaacgtagtgaatctggtcagaagtccactgtagccactgggaattctgaatctgggacaactcctgcaggagctggtgtatcctctcctactacccgtcgccattctaactagatccagatcatctgctaatataggtggatccatctagaaaggaaataactcaagataaaagtacaagttctttcaagggtaagggaaaagttgcattaaagcct

SEQ ID NO: 97900 - DNA, 310 bp, Glycine max
  Clone ID: PAT_MRT3847_59417C.1
cgaagactgaagcactctctccgatgacagtattcagaaggaatccacacatcagcttggtcgtatgctccgtggtggagaactctagttgcaggttgactcttgccactggcagtttcacttccatgaatgtgtctgatataactggatttctaaggcgatgttgacgttatgctcgatggcggtcatctctagttggagggaatcatacgaatcaagtgcacttcaatattgaatgagctcaatcataattgcaacaacttcagcaatgaggttgctcaatttttggttggtgcgtccattcctgaat

SEQ ID NO: 97901 - DNA, 171 bp, Glycine max
  Clone ID: PAT_MRT3847_59418C.1
gcttgtggaattccactcttcgttcggaaaaagcttcctgaatattgcgtcccaccaacaaaagactacattaatggcgaaaatttatatgagacttctcccacatttaaccaacggctttctttaatgctagtgaaccccaattccatcacagcgacatatttaatactc

SEQ ID NO: 97902 - DNA, 428 bp, Glycine max
  Clone ID: PAT_MRT3847_59419C.1
ttttttttttttttttttttttttttttttttaattttatttattgggatttttggggtttttatgatatatttttttttttttttttttttggggcccccaaagaaaataaaattaatatacccccgcggggggaaaaaaaaatgggaaaataaatttgtttctggggcttttccaggagaggggcctttttcaaggcgttttttccctttctttgttcccaaggttgattaaattccccggggggttttttcgccaaacaagggaaattttatttaaaatgggcccttttggggtggggaaaaccgcacttaaaggggaaaaaaaaaatcgaaaccgtttttttttttttcttttaaacccattaaaaagttttgattttttttttttaaacaaaccccaagagagggggttaatgtcccccgcgg

SEQ ID NO: 97903 - DNA, 175 bp, Glycine max
  unsure (1)..(175): unsure at all n locations
  Clone ID: PAT_MRT3847_5941C.1
agacgatgtgccaacgtacacgcgcattctagctcttcgcctctttctcttctctccgggaacctgctntaatttataatcgtgtcacagcaccaccacagcctaacccttacacatacacaccttagaacccttatcgcacatcccattgcttccaaacgccttcttaacgaac

SEQ ID NO: 97904 - DNA, 1356 bp, Glycine max
  Clone ID: PAT_MRT3847_59420C.1
actgaaacaaaaaaagtgacttctgcatgttgggtgtgcccttttggaagtaaagcaattgtagggtacaacaatggagagctcttcatttggagcatccgttctctaaatataggaaatggttcagcatctgaacatagttatcaaaatactcctttgctcaaacttaacttaggatacaagtctgacaaaatttccataggatcaataaaatgggtttatgctgggggaaaggctagtcgactatatattatgggagcctctgactgtgcaacttcaaacttgttgcaggtagtgttgctgaatgagcatacagaagctcgcacaattaagcttggacttcatttgtctgaatgttgtattgacatggagatcatatcaacttcaactgagcaaagcaagaataaacaagattctttcattttgcttgggaagtcaggccatctatatctgtatgacgatattttgattgaaaggtatctgctacaatgccaatctaagtccacaccatcacttccaaaggaggtaactgtaaagttaccactggcagaatcaagcatcacaacagcaaaattcatctccaacaatcccaatgtattaacatttgaagatgagtattacagacagctgatcacaagctatccactgtttgttcctgttgaaacaaatcaaaaagatgagattagcctgagttctgccaaatttacaggattttctaaagttcaaaacttgtacataactggacacagcaatggagccataaacttctgggatgcttcatgccccattttcactccaattttacaattgaagaagtttcatgctaatgactgtacattaagtggtatacccttgacgatccagaactccgcaagtaaggaagagcagcaagatgagcaagctggtgcagtcgatcaaatcaagaagaaatatggattttcttcttccaacgtaagtatatatccaatttcaccattattcaaagtaagaaatatggatgaaaccaggaaacaagctttgctaaattggcagaaagcaagctgcaggagaacatgaaaaaattgcagggtatcaaccttcgaaccccagaaatgcaagataaagcaaaatcattttcaacattggcaaaccaagtgctgcggactgcagaacaggaaagacgaaattaggaagcccctactcatcgattacaccaaaaattacaatgactttttacccctcctattgtacttaagcttctttattttattgtatttatttttttgtttccccgtggaagactggattatcatctcagttttgggttgatctttacatcgagtgaatataaattaagaacaatgtattctctttttt

SEQ ID NO: 97905 - DNA, 220 bp, Glycine max
  unsure (1)..(220): unsure at all n locations
  Clone ID: PAT_MRT3847_59421C.1
tacggtcttcagaagacnacagaagggtacgattcacactttacaacataagatttcgggtgtgaagggactacagaagggtacgtgcttttataagactacatacggtaactggttgatagaagtcaacagaaggttatcgcacaccattattctttcagcaccttgcattaaaagctttatcaatcaaatatcttcatatggttattaccaagaaaac

SEQ ID NO: 97906 - DNA, 670 bp, Glycine max
  unsure (1)..(670): unsure at all n locations
  Clone ID: PAT_MRT3847_59422C.1
agctatattcacatagtcctccatggatagagtaatatattcctttatgttcgtgttaatattgctaagctccaaatcagttgttactacaaaggcacaaccacccatttatttggcagatgactgcgatttcaacccccaaaaacctctcggcggtgaataccaaaccaaccttaacagtattctctcatggctatcctcagatgcagccacaagcaaaggttataatcacaaaagcattggcaaaaacaacagtgctgtgtatggcctctatgattgccgtggtgatgtggttggatacttttgtcaattctgtgtctctactgcttccagacaaatgcttcagcgctgccccaatagagtctctgctatcatgtattacaatttctgcattctgaggtactctaatgagaacttctttgggaatgttactatataccctccacggcatgtagttggaaccaaaaacgtgtctagtgaagaagagattcagaaaggtgagcattttatgaggagtttaatcagaaaagcaactgtggaaaccgaccagttgtattatatggatggcttcaatttgagttccactcagaaaaggtanntggcttggtgcagtgcaagcagagatctcaccaatgaagggtgcagacagtgtttagaggccatgctagct

SEQ ID NO: 97907 - DNA, 246 bp, Glycine max
  Clone ID: PAT_MRT3847_59423C.1
cccacgcgtccgctccgaagagattcaagttcagatggattcaatgtgccccccccaaaaacacaagagtatgttaatgatacacttttttttagtattttttaattcttttgcgaggaagcgtaagttagctttttatattccgtcatccacaggagaaattttgatgtattagtatatttatactatacttttacgataagcgtggtaaattccaattaaccagcgaacataatatttctagcc

SEQ ID NO: 97908 - DNA, 381 bp, Glycine max
  unsure (1)..(381): unsure at all n locations
  Clone ID: PAT_MRT3847_59424C.1
ggaaaaacaaaaagccattattaaacaattctatatgctttttttttaatcacgcaaaccacncattacgcctgctctctctacatgaacgggggcacctcctcaaactctatatctataacttccactttctattcataaaccttctttttaaattcatttacaaataaatttctttcttttacatataatgcattttttcttatataagcaccattttacccttaaccaactctcatctacttattcaaagcacgaaacttatccttttttcctctcaaccctatctttccacaaccctttttcattattccatctacttttattcctacaacaaatatcatccctttaacaaataaccttttacatttattttttttt

SEQ ID NO: 97909 - DNA, 330 bp, Glycine max
  Clone ID: PAT_MRT3847_59425C.1
atggctaggcgccgccctaaaaatcgggaagtcatcactcctgcaagcttgaatgaccagcttgcaaatgtcctcagggttcaccagcatcacttagcgttgaagcgcaatgacactcgccgtcaaagtcagataggacttgttatgcgcagggagatgacctcatatctttattgtcattggctctccttgcaccccaagaagcagaataaaagagagggggatcatagtaaccgggactggctccctggcatcaacagaaggttgtgcccttccgtgagggcgataagtgcccacattagtttggcacgaggtcctcaccctctctga

SEQ ID NO: 97910 - DNA, 952 bp, Glycine max
  Clone ID: PAT_MRT3847_59426C.1
atgccgcttaactcctgggacgggactgtaaagttccctcttcacaaatttaatcaacaaaaatatgggggtgtaattggcccgcgcgagagcgagggagagatggaggaaggtaaagaatggagcctgaataagcagaacgaaactacgacgcgaccatcccttaaatccgatgctccattcaacaaatatcaattatggaaacacaagctgaggaacaattgctacaaaagggtgcgagaggacagaactcgcttactctggaaatttagatgcagccaacaggaggaggatatcgtgaagtgtgcattccaggatattgtatctgatgaattcaacaaaatgaaacacacggatgagatgttatgggagtatgaaggtcctcccgatactacttaccaggatttagaatgtgatattgaaacttgggaagatgaagtggatcagtacttggctcgtgcagtttgtgagcatatgcagctaaatgaagatgaggcccatgggaaagagatttggtgtcctatttgtaagcaaggagagcttaaagacaatcacaatattatatgctgcacttgttgtgaacttcgactacacaaagctagcaaggggtatttatgggttgcattggtttgtatttagaaagtccacacggagcattttgataaaggttgcagattgtaaccccaattttgcatgaggacaaagtttaatttaactgcactgtacatttcacgtgaaggttgtgatacatttgaggttgtaatttaacagtttcgttgttatttgttatatagatatctgatgcctagcgtatgtcaaagagttttccctatcttgttttgcttcattttaatatgcatgggaaaaaggtaatgtgcttgtagtaaaaaatatgttgaacctagaactcttaagaatacagaaatgaaagtatctttctttagatttttat

SEQ ID NO: 97911 - DNA, 482 bp, Glycine max
  Clone ID: PAT_MRT3847_59427C.1
ccaaacttaagagttcaccaaaaaatttggttttcaatccaaaagggcaaagagatcaggtaattaaaaaatatccttttgctagctaaaaaatacattccgtccagggaaaaccaaaaacaactgtttaggctatcccgccaaaaaataaattggttctctcactaactcattaaaccattcattcaaaaaagtccaactttgtaaaacctgccccccatcaaaatatcatgatctaccctccaaagtgtttgattgcaaatgctttaatttgccaatgataaacgcttttttttgcttccttttgggctggattttgagggggaacctcccaagtttttgaacaggcccttgatggaaatcaccgagattagagatccatacttagccagcacccttttagcccattcaaactttttttggggaggtctatcaaaaagaacatccaagggcaatatgggagttgaatatgcctcctgcaa

SEQ ID NO: 97912 - DNA, 950 bp, Glycine max
  Clone ID: PAT_MRT3847_59428C.1
gtagacaaacaatataatattcacctcctcaaaaaagggacacaacttgaaactcaagaggctcctggatctactcgaagaactcacaatcaatgtggcaatctgatatgcttccattgttttttaataagcacagtgcgcacttattactatcttcaggctcataaatagcaaacttgttccaaccaatgcggacagaaaacttctcaatggtaacactagaatctaaattgcattgaatcgtggccaatgcctgggataaatcaacatatacaaagtcttgaaaccacaaaactactgattcgcacacagaattacaaacattattgcttccaaaagtgtctatagactgctaccaacaaggaaactaattacagataggttgccattgcctataaaaacaccacggctgaatctacaaattaatccaaaagtctcatcacattacggatacactcgtttatgccacataagcatgatcaattactaacccctaacacacaattatccacttaacactaaccaaggttttaaattgcagtttcatccaaatacttgacattgcaaataaatgcagccacagttgctgtcacaaataacccaaaaatcttgacattgcaattgcagaccgtatttaaaaaccttgcccctaaccaaacttaaacacaccaccaaacattaacttcaccaggtggaaactacagagttcaaacaaagataactataaccaacattataaccattgttttaaaatttggtccacaaccgcaactttggcagcaactttttgaaatatccacaatcgccattgtagccacattggctgcatttgtccctgcatcggtagcatttgtctacaatttccccacatatcaagaatcacgacaaaaccatgaccacaacagcaatttttaaaactttgaatataaccatttaactatatttccatt

SEQ ID NO: 97913 - DNA, 261 bp, Glycine max
  Clone ID: PAT_MRT3847_59429C.1
tttatttttttatttattttttattttaatttaattttttttttttttttttttttttttttttttttttttttttgcaatttaattattagccactcttattcatagttttatcggtaatacacaaacacaacctgctcattatcaagcatccaagctctagttagtaaaagatgtaaccaatttgagctattataaaatcggctcgagtacatttggatagttccaaacttaaaaagaagagagaatcttaataaaatg

SEQ ID NO: 97914 - DNA, 542 bp, Glycine max
  unsure (1)..(542): unsure at all n locations
  Clone ID: PAT_MRT3847_5942C.1
aagaaattattaaaaaaaacatttaaaaaaagtcatacaaattttatgttccaaagttggacatcaaacacataatagttaaaagttttataaaaacaatacaactagaatgatttccatgatcttcttcagatgatagtagcttgagggtgatcaactgaatcattaccattaccttcaaaaaaacgagatgacggaacatatagtctgaatcagagtgagcaaaaggagtagaactgcagcagatgtagatgcttttttccatggagtgttgaagtactcatgataaaagatagccttgtacttgttgcgaggattttcatagaatttaaccaagttatcacagagagaaaaacactcttcactgataaatggcagaccaacatttgaacaaagactgttaaacattttagccacagcattggcatcacccaaccaattgataaaaattntgttatcaattagtatgcttgcgtctttgtcggtgttgacaagacaatctaggatgaacaagtactgagtcatgttgggtgaaagatgta

SEQ ID NO: 97915 - DNA, 191 bp, Glycine max
  Clone ID: PAT_MRT3847_59430C.1
aaatgggggggtgtgtttttaaggtggccaacgagacacaaggaacggcgtgtctatagtggagggcgacgtcaccctcgaccaaatcttccctaagcctaagcaaaaagtctgggaggcctagttcaaggacggacctaccaaagattctggtgcttatgtctaacgtggaaggcaccctgaggcctatt

SEQ ID NO: 97916 - DNA, 491 bp, Glycine max
  Clone ID: PAT_MRT3847_59431C.1
ggtttaaccaatgcagcaggatgagttttggcacggtcgtaaggaaccttaagctcttgggaaagttgttggccaatgccaaaattgttgaagtgagctacaaactcgggcacactgacatatcgatatggtttgtcccttgcgaaccagtactgctcttggtcctttctggaagtaacctcctgtaaaaagtctgcaattcctttcctttcggggcatttgaagcctacgctctcaaaaaaatcgagaacattctctcgtggaccttggtagataatgtggccttctgaaagcaagataatgtcatcaaagaggtcaaatgtttctggtgcaggttgtaaaagagagattatcattgtaacatccatgacatgcactagctgcctcaagaacttgacaatttggaaggttgtggaactatccaaaccagttgaaatctcatccattaagaaaacttttgaaggtcctactaacattttacctggatccat

SEQ ID NO: 97917 - DNA, 750 bp, Glycine max
  Clone ID: PAT_MRT3847_59432C.1
tcgagctagtcgtctgaaataaaccagagccttagaggaggagtttctggttggagaatagcagaggagaaaatcaggcctaaatgtacaactcatcaatttgcagttttatgtttagtactaatattttgcagcctaggatggtaattgcgaggctgtcatgcacattgaagactcatcaaaacgtgagaatcggacactgcacaaaggtgcccaggaatgtaaacatggagaaactgcaacatggttatttatttcctgagattgaaagacacgagcttatgcacttagagtcggctccacatgcaaatgtaatagacctcggaattggtgatacgacacaacccttaccaacaattgtaacatctagcatggttgattttgtgcatggcctttcaacagcaacaggctataaaggatatggaccagagcaaggtgaaaaggccttgaggaaagcaatttctgttacattctacaaagatctggggataaaaccttctgaggtttttgtttcagatggtgcacagtgtgatattactcgtcttcagctgcttatgggtcccaatctgaagatagctgtgcaggatccatcctttccggcctacatagattcgagtgtcataattggtcaggctggcaagtttgtagataaagctgggaagtacaaaaacatagaatacatgacatgtggacctcaaagtgacttcttttctgatcttctaccatttaaggacttgacttattttttta

SEQ ID NO: 97918 - DNA, 257 bp, Glycine max
  unsure (1)..(257): unsure at all n locations
  Clone ID: PAT_MRT3847_59433C.1
gaggggggtgggggttantngaacccacaccccattttatcaaaaaacatatgaacaatccgtttccttggaggggggttttaataaattttcaaattttgaaaaactactcgccgcatttttaaacaaactagggtggtttaaaaatttggtggggggggaaaaagtttatttgaatgtttgttttttttaaaaacgctttggtcaaaaataaacttttggcttcactttaccaaataaacccgactgggaaacaa

SEQ ID NO: 97919 - DNA, 270 bp, Glycine max
  Clone ID: PAT_MRT3847_59434C.1
gcgaaatatagagagatattggagatggagcccagcaggagggttgtaattttgtgctggctgacggtggctggaagtatccgagtcggagtccgagacgactcgctgtgaaaacatacactaattcatatcattctgctgcaatgaagcggccaaaattagaaccacattcctgggaattgatctttccaatagaggtatgcggtcctaataatggttttgaaatgcggaggatctgccaacgggctatagactacgaaccctacgaca

SEQ ID NO: 97920 - DNA, 132 bp, Glycine max
  unsure (1)..(132): unsure at all n locations
  Clone ID: PAT_MRT3847_59435C.1
gaaatacatgaatttggacagctacgataatgcggacttgcctggcatggaggataaggatttgtggagcaggaacagtggcgccaagacgatggaganaagcgataatgaagttgagagtcatgtgaatgg

SEQ ID NO: 97921 - DNA, 384 bp, Glycine max
  Clone ID: PAT_MRT3847_59436C.1
atcaaagtggaatccctcttatttggagtgttgttacccataatactggtggaagtttagatagcaggaaaagaaaagtatgatataaaagaatcgagtatgtatcatttaaattctccccaaactttgaacaagtagctcctccgtcttcaattgccgccccgtggcaacctcccgcagattctccaattcgttcacgacgaactctttcccgttatcgagatctcgaatcgtgcacagctcttcaatcggtggtggcggcggcggtgggggtggttttggatttggtggcttgttagggtttgcggtggtgtcggatacggatcggagaggggacgcgcgatcgcgagggtttgagcgcgtgagggaagagagtcccaggga

SEQ ID NO: 97922 - DNA, 430 bp, Glycine max
  Clone ID: PAT_MRT3847_59437C.1
aacaatcttattgcaagggcgcaaatacaattgccatccctgcaggcgaaaaccggccgccaaaaattaacctgtgaaagcttaactttatattgaatctaaacttgccgcccgatcataaaaccctctattttacagaatgcactatcacttcttttacaaaatgataactatcacaaggggacacctttttacttacactacacacaaagtctatcagatgaggcttttgccaaaggaacggtgcctggtgaccattgttgctcgccacgtggcaatccttgatgcatacaccagaaagcttgatctgccctgaccatgaacacgagctgccgacgcactgggtcttcatttctttgttgaggctagactgctgcaatgaacgccagggatcaccgtaggaactttaggtattggtgggcccaaccgc

SEQ ID NO: 97923 - DNA, 628 bp, Glycine max
  Clone ID: PAT_MRT3847_59438C.1
cggacgtgtgggtttcactttggcctgtattgcattgccccttcatcacatcatcgacaacgttcactcaaatctgcgagggaataaatggttactaattttctcattgtaaggttgactgcatctttcacacaccacagaagcacccctatccaattgggttctctgctgcaacacaaacacaatgctttccttcttttcttcttttcattcacttcaggaacctcttctgattctgaattagatggaaaccaacacaaaggtgacaactttaccgtgccatacctcatcaactcatgtggggtgtccccaaaacttgctaggaaactctccaaaaaggtcaatttgaaaaccccaaatggcccaaattctgttctggatcttctcaacaactacgggtttgacaaaacccatcttgcaaagcttgtagagaaacatcccatggtgcttgttgctaacgcagagaacacccttttgcctaaactcaagtttttccgttctattggggtttccaacactgacatgcctaagatcctactttgtaaccatgtattattggtgagtagcttggaaaatgacctcatcccacgttccgagatcctaaggagtgtctttgggacgatccaga

SEQ ID NO: 97924 - DNA, 452 bp, Glycine max
  Clone ID: PAT_MRT3847_59439C.1
tatgggtggcttcggcgtttggatggaagcatcgccgtcgtttgaggttgaagatgataacgagcactgctcaacttccgctacttcgtccattggaaacgacagtgatgtgttgtcggagacagagtgtggtgagaatgacaatgaggctcacagtacttataaatgtcatcaacctttggacaccatggactctctccaacaggttcttcccatcaggaggggcatctcaaagttctatgatggcaagtccaagtcctttacgagtctggcggatgctggttctaccccatctgtcaaagacattgcaaaaccagagaatgcttacaccaggaggcgtagaaatttgatgtgggaaaagagtcgaaactaccctttgagaagcaacaatggtggcatttccaagagaacaacaataagctcgagccgaagcaccgtgactctcgcgtttg

SEQ ID NO: 97925 - DNA, 437 bp, Glycine max
  Clone ID: PAT_MRT3847_5943C.1
ccacgcgtccgaccggttgcaaaagaccaccggaaggggacacacattggtcctagtagtgcctacagactcgatatgatacgccacttgtgagactgtagccttatcactcgcgtgcgacctgcagcaccacagctagctcaagggcgtatccccaacgatcataatgtacggtcactgtgctctaaccatacgctggcacgggtacatgatgatctaaaggcgtcacagcactgaatcagagagctcgactctgataacggtagatgacatgcacgctaaccagcactatgctgtagaagatacagtcgctatcgtgaaacttgaggatattgaggcctccaatgacaactgtgacgatgcttatgatgaaccaactgactgcctcatcattgatatagctcaggatggaccgttcagactccttactgaaaatg

SEQ ID NO: 97926 - DNA, 232 bp, Glycine max
  Clone ID: PAT_MRT3847_59440C.1
cccacacgtacccacattcatagcttaaatttacaagtgaacacactctttttcgggcatggtagctatcactcagcagaaaaatataaacctctacattacttctattacaaaacgcatctattgcacctatcttatatgtatttcaccaaatcaacacaaacatctcagtcctacacaatgacttcatcgttccccttcatacggataaacaagtacagtacataaggtt

SEQ ID NO: 97927 - DNA, 641 bp, Glycine max
  Clone ID: PAT_MRT3847_59441C.1
cccactcttccttcttcgcttccctgtgcaccttgcctcccgggcctccgactttataggttccaatcttccgtccccttccttcaaattaacttacctttttttttggggcgccccttttaggggttccagttttccttccccttccttgcgacgttttagttttttttttttgccccctattttcatttccctgcccgtctttttccaccttgttgtctgggaaacccctggctttccccacctttttcgccttgcagcccttccccttttctccggttggctttttacccaaggggcccgcccctttcgcctttcccaccttttgccccccctgtttggcaattgggcccccccctttaccggcccttttaccccggcggttgtggtggttccccccatgtttcccgttcccttttcccgccccctatcccccgttcttttcgtttttttcccttcctttttccccccttttcccggttttccccgttaagtttttttttcggggcctcctttttgggttccctttttttccttttcgtccccttctccccccaaaaacttttttttgtgtggtttgttttccctttttttggttccctttttcctcccttttttttttgatctctcttctttttctt

SEQ ID NO: 97928 - DNA, 199 bp, Glycine max
  Clone ID: PAT_MRT3847_59442C.1
cttctccagcacctcaagggcttgccaaggttaaaaattgggagtgctcaatcttgcaattgttataccacagttggtggtagatgacacaagtggcccatgggatgctcaatttgaaggagggcactcgccataactcctcgcgggtgccgttgctgaaaaccaaaatgcgactttatgcataattctgctgtcctct

SEQ ID NO: 97929 - DNA, 234 bp, Glycine max
  unsure (1)..(234): unsure at all n locations
  Clone ID: PAT_MRT3847_59443C.1
gggtaaagttttttttttntttttnntnnttnnnnnnnnaaaaaaaataagaacactttctctctttttttaggatgaataatatcaatctttattgggccaaatcataatttttttgggagaactacaaaaggaaacctattccgtcccacaccatacaattaaaattctttcttcgttaacaagaccccccccccccaagaaattaaacccctaccccagattaatggggac

SEQ ID NO: 97930 - DNA, 210 bp, Glycine max
  Clone ID: PAT_MRT3847_59444C.1
actcaacaacaccacatttcaaacacacaaaacaaacaaaaaccctagtgactaaattttaacccaattattactacccctcttaccatctattcatctctaaaatccatcaatcaccatcccttcactctatcataacttatataatactacatactcatccacataatcaatcattcttactccttatttacaaaaactaatttaact

SEQ ID NO: 97931 - DNA, 503 bp, Glycine max
  Clone ID: PAT_MRT3847_59445C.1
atcaagatcatcccttaagcctaaagcttcgttggcaactaaggccctgcacttgattaatcatacgcctgatgtatatgatgagcttacgcagttagctgagaacttgatatatggactgctgattgctgccccgccagaaaccatgagagagaacgtggagcaccgggagcacgatctcgcgagtgggtcttcttagggcccatgtacggaccataggcgacgattatgactatgtagcagttacataatgcgtctcggtaaaagctcgacacgatcaggacttggtgtagatgaccatggacattggcgagtactgcttgtccgccctgaacattaagtgcagcaaccctgagactgctctgcttgccttccatctggataaacatccattgtttgttacagtgaaaatactgcagaatgctggagatcttatgctcatgagctgcatcaagagtctgaaaggactcacatggatcagtgtgctgatacatcatgctctg

SEQ ID NO: 97932 - DNA, 440 bp, Glycine max
  Clone ID: PAT_MRT3847_59446C.1
ggagagaactagttgtttgaaaaataaagttctttttggttaagttttgctcagtcattattgattgttgtaattttcttttgaaacagattttcatattattaagaatttcatacttcattataaagttttggtcaaaattctattgggagctactagtatagtgaaaattttgagaataagatagattaagactatcttagtgtatggcctttgatgaatccaaaaaataaaatgtaaaaattctttttcaatcaaaggtgggatctgcaagatcggttttgttttaaaagtataaaatacaaaaattgcacctgctgcccgctggttttgtatattcttgttgagaaatgattgaagccgggtatattaatgttgcttgaggctggctaagctggcaaattctacctttttttaggctaaattggcaaattctaccg

SEQ ID NO: 97933 - DNA, 269 bp, Glycine max
  Clone ID: PAT_MRT3847_59447C.1
aggacttttgaacaaacccttagtgatgtttctatctaataaaagccggatccaaggacggctctcgtggatactcgatctgtgctgtcacatgaggaagtggatgagcataaccttatcttggaaatcatgcttcttactgaaagccacccatttccttctcaagagtggactgttgtgaatacgttacctcacatatgtggcgatcagtaagcttagaactactctctggtgaatcaccagctggcgctacacatgagagatccaat

SEQ ID NO: 97934 - DNA, 226 bp, Glycine max
  Clone ID: PAT_MRT3847_59448C.1
gcgtccagtctaacgacaacataggcttttagattatccaacatgccatacatgacgcggatagggtgactattaagatcactctgttctttactatcaaaagaccaccctaccaagctttcttcttgtatctacctccctaaactataaaatcatatatatccacatcatttacaactaatgctatatacacacttaccattaattcattatcagaccctactta

SEQ ID NO: 97935 - DNA, 427 bp, Glycine max
  Clone ID: PAT_MRT3847_59449C.1
cccacgcgtccgtcttgcttgatggttccctggtttatggaggcagtggcgcaaacagggcggttagtatgtggccagttccagctgatgaagttgatggtgttgaagaaccattcttaagagcacttgtttcctttctgtctgctttgttcaaagagaaaatatggaggccggagaaggcattgaatctgatagaacttcttgtgaataaactctttcttggtgaagctgttaatactaattgtcttaagattctacctttgcttataaatgtacttttagaaccattgtatgggtatgcagagcctggtacaggtgttcatcattgttctttagaagaaagatttgtgcaaaatactatgatagactggctggagagggccggaagtcttacacctttggtcacatggaaaacaggagaagacat

SEQ ID NO: 97936 - DNA, 515 bp, Glycine max
  Clone ID: PAT_MRT3847_5944C.1
ggtctcagtatgtcttgatttcgcctgttgtatgattaaacttggatactctacctcagccattcttttttttttgtatcatttccttaacaaattcagccattgacaaattaagtcaattttgtttgttattacagtatgaatgatttttattttttgttgattgaatgaaattgaaacatatgacatttatcttaaagacaaacaactgaataagctttcatatggatgacgagtgattggtctaaatttaacttacaatagaaatttcatgtcactaataatttgagatgggtcaattttgacatcaatgatttaatatttactttcgaactcatttatttttcttcatttaccaaaaatttttgttggctgggtgagcccatcacatatatttatttaataagtcttttgacgaagaggaataattagcttctatttaacctcaggacttgagtaaaccaataataagataaatgctacttgttaagtttcatagtattgtgcttctattg

SEQ ID NO: 97937 - DNA, 357 bp, Glycine max
  Clone ID: PAT_MRT3847_59450C.1
atttccgaatcgaccgcacgcatccacgcacgcgtcgtttcagattaaacgcgaaatggtcaatggaaaaatgagaactgatctaggggtcaggggataaataatggactgaatatagaaaacttgcatcaaatgaaatctgagcaaagaattgcaccaatgcaatattatcactggacgcaataactagctgaatatttatagatgtaccaggacaagatgctcgtacatgcttcttctatacaccatcatgggtaccttagatcctactgaagagaatattatggatagcatacacagacagtaactggtatgatgctggctacacatttgatggatttagtctgcatgatagca

SEQ ID NO: 97938 - DNA, 744 bp, Glycine max
  Clone ID: PAT_MRT3847_59451C.1
gttgaatggtggtgccaactttgttgcccctggttacaccaagggtgatggtcttggtgctgagattgttggcactttcgtccttgtttacaccgttttctccgccaccgatgccaaacgtaacgccagagactctcacgtccccgtaagccccccaccctctgtcgaaaatctctttaattgctttttttcgttaaaaaaaaaatactatttttgtggactaaacctaattgtgtgggttgaatatatgagtagattttggcacctttgcctattgggttcgcggtgttcttggttcacttggcaaccatccctatcaccggcactggtatcaaccctgctcgtagtcttggtgctgctatcatcttcaacaaggaccttggttgggatgatcactggatcttctgggtgggacctttcattggtgctgcacttgcagcactctaccaccaggtcgtaatcagggccattcccttcaagtccaagtgattcaatcaaaccgttcatgcttaatcaagttgggaacaacaaaaaaaatcaaaacaatgtttttgggtttcggtttcatttcaccaaaatgatcggtttatctttttttttttaattttaatttaaagtctttgtattttgtatgtaaaaatgtaaaattatgattattaggtggtgcatgtgttgcgtcatgggccaatgttatcctctgcttttaagttggaagaggcccagctcacgtgtgatgtacggctg

SEQ ID NO: 97939 - DNA, 623 bp, Glycine max
  Clone ID: PAT_MRT3847_59452C.1
gcaaattacacaatcacagccgtacatcacacgtgagctgggcctcttccaacttaaaagcagaggataacattggcccatgacgcaacacatgcaccacctaataatcataattttacatctttacatacaaaatacaaagactttaaattaaaattaaaaaaaaaaaagataaacagatcatcttgatgaaatgaaaccgaaacccagaaacattgttttgattttttttggtgttcccaacttggtttgattgaatcacttccctgattacgacctggtggtagagtgctgcaagtgcagcaccaatgaaaggtcccacccagaagatccagtgatcatcccaaccaaggtccttgttgaagatgatagcagcaccaagactacgagcagggttgataccagtgccggtgatagggatggttgccaagtgaaccaagaacaccgcgaacccaataggcaaaggtgccaaaatggggacgtgagagtctctggcgttacgtttggcatcggtggcggagaaaacggtgtaaacaaggacgaaagtgccaacaatctcagcaccaagaccatcacccttggtgtaaccaagggcaacaaagttggcaccaccattcaacgta

SEQ ID NO: 97940 - DNA, 409 bp, Glycine max
  Clone ID: PAT_MRT3847_59453C.1
caagcaaaaagaaagaatcccaggcgaggagaaagatggaggggaaggagcaggatgtggcggtgggagcgaacaagttccccgagagacagccgattgggacggcggggcatatccaaaacgacggctaggacttccaagagccggcgccggcgccgctgtgttgacccgacggagtttacgtcatggtcggtttacagagcaaggatagcagagtttgtgggcacttttctgtgtttctacataaccgtcttaaccgttatgggagtcgccggggctaagtctaagtggagtaccgctgggattcaaggaatagcttgggccttcggtggcatgatcttcgccctcgtttactggaccgctggggtcttatggggacacataaacaccccggtgacatttgagctgt

SEQ ID NO: 97941 - DNA, 1034 bp, Glycine max
  Clone ID: PAT_MRT3847_59454C.1
ttttggacccaaaatccagattcattaaagtcaagcctacttcacacaatgtcataaattcatttctgaatagaactagccatcgtgcatatttaattcaaatgataaactgtcttcctttagagcatctatagaccatgattttcagagacattacaagaccagtaaaaaaaactatagcaagacaaaagcatgggcaaatcgaaaagaaagaagtccaatgaaaattagggacagagttactcaagctgaaggaacaggaacatcctggacagattcacgccatgcgtactctcttgcaccatccttgtccacaattttaataacaaagttcggtggtgcaacaacgagcctggatctgatctccataatgcacttatcaacgagatcaactgcttcttcaactgacattccactatggtagtgtctgtccatcattgacagtgaaaaataggagccataaccaaaagcccccttttcaagcttgtgaagcgttgcaatgtagtcaatatagtatagttcagggcccgtctctttgtcataaccagcaagaaggatgttcacagagtatgggttcttgcggagagcagtggcgagttcgccacgcgtgaaattggcggcggcggcggtggtaagagggatgccgttacggaactgatacaaggcgacgttcttctgaatgtactctgtgaactgaaccctgtctccgggctcgccgctagcggcaatgagtttgtgggaatcgaggagcatgatcttgtcctcgttggacttgtggacgaggatgctgtgcaccgccgatgaatcagccaccacgatcgcaaacccattacccaccaatccgaatacgcactccatcactctctcttcttcttctctataccaaaggtaagggttatgctaagcccaagcgccagagaagctttatatgcggaaccaaaactgtctatcaatttttatttaccagaaatattttatatatctgctttgtcccttcagcaagttactactactacctcgccctcgagccgcta

SEQ ID NO: 97942 - DNA, 394 bp, Glycine max
  Clone ID: PAT_MRT3847_59455C.1
tcgtgcatgcaaaaagaaagaatcccagtcgaggagaatgatggtggggaaggagcaggatgtgtcgttgggagcgaacaatttccccgtgagacagccgattgggacggcggcgcatatccaagacgacggcatggacttccaggagccggctccggcgccgatggttgacccgacggagtttacgtcatggtcgttctacagagcagggattgccgagtttgtggccacttttctgtttgtctacatcaccgtcttaaccgttatgggagtcgccggcgctaactctaaatgtagtaccgttgggactcaaggaatcgcttgggccttttgtggcatgatctttgccctcgtttactgcaccgctggcatttcaagtggacacattaacccg

SEQ ID NO: 97943 - DNA, 366 bp, Glycine max
  Clone ID: PAT_MRT3847_59456C.1
gttaagccgcggccaccattatgttctaacccatacccaaccggcctcactctgcatgcggagatgcaagcccgggaattagcccaagcagtcttgaatgaggtcagaaacactgcccataacacttacaatggcagccacatctgtgatcttcaatatgcggcgtacatgcggatattttatcaacaccagataagctttcctgtaatacacctactttgggagacctccgaaaataatcacatactcgcttacagggactattacttgtacaagtttggttttgggaggaagggtggccttccgttatagtaaggggttattgtagcataccgttttatccggggattttgattctttgccaca

SEQ ID NO: 97944 - DNA, 554 bp, Glycine max
  Clone ID: PAT_MRT3847_59457C.1
cggcgcgccccttttttttttttttttttttttttttttttttttttttttttttttttttttttttaaaaagggggaaaacttttttattccccccctaatttaaaaacccccccctcatggggttttaacattttgcgggggcatcccaccggggtgggcatcaaccgtggggaatggcgacatttaaattcccctccttctcacccccccaaataaataaaaccaaaataaaatttaaccaaaggggggcataaactaaaaaacccttttcaaaaggtatcgtaagaaaactaccccgggggggggtttttttttcctttcctaaaccccaatttatatttatctaaaaaattacctctacttttaaaaaaaggacaaaggtgcccccgtgggttaaaaaaaaatggcgaaattaaaaaaaattaggcggggggcccaattatcaaaattattagcgtggggttgttttttgccatcccaaggggggcttcctaaggggaatcccaagggtgggatcttgccctccaaataaaaaccggggatggggcttt

SEQ ID NO: 97945 - DNA, 629 bp, Glycine max
  Clone ID: PAT_MRT3847_59458C.1
agacggcacgcccctttttttttctttttttttcttttttttttcttttttttttttttctttttttttttttttgaaaaaaaaataaaaagatgcatatatgactcgggggttatttttgattttgcaaattacacaatcacagccggacataacacgggagcggggccttttccaacttaaaagcagaggataacattggcccatgacgcaacacatgccccacctaaaaatcaaaattttacatctttacatacaaaatacaaagactttaatttaaaattaaaaaaaaaaagataacccgatccttttggtgaaatgaaaccgaaccccaaaaacattggttggatttttttggggggccccaacttgattaaacatgaacgggtggattgaatcacttggacttgaagggaagggccctgattaccacctgggggaaaagggctgcaagggcaccaccaatgaaaggccccccccaaaaaatccagggatcatcccaaccaaggcccttgttgaaaatgatagcagcaccaaaactacgagcagggttgataccaaggccggtaatagggatggttcccaagggaaccaaaaacaccgggaacccaataggcaaaggggccaaa

SEQ ID NO: 97946 - DNA, 713 bp, Glycine max
  unsure (1)..(713): unsure at all n locations
  Clone ID: PAT_MRT3847_59459C.1
tgattctgtttttaacattctagtaagcttcatttgttttgtagtaaattattcttacgcctgctgcatttttttataggccttgcgtctgctgcattgtgtcatcattactcaaacctccttatagactgtttacttggaacttctttaagatattggtttaagcatgtgaatgatttctatatgcagactagttgccaatgaacaaagatagtgggttaaaagactttacactacaatttaagtagcagttttactcaagatttctctgaatatactttagaatattcatttgcttggagaaattctactgaacttgtatgttatttaaatgttaccagaatttcaatttaaatgctatttatattgaagagttcattcttgaatctgataaattacatcaaaagcttattctcactaggtggggttgggtaccttgattgaagcgactgttctattttaaacttaaaaaccaaatttttggaaggatcaagggctttttcaatgaatcctatagttttttggttagncatcgtcttctttttgtcacactattctctacctcatcaactcttcttacctgggcctcttttggcttctccttgcatgaccaaaccactttttccttatagatgcctctaactctnatatcctttttttnacatctcattttctacctgaatatttcatctctgcaacactgataaattact

SEQ ID NO: 97947 - DNA, 757 bp, Glycine max
  unsure (1)..(757): unsure at all n locations
  Clone ID: PAT_MRT3847_5945C.1
ccacgcgtccgggaagtgggaaaattgaatggcaggaacttttggaagaggcagaagcaagtttcagagtggtggcagttgcacaagcaacaagaagtgcaaagctgggagtgcaaggaatcaacaacccattaggaataagtgcaaagcttcattaaaagctggaagaggaaaatcacaacaggggtctgactctggatcctaacaggaattatcatcatcatcatcttctgcatcaacaacctcatcatcaaaatctgattctaaattcaagaaggcatgtaacaaaccaagaagaccaagaatctcatcctcaccaattccatatccaattccaacaacaaagggaacaacaatcctacacagctttagacacggaactcttaaacccactccaaccaccaaagaaacggtcttgccgcccgcctcttccgccgccaccaccttcctcgcttactttatccgaacatgcaagaaaaatgggagaaccacaacaccctcaccagcaccatcaacaagcagcagcaacaccgtcgagagcggcgatgagaggcggcggcggcggcgagattgtggaggtgcaaggcggccacattgtccgctccaccggacggaaggaccgccacagcaaggtctgcactgccaaaggcccccgagaccgccgcgtgcgcctggcggcgcacaccgccatccagttctacgacgtccaggaccgnctttggctacgaccgtcccagcaagggcggtcgactggctc

SEQ ID NO: 97948 - DNA, 2693 bp, Glycine max
  Clone ID: PAT_MRT3847_59460C.1
gaaccaaaatcagttataaaaagcaatttggaaaaattatggtcataccttgctttagagatgatcatcataattttaaaaggtgtctaaatatgtcaataataagataaaataaaataaaataaaaagatgcatatatgactcgggggttatttttgattttgcaaattacacaatcacagccgtacatcacacgtgagctgggcctcttccaacttaaaagcagaggataacattggcccatgacgcaacacatgcaccacctaataatcataattttacatctttacatacaaaatacaaagactttaaattaaaattaaaaaaaaaaaagataaacagatcatcttgatgaaatgaaaccgaaacccagaaacattgttttgattttttttgttgttcccaacttgattaagcatgaacggtttgattgaatcacttggacttgaagggaatggccctgattacgacctggtggtagagtgctgcaagtgcagcaccaatgaaaggtcccacccagaagatccagtgatcatcccaaccaaggtccttgttgaagatgatagcagcaccaagactacgagcagggttgataccagtgccggttatagggatggttgccaagtgaaccaagaacaccgcgaacccaataggcaaaggtgccaaaatggggacgtgagagtctctggcgttacgtttggcatcggtggcggagaaaacggtgtaaacaaggacgaaagtgccaacaatctcagcaccaagaccatcacccttggtgtaaccaggggcaacaaagttggcaccaccattcaacgtaccgtattttgttttcccctcgaaacccttcaccacgccagcgccacaaatagcacccaagcattgcattacaatgtagaaaatcgccctgggcaacgacaacttcctcgccaaaaacagcccaaatgtcaccgccgggtttatgtgtccccctgagatgccagcggtgcagtaaacgagggcgaagatcatgccaccgaaggcccaagcgattccttgaatcccaacggtactgcacttagacttagccccggcgactcccatgacggttaagacagtgatgtatagaaacagaaaagtggccacaaactctgctatccctgctctgtaaaaggaccatgacgtaaactccgtcgggtcaaccagtggcgccggcgccggctcctggtagtccttgccgtcgtcttggctctgcgccgccgtcccaatcggctgtctctccgggaacttgttcgctcccagcgacacatcctgctccttcccctccatcttaatttttctcttctcttcgcctcggataaatcaatcatctttatgctcttctccactcttatatagtgagatgtattgtacatttaagagtggagaagagcataaagatgattgatttacagagttgcagcactctcagcggagccagcaatcacagtgagcaagttgttaccaaaagggtcactgagatgttttgctaagttctcaactggaccttctccagtgacatatgcttggaagtagaaatcaagcattgcaaacatagctagtctaccattcttaatttccttcacctttagaagtgcagcttggtctggatcctttgctagtcccaatgggtcgaatggaccacccggatgaagcttgtcttccaagtccaggccattaataattctgtagtactcagcaccacccacaagaactatctcagcaacaacagcaagaataagattgatggggataggtttcccgaagtagttcaatgtacccccatcaagaagcaaagctccagtctgcattgattccatgaagatcagctcaatgtaaacaatacaattccaaattttcaattaggccattttaaaatatgctatgtgctaactgctaaattaaaaacctgtattgaaaattaaaatagattattagttattcaataaacaagattaattcaagactcggtaagaaaaaaatgaatgcagaaaatagaatataacgtgtaaaataaatggaaaggatgttcaatctgaagtcaatagaatggtatttgtccatggcatgaactcaagtaaattggagttgttctgctcatgggagaataaggctcctgttttgcaactgatcacagaagtgctcctagcaggctgtagcttagcatcagaaacttttccaaattttacagtttgttaaggcaaggtgaagtttggaaaatgttttaagacccaacaaatttatacacaacatatgatttccttgtgaactaagagcagtgagttgaagaaacatatttttcccatgtctaacagctttcactcacaattacctcctaggctcctacccaaaaggaacaagaaaaaaagaggaagcattttatcaattacaattaaaagatattaagcatatttttgggttcgagcaaatgaatttcacccaaggaagcatcaacaagatttacatattgaattgaggcattcctttcccggcccatctttcaactactatccactttccagcagataatatgtatagctagaaataccaaatacatgtataatcgcaagttgtttacacaaaacatagcttagacctgtgttatgaggcagatctaaatacttaatttgttgagtcataaaatcagtgcattaatgaagttaacaggggctcgagcc

SEQ ID NO: 97949 - DNA, 379 bp, Glycine max
  Clone ID: PAT_MRT3847_59461C.1
ctgtgtgacaccaggaagagtctaccaacgctaccatgaaacacaaactccttgacggcgactatatattaatgagattgacatcactgggcatgatcgctctgagcttcatgtaactcaaggttttgaggattagaaccacgggaccgagattgccaaggaacatgaagccagaatggaaacagtgatggaccgaacacacgctagactgatacacagatccggcgggttgaaacacagctttactcggtattactatatcacaacgactgaactgtatttgactactcaggctgtggcactcgcatagaaaatgtgcagagtgatcagaaaatgtaggaaggaaaggagtatatgtcagttaatatgcaataatcac

SEQ ID NO: 97950 - DNA, 1105 bp, Glycine max
  unsure (1)..(1105): unsure at all n locations
  Clone ID: PAT_MRT3847_59462C.1
acatgcatctcggcaacggatatctcggctcttgcatcgatgaagaacgtagcgaaatgcgatacttggtgtgaattgcagaatcccgtgaaccatcgagtctttgaacgcaagttgcgcccgaagccattaggccgagggcacgcctgcctgggtgtcacacacaatgactctcggcaacggatatctcggctcttgcatcgatgaagaacgtagcgaaatgcgatacttggtgtgaattgcagaatcccgtgaaccatcgagtctttgaacgcaagttgcgcccgaagccattaggccgagggcacgcctgcctgggtgtcacactcactcactcactcactcgcaagcaaaaagaaagaatcccaggcgaggagaaagatggaggggaaggagcaggatgtgtcgttgggagcgaacaagttccccgagagacagccgattgggacggcggcgcagagccaagacgacggcaaggactaccaggagccggcgccggcgccgctggttgacccgacggagtttacgtcatggtcgttttacagagcagggatagcagagtttgtggccacttttctgtttctctacatcaccgtcttaaccgttatgggagtcgccggggctaagtctaagtgtagtaccgttgggattcaaggaatcgcttggggccttcggtggcatgatcttcgccctcgtttactgcaccgctggcatctcagggggacacataaacccggcggtgacatttgggctgtttttggcgaggaagttgtcgttgcccagggcgattttctacatcgtgatgcaatgcttgggtgctatttgtggcgctggcgtggtgaggggtttcgaggggaaaacaaaatacggtgcgttgaatggtggtgccaactttgttgcccctggttacaccaagggtgatggtcttggtgctgagaatgttggcactttcatccttggttacaccgttttctccgccaccgatgccaaacgtagcgccagagacttccacgttcccattttgggcacccttggcaattgggttcgttgggtcttggtcacttggcaaccatcccataaccggactggattcaancctgttgaa

SEQ ID NO: 97951 - DNA, 330 bp, Glycine max
  unsure (1)..(330): unsure at all n locations
  Clone ID: PAT_MRT3847_59463C.1
aatanttctcttttangccacaggcaaaggagggaaacttttaaacgttcagacgaacagctcaaaaacataagatctgaggcaccgctttccctcaaacaagaagcaagaatgccaaaattataaaagtcagaccattttaaaaagctaacaggcctaccgacacagatgaaaacacgggctctaggtctataaagatcagaagccattaataattaaatttttaatctccgtatctacgactacaccagttagcttcttagcatcagccctttggttttatgggttcaggcggaccggaccaccaccggcaagaggactggacagcga

SEQ ID NO: 97952 - DNA, 427 bp, Glycine max
  Clone ID: PAT_MRT3847_59464C.1
ggggaaaaatcccaacctttaataattcataggtaaatttattaccttggtaaaagttaccccattcaaagcagtccattttggaaaaatttccggaacccttttgcagaaagttttggaaatcgggtcaaattatttttgggatccccaaaaatcaatcccaatcgggggttataacccttactccattcaaaggagtccagccgggacccgacaaaaaatccctttacttttacgccatcccttattggataatcaacattcaattgatgaccattatggtaatcaattctggaaaaacccctaagagattccccaggggatagtggtggaacctctaaatcatttattccacttttcgggttttaaaaccagggattggtgtcccgggttttgtatccgggccgcaattttttaaatcccttgg

SEQ ID NO: 97953 - DNA, 443 bp, Glycine max
  Clone ID: PAT_MRT3847_59465C.1
agtcactgggatggagattttgatcttcaaatggaccacgactacgagtgccctattcgtacgccttgagccttaccttgcgaaacgtacccctccattgcagacgacgatatcatgctgctgctgtggcagcaacggccaggtctaggggcagagccagaaccaacggtcactgagaaaacttgcggcggtgaccaactccgacgacgcctctgacgccggttcttcaatggcgagagagattcgaccgctggaggagaatttcaatcaggatctgttgatgcacgaaagcgaaacggcttcgtggctgcactatcctatcgacgacgacgagcctgcgacggatcaaaggttcagcgccgattttctctattctacgacgacgactgctaacaacagctgcatgctgcataccctgcgtcacacgtatcagatcacggagc

SEQ ID NO: 97954 - DNA, 529 bp, Glycine max
  Clone ID: PAT_MRT3847_59466C.1
ttttatatcagctgctctttatgttgattaattgtacttaatagggttaaaaaataacttttattgataggagactatgtgtgtttgaatgtaaccagttatattcattcattttaatttttctgttttttttaaacacattgtaattttacttattagtttttgaatttacagaatgctcctttagattttggtactgatgacttttatattgcaagaaagagtagcatagaatcccatctgcagcaaattcgtgatggcatggctgaggagtttcttattaagtcatgggaaacacatattggaacaacatgtagaggagttaattggggctgccattctttagatgagcttcgcgctgatgtttcttgtgttgggggcacttgcttggcatctctctgcaaacttctggctcaagactatcggagctgatctagtggaatgccggatttgctgccatggcgtttccatggagaatacagtggtgaagccaagcttgttgaagtgaaaggccccaggcacttgcttg

SEQ ID NO: 97955 - DNA, 433 bp, Glycine max
  Clone ID: PAT_MRT3847_59467C.1
cccacgcgtccgcccacgcgtgcgcccacgcgttcgaaataagagcagaggcggaggtagtgactgtgctatctgcgacctaggattacgagcccacctatgtatcacgctgctctgcttgacccattaatgataactgatgctgcaacaccaaaatcacttcattctaaccttgcttcaacagaatctcagagctacggagacaatgtatgataaacatccatgcttcttaagaggaaacacctataaactactcccaaagcgggagcacgggagtgaacaagccaagaaagagattctgcattatttccgtacaagcagatatatgaaaactaggagatttgactaacacataatgtttgaatcacgaatagttcggtcagaaagcatggtaagagtcaagggtcgtattgccaagatggaacatgaacat

SEQ ID NO: 97956 - DNA, 701 bp, Glycine max
  Clone ID: PAT_MRT3847_59468C.1
attttaatggagggccagtcacatgatattctgctatagggggatttatacacaatatttgaaccctaaggtttaatataaacatggtccaaagttgaagggtgtaaggtagaatttactcaaaattgaatgaagaacagacactaatctattaatttggcaacatgatggtgattgtacctttccactcaacttttatctacctcccttacaatccactcccttctttctaacagaactcatgtcccccctcattttcccaggtatgaattccgttattcctgtaatgagaattgtcagtgatcctctctctactgccccatgctagctgtgcctctgtgattttgatttcccattctagggtacaccttaattgcgcatatatataatgtgtgaatattttgtaagatatattaaaactgcagtatgattaacaacatgcagtactttattgacaatgacaataaataacaccatactagttaaagtcaaaattatatatcatataaataaaatgaatatattggaaacaaatccaaaatccaatgctctcatagtataaatttctactgttgtcagatgaaatgtataccaacttacttctgcagtcattcctttcttcttttccttctcactttggtaccagtcatagattggaataaaatcacaatctttcaagttctggataacatgatttcttc

SEQ ID NO: 97957 - DNA, 265 bp, Glycine max
  Clone ID: PAT_MRT3847_59469C.1
acggctgcgagaagacgacagaagggtttggcaacaaaacacgccggtcataattattttcattggattagtaaaaacaaaaaaaaaccctttcagacagaaataccatatatgaatcacctagattatataatatatatatatgatcgtgcagttcagtaatgatttttatatttgagtggatatattccaaatttgttgaaattgtactatcatcccttcgatcaatttctaaaatcagtaaatatctatatatggttagaaa

SEQ ID NO: 97958 - DNA, 1392 bp, Glycine max
  Clone ID: PAT_MRT3847_5946C.1
gtagctttgtcgtctacgcgtaaacagccagggtcgttttggaaatggtacgcttcgattacctgtgcgtggtggacccggaacttagacctttccatttaggtatctttatgcattgcttttcctgattagatcttcaactttgccaatcatctacaccataagcagtttccatcaggctctctcttcatgccacggcggctggatgccttggagaatccttaatttcatcttccacctacgatctcctccgggaactcatctactacgaccgagacgtgatgagtctctgggctgattcaagcttgaatggaaaaatttggctttatggggtttagcacattggcacagccttaggaagaatccactgattccatctcattctcttcagggctccaccctttcgccatcttaatgtaccctcttgcaattggaggccttgtcaggggtttttcccctctttattcaccgccatgtcatttttcactggaggagttattttcataatggtacccccttgcattaagcgactgcatttgcgctatcttcctcaaaattacttccttttacttcttgtgtctttttaacagctacaacccctgttacacgtgaacatgattaaatctgtcatggcgcacattttgcaggttcttttgtgaattttatcatcttatttttgattctactacagccaaagtcgctggaaatgtggccactttgttctaattggtgcagttaaaacctctgataaatggattttaacatcttgttgaaggctcttggtgctggacttttctgcgtttggcaaatcaggtgcgttctgcatttggtatgcttggatgtgagctgtaggggtgtgcgtagggttcacggtggggtcggtcgctccggcacgagttaggacctcgtttggagttgcgttttgcactgccattgctggaattgtggtactgcttttcgggaacatcagtgatgttggtggtgctgttgctgcggggcacgttagagatgaatgcgagagaagttcggctgtgctgcctggcttggattctaaggaatctgcacgcgtttgaataatggaaactggaaaatgaagaagattattattgttgttgtcttgtgggtcatatgattctttgcaaaatgatgttaatgcatgcaagagtagtattataaggtttctttttatgattgatttttagatgtattctggtagttagttttactgttgttgtgcatgcatatgatgtttggtctctgttgaggatttgggtgctgctgctgctggcttgtgtaactgtcttagtattttgtcatatttgtttctcttatacatcatttctgcctataaatctacgtgcgtgctcatgcaaattgcctaattttaaaatc

SEQ ID NO: 97959 - DNA, 903 bp, Glycine max
  Clone ID: PAT_MRT3847_59470C.1
gaattcggcacgaggccattaccacttgtccactttggcggagtggctgcgccgctgttattacccaatactaccggctacccaggtcagctccccttctcttctcttcccatatttaataagcgttgagatctacaaccaatacaaactcagcccgacccgaattcattgtaagagaaatgatactggtggcgattgtggcggaggtgctggaggagtacacggcgttgctggcgagagtgctggagcaggttttccgttccgcccctgtccctcgacgggttcgttttctcatcctccgagcgcttccctttgtttcttctcgtcctaggaccattctgccccctcctaccccttcctattaggaattatggttctccatcttcattaacactggaattgatacatgttactccgtttggtttaaccactcacatatatatatgcttgtttgtgtaccccttcaatcctttggttgttaagcgaccttaaccaatcggatagaatcacaccatatactcttgtgggaatatcggattggttagtggttgatagattcctataataacagaaatgcttaacctagaaagaggatcacacttaacacttgaatgttcttcaactaggtctaattataacaattattagtaatattttgattttaattttgagtttgagctgcatgcaatgcattctttggatcaactctgtagtctcaattcccagtcactcatgctcatggcctgccctgcatcactctagaaacttctttcacctctttaactaattattattattagtttaagctctcaactaaatgagatgtaatattttttttttatcctcgtcgcgccataataaatgtcataaaaattgtgtataaatataattattattctaatg

SEQ ID NO: 97960 - DNA, 342 bp, Glycine max
  Clone ID: PAT_MRT3847_59471C.1
gtgcgacacagccacgcacgggtacgtactacaacggaggattgtccataccctagtcaggtgctagcttgcgtgcaaggtcgagtccatgcgagtcagccatgtgatctcatacgacggaataccggccctaaaccaaatttattgaaagcagtgacggctgtccaacctaatcctggctctactggccattatattcactggcatcactgtttaactggcgccatgtctctgcgcatgggtccacaagagccctgctcgtctttactcatgcagagcgatgatctgcctgtgatcggtgaccactgagtgcagggaagctgcttatgactcacctaatgc

SEQ ID NO: 97961 - DNA, 779 bp, Glycine max
  Clone ID: PAT_MRT3847_59472C.1
tctctacgcgtccgggaatggcataaattatgttatacttgtacttcttaccatcaccattctgttctgtccactgctaatgaatatcttcaaatccgttttttccgaagacccggatcctccacgacccggatccaaccatgcatcgccagacaaagcaccggatccccattccccgccccgatcgaatgccaccgagtccgctgccggaggaggcggcggcgacggttggaacttcggcggcctcatcaaaacccttacatcgaaatcggaatccataattgagacctaccgtcgcgatctgcaggaattcggcaccggtttgaagaaagagatcgaggtcgcgcagggttctctcgggaccgtgggccacgtcatcgatgagttcggaaacaccgtcgtgaaaggaacggctcagatcatatctcaaggtaaggacgccatcctcgccgtcaatctcgattccgattccgatagtaacagcgccaatagaaagagcctcgattcggttcggtacagtaggttcgacgctcaggttcgtgctattcagggtgatgttagcacttactccgaggagcccgaggatttgaatgagttcaatgagtggaaattagggttttcgttggaggggaagggtgaggaaatggaggggcttttcagagagaatgatgctatggagagtgtttacaaaaaggttgttccaaatagtgttgataatgaaactttctggtataggtattattataaaggtttataagctcaagaaggctgaaaatgtt

SEQ ID NO: 97962 - DNA, 296 bp, Glycine max
  Clone ID: PAT_MRT3847_59473C.1
gtttgaattccgggtcgaccaagccttccggacccttggcctttttccaagacttttttaggatgagaatattccaaccgggggacacactcttgtgtagcgtaacataaaattcgcagcagtgcttcatggaaagatcatgcactttaaactttgtctgatacttcagcgcgctacatcactcaagagggtttttgggtcaatcctatcaccctttatcaagagctcgagagagaatgtaataaccctgatatgaaggtgtgaaacatacgcacaattgatgtaccataccgcac

SEQ ID NO: 97963 - DNA, 497 bp, Glycine max
  Clone ID: PAT_MRT3847_59474C.1
aacccaaaaccccaatgggggatttaaaaaaaaaacccgttaaaaccccccccgagagggggaaggccaccaaaaccaaggaaggggaagccgcaactaaaaatagggccaaaatccttggaaaaaaagggcccccgggggataaaaaaaccccccccccccccgggttggggggggtgggccccttggacaaaataaagcaaaggggaaagggggaccgggccggggaaaaacctttttccattttgccaggcaaaaagtaggaagaaacggggtccaccccggggaaaaaggggaaattcctccccccgggaaaagaaacttatttggccgggaaaggaagggggggcccaaaagggattttggaaaaaaaaaaacgggtaaaaacgggcaaaccctgggttttttggggagcaaccccccccgaaaataaacccgggggggggggggaaaaacccccctggttttggcagcgttaaacaaaaaaaaagggggcg

SEQ ID NO: 97964 - DNA, 439 bp, Glycine max
  Clone ID: PAT_MRT3847_59475C.1
ctataggtaagcgcacgccgcaggtacggtccgaatacgccgaccaccttcgagattcgtttaaaaaacgaagttagctcgaacaggtttactctgactgatccaaaacacaaagggccccgtctatagatccagcttctacccgccatgcacctataggtatcataagaccctaattcaattgactgtccgtggttcacaacgaagactgtgaaaaccctgcgaccccaattaacccttgcatacatccatttctgagctgccaaaatatcaatagcccatcaatggccttctaactgtgccatctgaatggaaaggcaccccctgtattaatcataagcccaccgcggagaggacccagatgacgctaacttgcatctcttaaccccgatatttgatatttcattctttctcccacgtcccagatatcccatcaagc

SEQ ID NO: 97965 - DNA, 869 bp, Glycine max
  unsure (1)..(869): unsure at all n locations
  Clone ID: PAT_MRT3847_59476C.1
ttcggcacgaggtcatcctaactaagcattatttagaattggagatttttttggatattttagtaacaagtttgcttccatgagttctcagttgtgtgtcttcatatgcatatttattattagaatttcagctaagcagattgctattatttcaagatccatttgggagctatcttttcttagttagccaatttattgtgcattctttttaacacgactcagaaaagttccttggttctaaaggttattacaaaacatggtgagatgcctgcaagaatgcaagatgcaccatcaggtattagattcctaagaaagacgactagcctattacctactcttacattcaagggaatgcaataattactatatttatttttctcatgtttaatgggtttggcttcctttcagaaactggtggagttatttactagagccaaatttttttaattaatttaattggaatgcattgctaatgttaaaggtttttaacactattaaccaatccatggattgtcataacattgaaaatcattgacttttatgatagttacactaaaantcctagcaagattgttatctaattgttttttttccttctctttttganaagtaatgttgtctaattggttaataatataaaaaatatctatattgaccatgttntctatattttttttaatatatttccctgggaaaattaaaatttttgtttaaanaattttggttttatgacatatcattgatgactccnttttactaaatatttttgttgtaaaaataaataataaacaccacttccctcttgatcacccttaccattaaaccagggcacggtttattacntgcctaggccnaaaaaaactacaata

SEQ ID NO: 97966 - DNA, 381 bp, Glycine max
  Clone ID: PAT_MRT3847_59477C.1
aaaaatttaaaattttatgtggtttccatcattttttttctatcaaatatttttttacatttttttttatttttttctttcacacaattaaattcaccttaaccgtgtgtttggtagtgaaaaaaaaaagaaaatttgaaaattttgtataagccccacgtctattgtttttttattttaattcaaatatctcttggataattgttttttctattttttctcttccatctaatcaaattcatcttaaaagatccgttcttaatcttaggttcgggagtcccgaagctggaggctgctgtcccttttcctttatccacttttttttttccattgcgttatttatttgcccgtgtccctcactcagtcactcactcattctct

SEQ ID NO: 97967 - DNA, 1129 bp, Glycine max
  Clone ID: PAT_MRT3847_59478C.1
ctcgagccgatgaaaatgtcctgtaagttacatgatgtgaagttgcaaatgctttggagatcaccaacttcaaaatgcagctactgctacttgtgtggcacttgttcttcgcaatttaggatggagtatttctgataaatctattaggtatggtttagaggatacataccttcttggaaggagtcaatttctaacatctgaagaagctgaggtattaggacttactggatcaacagtactgcttgatggagcccacaccaaagaatctgccaaagctctgatgaataccataaggatggcatttcccaaggctcaattggtttttgttgttgcaatggcaagtgacaaagatcatgtgggatttgctcgagagattctctcaggtgtacatgtggagactgtccttttgacagaagctgctattgctggaggtgtaactcgaacaacaccagcatctttgttgagagattcttggattaaagcttctgatgagcttggcattggtattgttcatgatggaatggcagaatacagtgaattattaaaggaacaaccagtaggctctgaaagcaatttgggtgatggtaagaccgtgttggctactgtgccatgtttaaagggttgtttgagaagcgcaaatcagattctaagcagacgaggggatgaaaagcgtgttattgtcttcaccgggtctctgcatattgcagcttcagtcttagcttctcttgctggttaatggggttttatagtgaagctactgaaacggaatttccctgcaataacaacacaaaaattaaggccagatggaatcttggatgcctttatattaactttcatcatcactgttttctgcttccatggaatgaattatagtcccaatgcggcagctctcgactggaattttggatgtcaataatcagcattcaacagtaatctattaatattgtgtttgacttaaagtttgagatgtgattttcagaggttattagttatagcttttacatcctaaacgtgattttctgttttcaaagagtttccaaacacactttctagaatgaatattttagagataatgcaaggcatttttaggatcctaatgagcttaaacccccccaataaaggcgcggcc

SEQ ID NO: 97968 - DNA, 380 bp, Glycine max
  Clone ID: PAT_MRT3847_59479C.1
caaaaatatgtggtacaagggaatacaagtgtgactgtggtaccatcttttgcagaagagacagcttcattacgcacagagctttctgtgacgcactagctgaggagaacaacaaagccaacgaaggacaattgccaaagataggtccaaacttgcaatgtcaacaaatcccaaacctcgtttcatcattaccaatcaacaccaacagcattgttcccaaccctgcacaaatgggtggcaccacctcggagttcaaccatgctgatcacaagcacccactatcactcccacacgagctcatgccaatgcctgcacaaaaacccttcaacaacaacatggctgcaggaacagtgttcacgagaagcctgtcatcaacctct

SEQ ID NO: 97969 - DNA, 234 bp, Glycine max
  Clone ID: PAT_MRT3847_5947C.1
aaaaaaaaaaaaaaaaaaaaaaaaaaaaaatttaaaaaaaaaaaaaaaaaaaaagaaaaagagaaaagtggaactaaaaaagagggaaatgcctatagtaatagaaagctagctggtactaaagattatgcgttcttgggtttccatccaagtcagctgaatccctgctggctgtgtcgtgccagtcctgtgcaagtaaggcgaattgtaaatccgtgtttcttacttttgaat

SEQ ID NO: 97970 - DNA, 585 bp, Glycine max
  Clone ID: PAT_MRT3847_59480C.1
ctcactctctctctctctttgtcacccagatcttgtaccaatggcaagcgctcccactccacacaaagagatcatgtacatggcaaaactggcggaacaagccaagcgctacaaggatatggcggaattcatggagacggtctccagctccgtcgagagctaggagctgacacgtggaggagcgcacccttctctccgtcccctacaacaacgagatcatcgcgcgccagtcctcctggcgcatcatgtgcttaatcgagcagatggaggagagccgaagaccaatgaccacgtagcgtcatccgagactagccgtccaagatcgaagccaagctctgaaacatttgcgacggaatgctcaaactcctgaacacgcgccttgtccgctgcgacgactgcggcgactacaaggacttctacctcatgatgaaagcagactaccacatgcacctcgccgagttcaagaccggctctaatccgagggaggccgaccagagcacgctgtcctgctacacagcctctcacgacattgctcataccgagttgcctacgactgaccctatgaggctgcgtctagctctgaac

SEQ ID NO: 97971 - DNA, 1496 bp, Glycine max
  Clone ID: PAT_MRT3847_59481C.1
gccatctgctcctgtgaagtgtgcgtgagaaaggaacagagagaagaaaaaggaaaaagatggaaggagagaaagagaatcccgattgtaacgccactttggtgaactccttctgcgaaatcacttcctcttccaaagaagaagcccttttctttttggagagccacaatttcgacctagacgccgccgtttcgactttcctcgacaacgccaacaaccctctcatccctcaaaacgacgacgtcgttgtcgccgcaaacccaaaccccaactccgtttcccctccctccgattctcactccccggacttcaacccttccaggtctccttcgccgtctccgtcgccgactcgcacgccctacgagctccgatcccgcaggtctctcggcaagaaaccctccactcggcgccaaggcaaaattcgcaccctcggcgatctcaaacgctcctcccgcgatgatgattccgattccgatcccgatttcgaacccgacgagtactacaccggcggcgaaaagagtgggatgcttgttcgagatcctaccagaggaaacagcaacaacaacaacagtgtggatgatatctttgatcaagcgaggcaggttgctgttgatgcacctccggagaatcctcgaagctcgtcgaggtcgggaagttttagtggcacggcgaggttgctctctggagagagattgccatctgctgctgctgctgctcctgctcctcagcgtgtagaggaagttacccacactgtcactttctggaggaatgggttctctgtcaatgatggtcctctacggaggttggatgatccgcaaaacgcaccgtttctggagagcataaagaagtccgaatgtcccaaagagcttgagccagcagataggaggactgctgtccatgtcaacctcacaaggcgggatgaagactaccctgaaccagtgaagccacgccatcgtgctttccagggtgttggaagaactttaggtagcaccagctccagcaatgatgaacctattcaaacaactggtgcttcaccaagtactgctccattgccaacaatgggtttaattgtagatgaggcacagtcagtgacatcaatccagctgaggttggctgatggcacacgcatggtttctcgcttcaatcaccatcatacaatccgagatgttcgagcattcattgatgcatcaagacccgggggtgtaagaagttaccaactgcagtcaatgggttttcctcccaaacaactcgctaatttggaccagactatagaacaagctggtattgccaactcagttgtcatccaaaagttgtaggttgtttaccagattctattttcagtcgacttgaaattactatttttatgcttaaacattgattgatctacttatattttattagtgaatttgataaaaatgttcgttgttaggatattccatatcctaaatttgcttttataagagaaatgttgtgtcaatcgagacaaaattactagg

SEQ ID NO: 97972 - DNA, 783 bp, Glycine max
  Clone ID: PAT_MRT3847_59482C.1
aaattcggctggagcagaaatggaaggagagaaagaaaatcccgatggtaacgccgctttggtgaactccttctgcgaaatcacttcctcttccaaggaagaagctcttttctttttggagagccacaatttcgacctagacgctgccgtttcgactttcctcgacaacgccaacaaccccctcatccctctcaacgacgaccttgccattcccaaccccaacgccgtttcccctccctcagattctcactctccggacttcaacccttctcgctcgccgtctccgtctccttcgcccacccgcaccccctacgagctccgatcccgtaggtctctcggcaagaaaccctccaccagtcgccaaggcaaaattcgcaccctcggcgatctcaaacgcccctcccgcgacgacgatgattccggttccgatcctgatttcgaacccgacgagtactacaccggcggcgaaaagagtgggatgcttgttcgagatcctaccagaggaaacaacaacaacaatttggatgatattttcgatcaagcaaggcaggttgctgttgatgcgcccccggagaatcctcgaagctcttcgaggtcgagaagttttagtggcacggcgaggttgctctccggagagactgtgccatctgctcctcagcgtgtagaggaggttactcacactgtcattttctggaggaatggattctctgtcaatgatggtcctctacggaggttggatgatccgcagaacgcaccgtttctggagagcattaagaagtctga

SEQ ID NO: 97973 - DNA, 1367 bp, Glycine max
  Clone ID: PAT_MRT3847_59483C.1
tttcttgaccaagctatttggggaagccaccccgtccttcccttctgccctccaacaggtcacagtttcgcccccacctctcacaggatattgaacggtgcgctcacccaactttttagtgtgctctttgagtagcagcaataatcaggcgagcattccttagtccctggtcagataagcgaataacccgaccgtcatggagaggaaagtatcacctcaatgatgttaatctgggagtgatcaaggagggtaggtgtataaggaggtgaacgaagaggaggaaatgttgtggaactcttttctagaggaggcttcaatgttgcaaaaggaattgagtggtgaggttttggaccacgagacaaggcaaaggttagttgccccagtgtctgtggagcttgaaggggatcagtacgaggaatatgtcaaaactgagctttattacaaaaagcatttgctccggacacctcattgttcccttctgctgtctaactatgcacagtttctcttccttgtccttcatgatattgatggggcagaagagtactacaagcgatcagagcgaagaggagcacatgttgtggaactcttttctagaggaggcttcaatgttgcaaaaggaattgagtggtgaggttttggaccatgagacaaggcaaaggttagtggccccagtgtctgtggagcttgaaggggatcagtacgaggaatatgtcaaaactgagctttattacaaaaagcatttgttccggacacctcattgttcccttctgctgtctaactatgcacagtttctcttccttgtccttcatgatattgatggggcagaagagtactacaagaaatcagtgctagcagaatcatcggaagctgaggcattcagtcgctacgctgacttcttgttgatggtaagaaaggatgtttgggctgcagaactgagatatctgcaaacattggaagcagatcctgggaacgcctattatttatcaaagtacgccagtttcctttggaacaccggtggacaagatactaatagctttcctatgatggtcatatgattcatcatggctaagtgatggtactttttggtacaatgttccgaccaactgttacatcccacttgcatttaagttgtatcccttgatttatggtttttcctggatagttgttactacagtttttcttttttccattgtagtaagtaattcgtggaacaactatctttattcatatttaaatatgaagatgtgtttagcctgagtgatgtttagctcaaagttcatttcatgaaggaaggaggcatgagttccaactctaactttgagacctgaatgcggttccgtcgggtaaaaaaagaaaaaaaaaaaaaa

SEQ ID NO: 97974 - DNA, 359 bp, Glycine max
  Clone ID: PAT_MRT3847_59484C.1
gcattattttggaaacgccaaacagtctttgtggtggggattaatgattgatgggtgaaatgacacacatgatgttggcttgttgttcaaggatggcaatttgtaagaaagaagtttgtagagttgaatgtggaaacaattttggatttccgcttacagttatttggaataccatttttaatgagatgctcattagatatagctatgaaaaattactgcaccaggctaaatcttcaattatgtttatacaatccttcaaaaaacttgtttgttagtgtgtgtatggtgatgataacttaattagtgctcatgaatatgataagccgtactttagttggtctctattgaaatgctttcta

SEQ ID NO: 97975 - DNA, 412 bp, Glycine max
  Clone ID: PAT_MRT3847_59485C.1
tacggctgcgagaagacgacagaagggcagtatgtactgaatcagtagtattcattagaagtttaagccattttgattcttttatcatggaagtaacttccatctggtattcaaaaccaatttgaggatttgaccttggggctccaactatgttgcttttatcaagagaacttggaggaattagctgcctattagattcatgctccataatattgtgattacaatactctggctaatgaaagctaggatattggaatatggaatgaaaatcatgtaaataaagccaagaggttacgatacatatttgtgtcgtgactgagaatgcattaggcataattacttgtctaactagtaatggaaacaatattatcatgatcatttggcatatatgatggtgtatcatgaattcttg

SEQ ID NO: 97976 - DNA, 468 bp, Glycine max
  Clone ID: PAT_MRT3847_59486C.1
aaaaaaaatatacactgggtccaaatgaagcaaatcagaacacccattccattcttgtttccgggggggctataattataaacaacagccccaactgggctggaaaatttacactagaaaaaggaaatacaagtacattacagaaaaaccaacaaatcttggcttaatggttgataaattacaatccttttctcattcctttgcaacaagactttgaaaaatagtcatatgtttgctgcctgcatgtttaaagaagcattgaaaaaccaacattagctttgacgacatttatgcaaaaaaaatctcaatagtaacaaactggtagctaattgcacatctggttgctttcttgggatctacaagataaacttacaacattttgcctataatttccccaagggcaacactaaatcaaaagtctgatatttgcaagccataggccacaaaatagatcaaatataattcaat

SEQ ID NO: 97977 - DNA, 424 bp, Glycine max
  Clone ID: PAT_MRT3847_59487C.1
gaaaaggaatcaacatttcatttccaaaggttggcacacaatcaaataaaactgtaaacagctgaatttcccccccaaaattaatgttaaaaaaccgaaaacaaaccttttttccaaaaggctatttaaaaggagttttccaccaaaccagggaaatcccttaaaagcaattccaaccaaaattaccatttaaaactgtggccccctttgtaaaaccaacccccttttttaaacaggccccaccacctaagggggcccgagttctactactttctgaatttttaactggattgaagtatggatgggccatggtttttttccagtaggacgtccttggggaccatagcgaaaaaacttgccaacaaagtcaacggcctcaggaacagccaagagatgattttctacattaaagaacttcgcccat

SEQ ID NO: 97978 - DNA, 210 bp, Glycine max
  Clone ID: PAT_MRT3847_59488C.1
aatatgttagagtcattttaagatttcaaatttatggtcgcagttacatttttgtcgcattgacattgaggaaaattataaacaaatgcagccgatacagtcataacaatatcaaggcttttgaggtgttatgatcacaaacgcgattactgttatgactgtatcggctgcattgacattgaggaaaattataaacaaatgcctcgagcc

SEQ ID NO: 97979 - DNA, 2113 bp, Glycine max
  unsure (1)..(2113): unsure at all n locations
  Clone ID: PAT_MRT3847_59489C.1
cgaatcccgggcgccacgctccgccacctccggcactgggatcgaacagatctctgttccganaccaccgcctttgccaggggtcatgaagtccttttatctactgtttgtgattaacagtaataaaattaattcagttcttttcattcaagttaagttgttccattctttgccaccttttgccgccgagtgatcgaaccgaaccaacgaaccaggctcgcgagctgcacaattcggctctttctcgagccgacaagtttggtgacgactcacttctgcaccgagccacctccaactacactttttttattattattctctgccggcgtggctttctttcttcttttataaaagtcatatcataatcataataatattaatcgagttttccgcagagaaaaaaaggggtcgaacgagtgaatcagaacataagtgaagactgcgaatataggaacccaatcctaattctattgaatttttatttttagcggtggaaattcatcatcgatcgcatctattccataaatagcaaatagaaaacaatgggtaaaaagcaatcttttcggagcaaagcagcctacttcgtttctgatctcaccactggtcttctcaaccctatttctgacaacaacaacaacaacaacaaacccccttctctccctccttccggagaagaagaaaaagaagatgtgggtgagtcaaagggtggtagtgatgatgtgataattgatgggcctgatacttcgtccttcactgcgtttctctattctctgttgtctacttcggattccggggataaagtggttggtgacgataagatgaatgatggtgaggcggcaggtgatgctttttttttttctgattctctgacgaaggagagtaattgagtagaacagaggcgcctttgcactatcacacatacatttctttgggtttgtcgcaaagtatatcagtttacaaactagtgaatcagaatgttggtgaagagtgcatttatagtgacgctatataaggacgatagattgtttgttattaggtgtggtgatgaaaatccactgaccaagatttcaaagatttcaaaggttgtatacaaggtaaacaggaatgttttcttatcataacagcccgcattttttctgggctcaaaactgtttctgatgaacatcatttggaatcatggtactactgaagcaaatccactcataagccgattgctcaagcattgttgaagttagctgttcgtcagacaaagatgcgttggaatgatgtgattattgtttgtaccattactaagaccatcggtgttgataaattactagctattttttaataggctggactatgtttcagtatctaaagccaatacttctttcattggtgacttcgcaggcattgactctttaatatcatacgcagttaagaaggaaagttttgttttgaagaaatcttggttttccacaaacacttattgacatggtagggttactcaccaactgggtggatttaggaaggaagtaaacaattagagcgatgaatttccttctaagtatgaggaaatagtggaattgagcagaacagaggcacctgggatctgtctctggaaaacgtgggataaccctattgctcaagcattgttgaagttagctgttctgcaaaccaagattcttttgcaccgccgccacttgctcgtggccgggaaggggtggtgctgtacagcacttggaaacatggtatatcactttcaactctttaccggcgaagcatgctttgtcctggaatgagcttgctggttgttggagattgtaaaggggcagtgtttggtggcttggttgaagctcctctaagaccatccaacaagagaaaataccaggtccaccactcacctcttttccctactatcaaatgttgttgggcattgtctgcttcattttgcaacatgttattttttttcatcttattggcattaaattttgcacagggaacaaacaattcatttgttttcacaaacacctctggttgtcctgttatatatcacccaacaggtatctatttttcattgagtttgaatattccattctttatcaaaatcaatgattagtttgatctatttgtc

SEQ ID NO: 97980 - DNA, 716 bp, Glycine max
  unsure (1)..(716): unsure at all n locations
  Clone ID: PAT_MRT3847_5948C.1
aattcccggnngtcgacgccacgccgtccgccaccaacagcaacactttagtgagagagagaattcttcctccgtttaccgttcttccagtttgagagagagagagagagagagagagagagggtgagttggtgtgtggtttgtggaaataggaagagggtgtttttttgttgttgttgctttgaagtagtgggaacaaagagaaacaaaccccattatatcattgccacacttttctctccatttcaatactattgctgggtttgcattttgtcccttttgctccttattatcactttgtttcttcttcttttctcttctctttttgttttatgcaccgttgatccctcttttctctcaaaacattgccgaacaactcttggattcatgtgggttttatcatttctcaagcaatgataaatgcaacaaaatatttggtttttgtggattttcctttttctgtgaatagtacccttttttcttttcaaattggttttgattttgcatttggagtcagtgttttgatgcttcaggtaactaagtagcttcctgatctgtgctaggctcccattagtgatttccaaattggggtggtgttttgttgttaagggtttgcaatattgaggttttttccagtatattattatttttttggtttttagcaccaaccaggtcattgtattcacagttccactacccaattcatttttttttgc

SEQ ID NO: 97981 - DNA, 123 bp, Glycine max
  unsure (1)..(123): unsure at all n locations
  Clone ID: PAT_MRT3847_59490C.1
tttttnnaaaaaagaatcatcccttgcatttatatatgaaatcaaacattacaaatgataccttgtacaaatgtatatcacttaccgctaatattaggcataccaatcatctcttgtattgaa

SEQ ID NO: 97982 - DNA, 251 bp, Glycine max
  Clone ID: PAT_MRT3847_59491C.1
gctgatatgttgcgataactgtccatctacttttcacctagcttgtttgtccactcaggagatcccagatggcgactggtactgcactaactgcacttgtaggatatgtggaaatttggtcattgacaaagacacttcagatgcgcatgattcattacaatgttcacagtgtgaacataaatatcatgagaaatgccttgaagatagagataaacaagaagtagcaatttcagacacttggttttgtggtc

SEQ ID NO: 97983 - DNA, 157 bp, Glycine max
  Clone ID: PAT_MRT3847_59492C.1
tgaattgattttgttgaaacgcgaggcctatctgaatggtggtttttatgtggatccatatgcttaatttgtgttttttatttgtttgcgtggatagagtgtctgctgcttcctgttacatatatcctgcagttgttgttattgatacagattttca

SEQ ID NO: 97984 - DNA, 357 bp, Glycine max
  Clone ID: PAT_MRT3847_59493C.1
accggtccggaattccctctcgaccaccctacgtccaaccgttgccacaacactacatacggcttaccggattactacttagtcattatattgtggataataccactcaggtgggacctataatcatcatatgaactattaaacccataaaatcactattatcatttatcaaaggccaatctccagtagaatataccgttccctataaacactgatttatatttcatactaccaagtatcatctatctattgcaaactatttatacaacttcgatattattatgaccgaaaattataacgatccttcttaatgactccctgatattgtaacttattcttataatagatgcttgaatc

SEQ ID NO: 97985 - DNA, 423 bp, Glycine max
  Clone ID: PAT_MRT3847_59494C.1
cccacgcgtccgatcaattttgagtttctttatcattttatttatttattgacatacttctactttctgcaaagaccctgactcgtgggagatatagggaaggttatggaagttagtgtattgtcatatctagctatctttgctaattgaaaaagccttccctttgtttacagatctggataaggttgcatgtttattcttttcaactgtgaatggttctttgcatcttttttagtatatgagattaatgttttaattaggaagaagcttttagaacattacccgaatccaattcgttttggtttctgtgatcttgatgtaaatctatactaatttggtttgggcaggagaaaatgttctttgctcaagtcctttaggacgaaaatattaatatcacagggtatttcagatctctatttcttc

SEQ ID NO: 97986 - DNA, 524 bp, Glycine max
  unsure (1)..(524): unsure at all n locations
  Clone ID: PAT_MRT3847_59495C.1
aaaaagccatctggaggcattgtatattcaccaagtcaattgattacatgtgaacatggaatagatcaaactggtaagagaaatcaaaagatagtatctaatgatattatacaactaaaaccacattataataaactacataaccccacttccttaccctataataaacctatttctcaatctttatatttatattccctttgttctgctgtttggctttttcctcccctatctgacattgcttgatattttgtcacgagtattgatggggattctgcaaaattgtttggacatctacaattttttattctaaacatgaattttcttccgagattccatagacaaaagcaacagccgttccaatttgaaaagaacaaaaaagaagggaaaagagtcctaacctaaaatccaagagaccacatcgccatactagctagttaagacctagatgcttagattcaacaaagttatagtgatctttcacgggatgtttacaagctttgcacgtctngttctctgatcaa

SEQ ID NO: 97987 - DNA, 465 bp, Glycine max
  Clone ID: PAT_MRT3847_59496C.1
gtgggaacgaggctaacctcagcttatattataaggcacaatgggattggtgacaaattcccaaagggaccactcaggggaaactctatatgtcacaaaactggaaaaacaatggttgaaacaaaacaagctatcctcacgcttttacagtttattcatcccactctcttcttaaaaatgctataaagaggtttgcgttcgtatgcctgaaggcaacagccacggtccttcccttgacgccaagacttgtgtttcaaggcggcattcttacacctgctggttccagactgatatctccgctggaaacacatttcatttgtatggacgctcctgggtgcctactcatacttgacatctgcatggagaagccctagttcgctctatcaagtgtgagctgaccatgcacctcaaatacgctggtcccctatttgctcgtggtgcatgggttatcactcaaaataatat

SEQ ID NO: 97988 - DNA, 629 bp, Glycine max
  Clone ID: PAT_MRT3847_59497C.1
atcagctaggtgtatgcttctgaaactcgtaaactggttgttttctacattaattatgtcatttacaagctatcaagaattggacttcaaaatgtggagggaaaatggattcatgatttctttctgacactggcaacctgcaacaccattgtgcctcttgttgttgagtgttgacacacctgaccctgatgtcaagctgatagattaccaaggagaatcaccagatgaacaagcactggcttatgctgctgctgcctatggttttatgctcatagaacgaacctctggccatttagtcattgatattcatggataaagacaaaagttcaatgtcttgggtatgcatgaatttgacagtgacaggaagagaatgtcagttatattggggtaccctgacaattcagtgaaagtttttgtcaaaggagcagacacatccatgcttaatgtgatagacaggtcattcaaaatggacttagtaagagccactgaagcacatcttcactcttactcttccatgggtttgaggacacttgttattggcatgagagacttgaatgcttcagaatttgagcaatggcatgcattctttgaggcagcaagcactgctgtgtttggaagggctgcaatgc

SEQ ID NO: 97989 - DNA, 574 bp, Glycine max
  Clone ID: PAT_MRT3847_59498C.1
ttccagatttggttgagacgtggacaaagggctttggatttatacctgttgatgacatcgaaaggcaaagattgaataaaattaacctgatggtttttcctgggacagtgttacttgtgaaatccttgcattggaaagagaaaattgaagctcaaacaggactgtgtgatcaatcaactctagcaacagatgaatcaatcaaagcaggcatctgttctgaaggaatggccatttctgaatcaatggcacaagatattggaaacataactaccaacaaaggtgaagcaaagtcagaacatgaacctgtggatggaaaaaatcaatcagactatgaagctggcagtgaaaccggcagagatgacaaaacacaagctgttgacactgcattagaagccaaagaatcaacagaaataagtagcttttctaaagaagagaagatctcctacttggaagtgtcaggtggctcagagaaatctattgaagaaaagaatgtgaaggaattgagaacaagcaataatgcagaaatggcaaatgaatcagtacagcaatctagtgagaattgtgctgacaaaga

SEQ ID NO: 97990 - DNA, 404 bp, Glycine max
  Clone ID: PAT_MRT3847_59499C.1
tctctacaagctccagcgcgaccttgagttggatcttgataaggctgcggagctggagcacgtgcttgccatgctgcatgacatgtttgctgaagagcttggtgccaagattaaggactatgggattgactatgctgagactaagaactatatttatgacccctaccctgataattagatgttcaagactatcattgatacctccagcgttagccctggctttatgagaccctagactggacacggcattgtccacaatattaaggattagtataatgacaatggcaacaagcttgctttcactgttgcgcagattggtcaagcgattgggcatgagatatcgacagaactgggtcttctgcaagtgcttgagttcacgctggcggacattgagcactatattg

SEQ ID NO: 97991 - DNA, 375 bp, Glycine max
  Clone ID: PAT_MRT3847_5949C.1
ggtccggattccccgtcgaccacgcgtccgctcatgctctctttctctgtaatttctattaaattgtttgtctaatgagacttatctggaacactatctatgacagtttccaccaccagtcacacctacatccatgtctacatggatgtcatggacgatgtcctggacaaggtccgaaacaactgcggtactggcgaggaagctgtaaaggaacttctaactgtgcttgaatctatgatgaaacaagctatcactcaacttggccctatactaaggtccatagacagtaacacagctgctgacgcaactactactgcggcacatgctctgaacgatcatcatgacgttacctatgaggatgccactgctactgat

SEQ ID NO: 97992 - DNA, 265 bp, Glycine max
  Clone ID: PAT_MRT3847_594C.1
ccctccgatccttaactgtagggcatttgtctcaagaccagaagcaagaatactctcatggaatggtgatgagtgtcctccacatgctctatcagaacatgggtttgagcatcacacggtgaaggactattctctagctcatgctcccttctcaggctgcaacaatgctggcggtcactgcgctgcttgatatgaccctcttaagcttaatgattatactaaggatgtagctcatgacaaggcaccgactgctcttaataatgtc

SEQ ID NO: 97993 - DNA, 401 bp, Glycine max
  Clone ID: PAT_MRT3847_59500C.1
cattcttatatacatgggggggggtacgaatggtgagaacattctctgttaaccgtcataccaaaagccataactttgtctgatgcgcccaaagaccgatttatgagcgttgtactaccatttgttacaactacatggggatgggggtcctttgcactctttcgtgttaagcacaaaacaggccaaaaatggttcgggatacaccactaagggtgccctttaactcggctgcttgaaaatgattgagctcacgttgggcggatttaggcaacttaaatgttctgattaaaggatttggtaacgttgaatgtcacctggatggtgatgacttgccttcatgccccagaatcagacctggtgagcgccgatacacctccatttgaagggtcagaatggcaatt

SEQ ID NO: 97994 - DNA, 1551 bp, Glycine max
  Clone ID: PAT_MRT3847_59501C.1
gaatttcaaaggaaccctaataaacatgttgtgacctgtgaagcaacaatatagagcagagaagtgaaaaagaattttacagaacccacccccaaataaaaaaacaaaatgtcgtcttccaactccaaaacccaaacccaaaccccttcttcactctcactctgcacctctaagcctcaggaaggtaacatggcattggaatcccaaccgcagaagaacaagtatggacacggggtgtttggagacgtctacagcatcatcaaagagatggagattgatcatcataacaactctacctttgattttcaatttcccccaattacaaattttcttggctctagagaggttcgggagtttattagcggggccctttcaggggcaatgacaaaggctatacttgctcctcttgagaccatcaggacaagaatggtagttggtgttgggtcaaaaaatattgctggtagtttcatagaggttatagagcagcagggatggcaaggactgtgggctggaaacatgatcaatatgcttcgtatagttccaacacaggccattgagctaggcacatttgagtgtgtcaaacgggctatgacatccctgcatgagaaatgggaaagcaatgaataccccaagttgcagataggtcccatcaatttcaacttatctttatcttggatttcaccagttgccatcgccggtgcagctgctggaattgctagcactcttgtatgccatccccttgaagttttgaaggaccggttaccacgcgagtccacggctgcgagaagacgacagaaggggcgattagaaatatttataaagacggaggtgttggcgctttttatgctggtatctcaccaactctggttggcatgcttccatacagtacatgtttttatttcatgtatgatacaataaaggaatcttactgccggaccaaaagtaagaaatctctaagccgtccagagatgcttttgattggagctcttgcaggttttactgccagtacaattagcttccccttggaggtagcaaggaagcgcctgatggtgggtgctttgcaaggtaagtgcccgccaaacatggcagcggcactttcagaagttattagagaagaaggtctgaagggtctctacagaggatggggtgcaagctgtttgaaggtcatgccatcctctggtatcacctggatgttttatgaagcttggaaagacatattgcttgtccagaatggtaatcccctttaggctaataagaaggttatgcggataacttgtactctataagaaggaatggtaaaacacaatgccgggtaaggaaaaataattattcggaaattaaagttgttttgccatggcagccagctggctagctcgttggaatagtcacatttactaacgagttaggtacctagcttgtaagtttccagattttgatattgatttgggaagattctcatcgaagaaaaaggttaaagaatgaggagaagtttcctatgttccaaaaaaaaaaaaaaaaaaaaaaataaaagcggccgctctagaggatcca

SEQ ID NO: 97995 - DNA, 575 bp, Glycine max
  Clone ID: PAT_MRT3847_59502C.1
acgagtcttcttgctcttcggggttgttgcgttgctagtgataatttgaatggttaacttggcctcaaagaaagaacataatccttggtgtggctagggggcttgcttatttgcactatgaaatcaaacccccaatttatcatcgtgatattaaggctaccaacatacttttggattccgaaatgaatgcaaaattggcagattttgggttggccaagcaaggtagtgaggaccaatctcatctcactacaaaggttgctggcacatatggttatgtggcaccagagtatgctctatatgggaaactaactgagaaaagtgatgtgtatagttttggtattgtgattcttgaaatcatgagtggaagaaaagtgcttgatgctttgaattcatctgcggattcaatcacggattgggtatggacacttgtggaatctggaaagaagggggaaattttttgtgagtcaataagggaagggccagtaaaagttatggaaaggtttgttcttgttggaatgctatgtgctcatggggttgtgactttaaggcctactattgttgaagcccttaagatg

SEQ ID NO: 97996 - DNA, 291 bp, Glycine max
  Clone ID: PAT_MRT3847_59503C.1
taatcttatgaccacttatgtacgaccaattctttttttttgtggggtaacagaacaaaaaatttacacttgggcatacctctgaaattaaactcttactattgttggccaatacacttccaatttctttccaaaaaggactgggaaaaaaacctgtgtcataagagcgggagttacatggaattctctttgtgaactttttgggcccttgctaatgtagaggcccttcgccaaaccgagactcttgtccccttgtatgattttcaactaatcaacccggccaaggcactt

SEQ ID NO: 97997 - DNA, 392 bp, Glycine max
  unsure (1)..(392): unsure at all n locations
  Clone ID: PAT_MRT3847_59504C.1
gcccgagataaccttagagccgagggattttatggggcaaccaaccaaaaaattagggccaaggttaattgaaattttcccggggggggacgcgaactaccttaacagggctttaatggggtgggtccggaaggacgtgatcaaacattgaaccgcccttaaggggattttccagcccgggttgccaccggagaaaaaggtcccggggttttggttttccacagggttaaaaattgggaccagttcaataacgttggccttacgcttggccaacctgtacttggggggtttaaggaccccggccggggtgtggttgagttctttaaggccggnaacaccaacttcttgggggacaaccccaggtggttgggttttgggggcgggtcccagga

SEQ ID NO: 97998 - DNA, 1153 bp, Glycine max
  Clone ID: PAT_MRT3847_59505C.1
tctcgagccgaatcggctcgagagaagatgggaaattgaagcttagacttggaggtgtggcaacaggagacagttggatctcaccctgaagattttgtgttctcatggggtcctctccgtcatctcctcgcgcggctggtcgtcttggcacggcattaatcggtctctttagctgagaggtgcaggccgcccctgggggtcgctcatggggtgggcgcccccgtctcgtgggcggctctcgtgcatggggttgttatgagaccaagaattcaggacttctacaatttattggaggatgcgggaggtgatgacatagcagcaatggagttagggtcatatgagaaattatcaatggagaagtactccagatatcttacttccatgaggtcaaggtcatcatctcctggtggtgatgatgatcttgacaagttactaaacggtgtcataaagaaaaagttaaagatcatccctgagaatgtcacatggggagggcagtctggtgatgttttcaactatcttgcaggtgattttatgagaccaagaattaatgaggttgatgaactgctgacaaaaggggtcaatgttactgtatacaatggacaagtcgatctgatttgttcaaccaaggggactgaagcttgggttcataaactaaagtgggaagggcttaaaattttcttggcgaaagatagaacacctctctactgcggaagtgacaaatctacaacaaaaggctttgctaagtcatataaaaacctatacttctattggatcctcaaagctggccattttgtacccactgatcaaccatgcgtggcactagacatgttgggtgcaattacacagtcaccagctacttgacatttgcatagaaaaggaaataatgttactactactctttggaaggtgaagcagcgtacaagaaaagagtcaacaaacaaaatagaacatcatcatcaagcagtgaaaagcaataaaaagactcaatattacagtgatcctactgattgtttgctttaccatctcattcttttccgaatgtcataattaattatatactttttttatccttgaaagtcagtccccctttaccttctgacttttaaaatggaaaataattatttcttattcaattgtaaataaaacccctagg

SEQ ID NO: 97999 - DNA, 745 bp, Glycine max
  unsure (1)..(745): unsure at all n locations
  Clone ID: PAT_MRT3847_59506C.1
gtgaactataaaagccttattcatggggtacagatatataaaaacacactgacgaatttctcaatctgacatgattcttccaagcccgctgtcccagttgctttattgttgcccctcctgccacacagtgtgacggaggacatcaggagcgccagaaggaggttgtcagaaagcctctgggcacaggaatctcccttcgttgcagacatttctccaagaactgcttcagacgtatgaaagagcccatctgtcctgagctcgtgatggcttcaattctggggaagtagtcctctttgatgagaagtatcatcttccagaactggacctggtactgcttcataagggcgttcccgcacacctccaagaagtcaaacaggagggtagctgtcacatctgagagaggctccatgtttaagacctgggccaaccagcgccagccatgatttaagccatgaggatgagcctcctgccggttcccatacggccactggagctggatgatggcggcatacagacggatcatcccagacatgcgttttagaaagttgtcctgttgctcaaccttggaatccgtcacttggtagccaagcatcctttgatagtcctccaaggccatcccttccttgaaagctgggtagaaaggaacagagtatggacacttcttgtggagatgagcaagaatgaggtctcccactttagggtggagcatncagataccagatgccaccactgcaatggggaatgc

SEQ ID NO: 98000 - DNA, 518 bp, Glycine max
  Clone ID: PAT_MRT3847_59507C.1
ctcgagccgaatcggctcgagagaagatgggaaattgaagcttatacttggaggtgtggcattaggagacagttggatctcccctgaagattttgtgttctcatggggtcctctccttaaagacctctcacgacttgacgataatggactgcaaaaatcaaacagtatagctgagaggatcaagcagcaaattgaggacggtaaatttgttgaagccaccgactcatggggtgaacttgagaatgtgattgctaccagcagcaacaatgtggacttctacaatttattggaggatgcgggaggtgatgacatagcagcaatggagttagggtcatatgagaaattatcaatggagaagtactccagatatcttacttccatgaggtcaaggtcatcatctcctggtggtgatgatgatcttgacaagttactaaacggtgtcataaagaaaaagttaaagatcatccctgagaatgtcacatggggagggcagtctggtgatgttttcaactatcttg

SEQ ID NO: 98001 - DNA, 279 bp, Glycine max
  unsure (1)..(279): unsure at all n locations
  Clone ID: PAT_MRT3847_59508C.1
tttttggtttgcacactgcgtttaaaatctttttttttttccttattactctcaacagaccgttgcgtatgatgtgtttttttttatgcttggactgcgctcaagtgtagattagatttngcaatatttgctcacttcttgaatttctttttaagtagtgcatgtcttccttgtaggcatactctggcctaattgcattaacgttggggatgccaatttcggaacaaaatttaaccaatttgtgctgattcttaccgggttacccaaggccatttattc

SEQ ID NO: 98002 - DNA, 314 bp, Glycine max
  unsure (1)..(314): unsure at all n locations
  Clone ID: PAT_MRT3847_59509C.1
aatnagaaagaaattcgttttgttagnngaangnggaaccccggcgggatttccgttcacagttatttgcaacaccatttctaatgagacgctcatgagatatagctacgaaaaattactgcgccaggctaaagctccaagtatgattttacaatctttcaaaaattttgtttctttgtgtgtgtatggtgatgataacctaattagcgttcatgaatatgtcaagccttactttagtggttccaaattgaaaagcttcctagctggtcataatatcaccatttctgatggtatcgacaaaactagcgcatttt

SEQ ID NO: 98003 - DNA, 191 bp, Glycine max
  Clone ID: PAT_MRT3847_5950C.1
cccacgcgtccgcccacgcgttcgttgacttctacctgataagaggtcttgggatttttattaataaatacattggcgataatcaccagtgatgttgctgcacttattgatgaatatgcacgtagagcttttcaggagctcaatcatgtgcatgagggacaaaatgcattgagatacaaaaaattgtatgc

SEQ ID NO: 98004 - DNA, 284 bp, Glycine max
  Clone ID: PAT_MRT3847_59510C.1
ctgtctcgtggggagcgattggtaactgcagatggggacatttggattcgcacagggcttgggaaaggtaagaaaattgtttttcttactagagttgatccttttccagtagctttactggctgttctttttggcgttaagaatgaaattctgagttctaacgccactaatcctatgctgactcgacttcttgagaactgtaagagtctcaaatatctggttgatgagtgtgctattacatactagttcacaaatgcaataggacactcatttaacagatgatt

SEQ ID NO: 98005 - DNA, 624 bp, Glycine max
  unsure (1)..(624): unsure at all n locations
  Clone ID: PAT_MRT3847_59511C.1
actgtccaaggtcctgtcactgtaaatttagggttggcagagtggacggagtgaaggattgtaaggaagtttggaaggctaacgtagtagcctgcaccacaaatattattattatggttattattataacccgtcagcagcgcgttgcctcaccgggcaggagaacaacccaccacaactattatacgtagtggcactattgggcccaatggccgctgctccatgcttcgctggagcttgcgtagcacacgtagcaccttaacaaacatttacagtagctgtatacgtataaccgacaacaccacagcgtcgtagtacgtgatgcgccgcatgcgccggggcgtggctgcaatattacacaaaaacaacggacaacaacagcacaactgtaccaaacaagtattattagtgcggcctgcaatagcagaagaggtgagagaaggaagaggtacgtgttaacgagtattagcttcgcgagtgtgagagagtggttgggtacgcgcttgggcaaaaaggtcncgtactggcaaacgcgcgaggagcttaccgccgatggagagagagaggctcagagagaacgactgacggctgagagcaaagacagcgaacgaagcacagcagaga

SEQ ID NO: 98006 - DNA, 180 bp, Glycine max
  Clone ID: PAT_MRT3847_59512C.1
gggattctaatttatacatataagaattccagtgtcatacgattattataggtacatccaaagcccctcccgcgatatatgacaatgtaagtaatgccgttctaccctactatgttcgtcggccctgccattaataacgcgccgaccctttactcctaccatatactcctaacattcctc

SEQ ID NO: 98007 - DNA, 577 bp, Glycine max
  Clone ID: PAT_MRT3847_59513C.1
ggtgggttttttttttttttttttttttttttttttttttttttttttttttttttttatggggaaaaccaatcgaaatcttcaaaggaaacagcaacatagtttttggcagtaaagtaattgaacctacccgatatacattcacaaacgggggggggggggggacaatcaaaattttgcataaataaggaccttgctccaaacaataaaatttttttttaacgcccctacttttttttaaaccccaaaacgatgttcataaaaaagggccctggctgaataaagtttactaatacaggctaaacccaaaaaactggttaatgatgagggcaaatccgagggctattgcaataaaaaaaaaaccccaagggagtttctcagttattctagggactttattttttagggcctccctacatgaaccgataaataccggatagctccccattgcaacaaccgttccaagtaaaaacatggtgagaaatgccgcccccgccaagcgggagggtaaaacaagggcaggcaacaccatcatcaatgcatttgggtgcagccccggaactattccaggggcaaa

SEQ ID NO: 98008 - DNA, 429 bp, Glycine max
  Clone ID: PAT_MRT3847_59514C.1
gactgagggagaggggaatttgcccaagcttgtgctcacttccccggccggtaggtgcgtaatttgctataaagctatttttcccttaacaatcacaaccacaaccatgtgagtgcgtactttgattgattgaatatgtgggtgtgcagtgaggctgagatatacccggttggaaggttcattacttcttggaaagttcccagtggtaaggacctcctctttgttcgccccgacgctgttttcaatgggaacaaaccgataagtggtggtgttccgcattgttttccacagtttggtcctggtccaattcagcaggtacgtgtgcatctttaatccacgctattttctgcacttcttcttgatcttttttcctgtatattttactttttttatggtatatctgctgaattaaaatacaaaaatctgagt

SEQ ID NO: 98009 - DNA, 438 bp, Glycine max
  Clone ID: PAT_MRT3847_59515C.1
ccggtccttaattcccggctcgaccgcacgcgtccgcccacgcgtccgcttatatctcaccctgtctgtatctgacctgcctttatcagttaccttcatgtgggtgtttctcatgatcaagcgtcagcacatcactactcagattctcattcaaacattcgcagctaatatatactctcatcccttttaccatactttgaataaaaatatattatgattctcaacaactactcaatcgcatgaccaatattataagcacatacccgtcatcacgcactcctatctaaacactgctgttgtcactcactatctgatgctccctcgatataatctctccgtatcgatagtactggaaccctataatggtcttgaagcactatcaatattaacacctgtatactaatttcttgaactctagtaaaatccactttgatttcc

SEQ ID NO: 98010 - DNA, 345 bp, Glycine max
  unsure (1)..(345): unsure at all n locations
  Clone ID: PAT_MRT3847_59516C.1
gtcgcatgcacgcgtacgtaagctcggnaattanttccnggntggnnnnnntnantantnccncggccgnngnnctantgatctcgtnnnactcngnnttannnttcnggaccnggtannctgnnagnnnccnctnggggcgtcccnnagnncngaaaaantnngcgggngngtanngtnganacnngtggccnncgttngcnngnnnggnnggtcnnntnggnncctcgnctagcnnnttggcantngtgcnntgcanngnnntaccnnggtnncgcngngnngnnngnagcggaggnnggnnnnngtgcgcngncgncanttgncnnagnggtgcngcggtnc

SEQ ID NO: 98011 - DNA, 223 bp, Glycine max
  Clone ID: PAT_MRT3847_59517C.1
gagccatcaaacccgagtcttaattatttcaaccgggggggttcttaaacttcaggattattaagctgatggcctgaaatgaaaccacccaaatgaaaattcttgtttcccaaactatgatttttacgtatcaaggtccttaatttgggaaaatatcaatacccatattttttatcccaaattattcaaatgaccagggaattcggctgattattccaagaaa

SEQ ID NO: 98012 - DNA, 563 bp, Glycine max
  Clone ID: PAT_MRT3847_59518C.1
tggttggtgctacgctgtgccattacaggaattgaggttgcggtggtggtagccagcaatatctgttgcgaggcgacggtagatgtagtcagcggtagctgttgcatgttaaagttgacaattccggcgacaatgagatggattgtatatgcaaatattaagctttggagtcaccgatagctccatcagaaagcttgtcaagcttgtcctttaccctatcgtgattgttgctgtcgttgtcgttgtcgctcctcctttaccctcactccagctctggcaacaacaccagtttcaacgtcacctcattgttgatttgatcaacgactactggccaacctctcgctattcatgatgcacagagattcagtgactcatggaggcttatatgtggatacactgttgtgttcaatggattgactggactttctatggtcgtttctttactttctttgcctgagcagtcccacttatactcattcaattttatttattggacgctaaacctgaaaactgaggtagaaaaaccaagttgaacatagcttcaacttggtaaacgtaggatt

SEQ ID NO: 98013 - DNA, 376 bp, Glycine max
  Clone ID: PAT_MRT3847_59519C.1
ggaagcaaaaaaaaagggccttgggaaacccaaaaaaaattggcgacccccccaaacttttgggagggggcaaatccccccccccggggggggtttaaataattttaccaagaaaacaacgttttattatttttttttgggggtgccacaacaaacacctccaattcccaagggggggggtattgctaggtcggggcatatccaattttttgcctcttccagtgggattaaataacgccactacaaaatgggtttcttaacaagacaccctccgaggctggtaactttacctgggggttgaggaaaaaaactccgaaaacctcttctttatttttttgacacacccccgggttaaaccttttcacccaatgcattt

SEQ ID NO: 98014 - DNA, 1848 bp, Glycine max
  Clone ID: PAT_MRT3847_5951C.1
gtgcaatcctatttcagcttgttacaggaagaacgcctttcgctggaaacaatcaaatacagttactacaaaatattatgaaatcaacagaattgcagtttccgtctgatagccaaagtctgagttttgaatgcaaagatttgtgtcagaaattgctacgtcggaatccagtggaacgtctaacttttgaagaattctttaaccaccctttccttgctcagaagcaaacagaacgggatgagtcattgaggaataaaagttcttcaaggatggatggtgggttttgttctacagtgtctgatttgagaagaaccgaggaaaattatcaagaagattgtttgcctttcatgttagatgacgactctagtggccccgaggggagttcatccttttcaaggaagaagtcctcaatgaagtcgacctatggatttgatctaaatgctaaactagataaagcagagtcatcatctcctatttctagatttggtagtatgacacaaagatctgaaaacactactaaaagattggacaaccatacaatttcaagaaatctcactgatcctctagaatctccagagcagcttttcgcaagtccttatccaaaagttatggattcgctggagaatattgatcaagaatatgttctggtgtctggccccactatagatgtttcatctttgtcagtgggtgcttcaaggcccatccataccccaagtcggtcaggtagtttaccccaagagtcttctagtacaatcacaagactaagtgctccaatgccaatagttggtgtacctaccaatagtgtatgccaaattggaagttcaggaagtcaggactctgctcctgggacatcacttggatcaatggatacaggtgatgaacaaccatctgctcactgcatgacaagggtgaaatcattgcaacagtgtgcatcttccatcactgatttagttaatgaaaagatggaggcaggaaagcatctggaagcattttctattcagcttgtaattcttgcaatctggaagcaagcactgcatatatgccatacacaagctgcatcagccatggaaggaagtccaaatcaagaaacttcaagatatagaaggagcaccagtaggaagcatggtagtcctgattctgaagaatgccttgatggaaacaccctagggccgaaggatatattatctcaaattgaaagtgaatttttgagggaatttgagcatgctgaagaacttgccaagaccattgagcccggaaacacagagatgccagatgcaatggagacaatatttcaatccgcccttgcttttggaagacatgggggtgtagaagagctcatgggagaaatggaaagtgcagctgcattgtattcaaaagctgtccgtctgttagttttccttttagttgagggaccatccctgattcttaatcctccattttcactgacaaactcagaccgttacaggcttcggaattacattgatattcttaataacaggcaaggttattcaaggtcccagcgaatgacactactgaaatgtgatgacagtcgaggtatccttaaggaaaagttttaggaatggttatttatctcccattccacacaacaaattatttatttgtacagttattctttgagggaggggaaattggggatgctgatgggagtaaaccggcacaagatagttgtaaagttcaacatttctgtgattagaatgatggccaaatgtgcatttgattatgtattctgtgtcaaaaaaaaaaaaataaaaaacaaaaaaaaaaggggggcccccccgtttatcgccccctcaacccgggaatttttcccggccccgggcctcgggg

SEQ ID NO: 98015 - DNA, 390 bp, Glycine max
  Clone ID: PAT_MRT3847_59520C.1
gaacattcacgtgcgcgctgctgtcttatcttgccattgcgtcaacgtcgcgatcgtgtgtgcgactaacatcacacaacagaaccttgttccgttcttctcagaactctctcattggagagagcacgagagtcatgacggacggtcatctattcaacaacatcacactctgaagccggggcggcaccaatccagggcagagtagactatatactggaagaattatatcgaagagacagtgcgatgggcaattaaacgaagttgatcaatctgacatagtggagctgacatggatgaacgtgcccactagtaaccaacttgaagttgaaatcaaagatgggacgttctataagctcacactatctcgagacgcagatgatgtaagtgtga

SEQ ID NO: 98016 - DNA, 1159 bp, Glycine max
  Clone ID: PAT_MRT3847_59521C.1
actcgagccgattcggctcgagattttattttactcattcacataattctttttctaatttagcaaccttaatatttgcctaggtctagtttattggattcggctcctccgaggattgaaatccaatccgtgcctcctttttatctgataacacaaaaatggcaaatgctttgagagttggtagtgttatctcactctgctcccttcggaacacgagaccccatcttccccttctctccaacgccacgcgcttccgttccaagttcccatttttcaccctctcatcgtcgccaaatccatctgggtatccaccatttcgcacactctcttcttcttctgcttccacagatgaggcagtgaccaccgaagccatcactagcaataatgcaagtggtgaagctgagaacagtattaaggatgcggcggggttgcttgacatgagggttgggtgcattctgagagcatggaaacatgatgaagctgattctctctatgtggaagaggttgatattggtgaacctgaacccagaatcatatgcagtggccttgtcaaatacatccctctagaacaccttcagggcaaaaaagttattgtcctttccaacctgaagccaagaaatatgcgtggtgtcaagtcctgtggaatgctgatggctgcttctgatgcaaaacatgaaaatgttgaacttttgttccctcccgaggaagcaattcctggtgaaagaatttggtttggaacggaagatgaaaaggataatcaacctgatgctgccactccgaatcagctacaaaagaaaaagatatgggaattggtgcagccgcatcttaagacagatacttcttgtattgcaatgctaggggagcatgtcatgcgtacatctgtgggttcagtagcatgccagtcattgcagaatgcaaatatctcctgatcagcactgtcaatttgttaccctacacagccattcaggcactgcctatctgtatgcaattattctgcttcataatggaattttttattgataaattggcgtttgttttgtatgtactttgattttttaaatagtttcagtttacattttatcactttcacttggacataatgatttcagctgagtataaacctcatctactgcataagtaaatgatttttctttaaaaa

SEQ ID NO: 98017 - DNA, 407 bp, Glycine max
  unsure (1)..(407): unsure at all n locations
  Clone ID: PAT_MRT3847_59522C.1
cacgcgtccggaaagcctcaatggcttgtaagaatggttggaggtcaacttaataaaaaggtgaaaaagaagacaaggatgagaactcatgaaaattgtagcagaatgaattagtggatatctggcatggctggagaatgtcttgttgctcactttcctgttcaattccatttctgccttcttggaaaacaaaaacttaagggcaaaaagcttatcacattgcattgcaggggagatctgattcaaatntttgtaatatgaatgtcatatttttcatttggtttaatttgtttgccttcgatcttgcaattttgttctattttatacatataattgtcgatattggttatatattactagtggttgttgtatacttttaaaactgctaaaaaaaaaaaaaaaaaaag

SEQ ID NO: 98018 - DNA, 631 bp, Glycine max
  unsure (1)..(631): unsure at all n locations
  Clone ID: PAT_MRT3847_59523C.1
gaaaagccatttggttttattaatttgaaaaaaggattttttgttaaaatccaaaaaaagggaaatacgaggaaatctagggaaaaaaaaaaaaaaaaaacgagggggggaaaaagaaaaaaaaatttaaaaaactggaaaaggaactttgggaaaaaaaaagcaaaaaaaaggggggagccccacaagggggaatggggagccacatatatgagcccgaaaggaactgggggaccagaaacccatttaaaactgggcaaaatggacccgggctaaaaaccgttgaaattaaaaccttgcttgaaggggtggtgaaggagtttnngggggggcttaggggccaaaatgcttaaggtgctcaggggggtttgcttggcggggggtggggtnggtcctggggtcgggggccttntngggggggggtcgggccccccttgggcgggggggggtccgcttttcctcctgtggggggagggttaagnntggtggggggntggggggnntttgggnccgggggtttgggggcgggggccgtggttgggggctgggggntgggggggggggtggtgggggggcgggggggggggggggggggggggggngtggggggggggggggggggggggggggg

SEQ ID NO: 98019 - DNA, 373 bp, Glycine max
  Clone ID: PAT_MRT3847_59524C.1
gcgtccgcgttcgcgctgcgcctgagcgcatatcggagaaggtggaggagagcataaagaatcgctgcaggaggcgtgcgccggtgatccgacgagcggagagtgcgtggcggtgtgacactagggaaagtggttcataggaatgcggaggtgtctaggtctgtttgttttttttgactcttatggatctcggtggggtgttgttgttgctctatataggggtggtgaagcccatgctgtattatggtgtgcccgcctcagtgtgatggggggtgggagctttggctgagtctctatgaatgagtgtgctgattgcctcttgtcggactccggttgggtttgctcgtgccttctgagggggtgtgtgcgtttt

SEQ ID NO: 98020 - DNA, 227 bp, Glycine max
  unsure (1)..(227): unsure at all n locations
  Clone ID: PAT_MRT3847_59525C.1
cgattgccttcaaatcacacactctcttcaatttctagggttttgctattgctttgcctccgttccccctttctcacaaaaaaaacggcttntctccttctcttcggaaccaatccttagacgtaggtttttagttaattaaaggaattccagcgagaatccgttgctcattttaaatcgattatctaaccaggactgaaagacctaatggagtccaaaggtgggaa

SEQ ID NO: 98021 - DNA, 465 bp, Glycine max
  Clone ID: PAT_MRT3847_59526C.1
gtgaactcagacctgataaacagaaaaacagaaacagaaaaagggaactgatatgggggcgatcttgatgcgggttgtgtctctcatgcatgataactcagaggacaggctcctcggtagtgcggtagtgctaactctgtgaagtttcttcaccctccttcctagccctggaggcggggtgattcatagctcctgttccaaaggcattcagcagccattcgacctgagaaagaaacagagttttagaaaatacaggccaaatgtagagacgcctgtgattaccaggatgagtatgtcagtgcaggtggcttctgaatttctgtttctgagtttgtttggctgatgcctaaggaaaggggtcccttacagccctgttttataccttagttcttggtggcaacgtgggtgttgctgatctctctgatgtgtttttctgtgcactgaaaacaccagacatgctccgtg

SEQ ID NO: 98022 - DNA, 361 bp, Glycine max
  Clone ID: PAT_MRT3847_59527C.1
acctgaaaataatgacaattttatcacatttatgcagccataatgtcttgtcattttcataacccacatctaacatacatcctgcagtgaaccagtttttcatcaattcttcaagcaagcattgacaaatacagtgtgttaccctttcttttacaaattcaagcggcactctacaccatgtagcatttataatacgggagtctaatgattcaatcgctagcctgtgacggagtcacctgattcaatcgctaccccgctcatttgcaatacatgttgaaccacatcgcaatgtgaaagtcgccttcaaggtcaggattgtggcctttcaattccatgaacagcatttggaagaacaatgact

SEQ ID NO: 98023 - DNA, 373 bp, Glycine max
  Clone ID: PAT_MRT3847_59528C.1
cgtctattcagagttgcaggagaaaaatgccaacgaaaacaacacgacccggattttggctgcgattttccgaccagaaatactaaaatcgccattaatcctaatctccctcatccgttcctttcggagccggccacccccacgaaggggctactggttctgggagtcggaccaaagatagggtccccgcttccgggtgtcgctcgtgagcacaaaagaccttccaggttggggtgtaaacaccgtgaacctgaagcaccaattcctccccttgtgggggtgcatgggatgagtgacatcgaagtccttctcatgatctttatttctgccctctgaacgggctcacatttcacctttgtattgcacatcgggg

SEQ ID NO: 98024 - DNA, 465 bp, Glycine max
  Clone ID: PAT_MRT3847_59529C.1
taaacacgaatagaatgtgagtgaatgcaaacaacggtctacaatttttaaatacacaaggatgcatgtgagtgtattcaaataacggtttacaatactaatagcacaatgctgacactgcttatcttcttgatcgcatctttcagtgaaccaaggtctggcaaccttagcattctttggagtaggggttaacctagtgctgttcctgacaagagtgatggggcaaaataatgctgcagctgcaaacagtgtgagcaaatggactggcacagtttacatcttgtctctaaagggtgctctcctaagagattcttattggggaagaacaaaacttgtgccctctttcaggtaatctttgaaatattaagaaataacctctctatttcattcacttttcctaattcacctctttaatccaacctaatacattcttaggaataaactaatttttagttgaaaagcagg

SEQ ID NO: 98025 - DNA, 358 bp, Glycine max
  unsure (1)..(358): unsure at all n locations
  Clone ID: PAT_MRT3847_5952C.1
cacctttgttcactcttcttctcttgcggctggggttttagcgcagcttcttctagatttaaggaagatgggtaaggaaaaggttcacatcagtnttgtggtcattggccctgtcgtctctgggaaatccactaccactggtgccctggtttacaagcttggaggccttgccaagcgtgtggttgngaggtttgtgaaggangctgctgtgatgaacatgaggtctttcatgtttgcctgggtgctgggcatacttaaggctgtgcgtgtgagaggtgtcccctttggtgttgctttgtggcggtttgtttctctttgtgttattgttcagttttttggtgcgcctggtccttcgggt

SEQ ID NO: 98026 - DNA, 164 bp, Glycine max
  Clone ID: PAT_MRT3847_59530C.1
aacccgagcccactaactacacgttcattctaaaaactgaaatgctttctctgcgggagtgaattgtagagggcactaccgctgcccgaacaaatcctccttatccatgcgggcagtattattcttaagccgcttactgccttcctttaactacacagaaaaat

SEQ ID NO: 98027 - DNA, 460 bp, Glycine max
  Clone ID: PAT_MRT3847_59531C.1
ggctcgaggtgcaatctcctttaatacccttttgttctcaaaacttgctggtgattatggaggcatacttatagagccacagttggtccatgagaggaaaatcgttgcctttttatagaaatgcaccaaaaccagcttcctcaaccgccgtgcaatacacagctacagatattaagccaaatcactattcttcttctcctgcctctgtagggttcgtggtccacgaggactatgcaaccacaaagcgaaatctgaaggttcgcattgtggttgcagatagtaggagcaatttggatgagttgtatcgccagccagcagatgaaagcgtggacaccaaagctgaaatatatatcgctatggttcagaaacgtttgatgcttgagcgataaaacgcataagcagataccctgtttcaaaaaaacaaaaaaacgcgtactgtttaagagatcaagtgatcatc

SEQ ID NO: 98028 - DNA, 618 bp, Glycine max
  Clone ID: PAT_MRT3847_59532C.1
gggacacttgaaaagtagttttgttaatgcgataaattgctcaggttctagttcggctcgagggcagctgtgatgcatgcttacctgttaggtgacaaggcaatataagctgctaattccaccagaaaccgtggaatgaagaatgttgtcatatttgattccactgtatccatattccatactcatttgcagagttaatcttaaggacatacatttgaaccttatattgactatggtttttatttttatatgaatgtgagcatcttaaaaaatctgaacacaattctccaaaaaagtggtttgatataaaagcagcctaaattttatgctctcctgtataatgaatccacatcagattgttcagagagaaattagtgatagtgtaaaatgaatctaattcaactagaatccagacagttcagaagttgaggcttgttaaaatacaattatcactatgattgtagtttcaggttcaaattattttgtgtcaaacaggtgttcttcactttattatgataccagctattttgttagattacctatattttcacttttgaaacatttcattgcagggtgctttcctttgtttgtcggagccatccaaaagactgactttat

SEQ ID NO: 98029 - DNA, 1700 bp, Glycine max
  Clone ID: PAT_MRT3847_59533C.1
cgtcaatcctcacgacagctctgctctgctctgcttcttttgttgtcgtatttttcttctgaaaccctaaattttgtctgctctaaactttgggatctttcacacttgaaaaaaactgcttcttgtgcccgacccagcacaattctcatactatagatctttgaatcaaatataatttctgatcattttttttgtttcgtccgcagcttttgttctcgcacttcgctgtctgaggttctggattctcagtgtttgcgaagcgctgcatcatcctttggggaagaatggatcatcaagggcatagccagaacccatctatgggggtggttggtagtggagctcaattagcatatggttctaacccatatcagccaggccaaataactgggccaccggggtctgttgtgacatcagttggtaccattcaaccgcttttgttctagcacttcgctgtctgaggttctggattctcagtgtttgcggagcgcagcatcatcttttagggaagaatggatcatcaagggcatagccagaacccatctatgggggttgttggtagtggagctcaattagcatatggttctaacccatatcagccaggccaaataactgggccaccggggtctgttgtgacatcagttgggaccattcaatccaccggtcaacctgctggagctcagcttggacagcatcaacttgcttatcagcatattcatcagcaacaacagcaccagcttcagcaacagctccaacaattttggtcaagccagtaccaagaaattgagaaggttactgattttaagaaccacagtcttcccctggcaaggatcaagaagattatgaaggctgacgaggatgttaggatgatatcagctgaagcaccagtcatttttgcaagggcatgtgaaatgttcatattagagttaaccctgcgctcttggaatcacactgaagagaacaaaaggcgaacacttcagaaaaatgatattgctgctgctatcacaaggactgacatctttgatttcttggttgacattgtgcctcgtgaggacttgaaagatgaagtgcttgcatcaatcccaagaggaacaatgcctgttgcagggcctgctgatgcccttccatactgctacatgccgcctcagcatccgtcccaagttggagctgctggtgtcataatgggtaagcctgtgatggacccaaacatgtatgctcagcagtctcacccttacatggcaccacaaatgtggccacagccaccagaccaacgacagtcatccccagaacattagctgatgtgtcgtggaaattaagataaccaggcaccggaatcagttgtgaatgtcaaactgaatggttgggaagatccatactacattgcgagcagaagctgtagctgatagtttacatgcaatgcagactataaacatatgtagataatgtgctagggaaaacttaaccttatctttgatttagctggaaaaaatggtatttttcattttaattcacaggtcatcagatgataatatttatttactggtgcatagcaggatttttacttgagtttaaacttgtcatgcgcccaaaatatatcccatctttttcattcatcatgcttccttgttatacctacctatctgtggttcgctttgtgggaaaattgagttatcacatgatttgcgcacaagttgtgcaagaac

SEQ ID NO: 98030 - DNA, 368 bp, Glycine max
  Clone ID: PAT_MRT3847_59534C.1
ttggggttgttttttttttttttttttttccaaagggcattacagacccattacacatcacatttcttcttaaaaggttggggaaactccaacctcgaccatcacacagaattcagctccagcttaaaaccccccacgaagacgcaacaccaagggcaaagttgactccttctggatgttgaagtcagcgaggcaccttccatcctctatctgtttgccagcaaaattaagcccctggtggtccggggggattccttttttggcctggatcttccccttcacattgacaaagggggcggacctcctcccctagaggggaatagtcttacccgtaggggtcctagccgaagatctgcctacccccacga

SEQ ID NO: 98031 - DNA, 307 bp, Glycine max
  Clone ID: PAT_MRT3847_59535C.1
accagatatcttagttatccaatacatggtgtagaccctatgaggcgttctcgagatgtcagtccaattcgtcagcaatgaatattcgtgcgcagcgtattacgagatgtgcgcatctatctttctgatgtgcagctaggcaatagcttgagaatagtgcgtcttaacgttatgatagtcggcatagggaaagtccagagtgagatagcaagcctcggtcacactggcaatatactgggatgacgtgctatcacgtatgacgtggtacatcatgatcgtttgctatgggcgtatcttatttagtgtg

SEQ ID NO: 98032 - DNA, 233 bp, Glycine max
  Clone ID: PAT_MRT3847_59536C.1
ggttttttttttttttttttttttttttttttttttttttttttttaaactcaaacccgtccaaatccatgtcccatgtcgcggacaaatggagcaaataactcaaattttctaatacaacctaaataaatggggttaaaacaccctcttcatttaaacgataaaaattttcacactgctttgaaaataattacgatcctggattttactttcctaattgaggggcccccaac

SEQ ID NO: 98033 - DNA, 1628 bp, Glycine max
  Clone ID: PAT_MRT3847_59537C.1
cattaattgtctacgtggtcattcctgtatcatactggggcctcaatgtgtacaatgccaataggtttcccattttctcctcacacttgttcaccgcccaaggtcaaaaatacaacatacctaagattgtagacaaccattttgagctaaatgttgcagagtatgaaaagcaaggttcgagccgattcggctcgagtttcgctctcacttacggctttggatttgccaccatagcatccaccctcacacatgttgtctgcttctatggaagggagattatggagcggtatcgtgcttcttccaaaggcaaagaagatatccacacaaaattgatgagaagatacaaagacataccttcttggtggtttcattcattgctgctcgtgacacttctggtttctctcgcactatgtatctttctaaaggaccaggttcagatgccctggtggggacttctctttgctggagtgctagcttttggatttacccttcccattagcattatcactgccaccacaaaccagacaccaggattgaatatcatcactgagtatgtctttggtctcatttaccctggaagaccaatagcaaacgtatgtttcaaaacatatggttacattagcatggcgcaagctgtttctttcctcagtgatttcaaacttgggcattacatcattcattttgttcacacatgtatatatgtatagttcataggtacaatgcttgctggaaccattaacattggggtagcatggtggttgctgaactctatcaagaacatatgtcatgacgatctccttccagaaggcagtccctggacatgcccgggtgaccgtgtattctttgatgcatcagttatttggggtctggtgggaccaaagcgtatctttggttctcaaggaaactacagtgcaatgaattggtttttccttggaggtgcagtaggacccataattgtttggctattgcacaaagcatttcccaaacagtcatggattccactaatcaacctcccagttctattgggagcaactggaatgatgccaccagcaacaccattgaactacaatgcctggattttcgttggaacgattttcaacttctttatcttccgttacgcaagaaagtgctggtggcagaggtacaactatgttctgccaccagcacttgatagtggggttgcttttatgactgtcttgctctacttcgcactgggtttggaaaacaagagtctaaattggtggggaaatgatggtgaacattgtccactggcagtttgcccaacagcaaagggcgtaatagttgacggttgccctgcaaactagtgattgattttatagtttatacctcttttaatggtttcattacaaataccaagcatgaaaaacacgaatttatagcaaattcaaaatgtataacataaaatcactatatttccaagtaaatagcctgtgttacatggttaaaaaaaaaaaaatattatggtatcctattggtttgaattcttactgtggggtatgtcgcatttcgattaactgtacgtaagaagaaaaaaggtgatgttgatgctcatttcacaattcccatttagttcaacgttatcatagacactatgatttacataccac

SEQ ID NO: 98034 - DNA, 335 bp, Glycine max
  Clone ID: PAT_MRT3847_59538C.1
tttccctttcgaacggaacgaaaaccgcgagcacaggttgccggaacttaaaaccggcttcctactcatttgtggactgtttctaaaggtcactaaaatcactcttactgctgggcgcacgattgctgaaggatatgattttccacctttgggttagccactgaccactctactcattgttgtttgaactcttggtaaacttgctgtacactctcctatttgatataggacttcgtgttatactgaaacttctgctgaatttttgtcagtagtgctgccaatctcaagctcaggttggagaaagctgggacgactgctcccactctccgatttgg

SEQ ID NO: 98035 - DNA, 459 bp, Glycine max
  Clone ID: PAT_MRT3847_59539C.1
cggctgcgagaagacgacagaaggggtctcttgcaaaagccactttccctgccggctaacggcgtcagtctgtcatgcttgcgttgcatgtcctcgggggtccctcctttccaagacaatattggtgtccaagaagaaaggcagcatgatcatgaatctgattctctggaggtgcctccatcactcatgcgtgcgcgtattttgttactaaccaatcaaattgcacctttcaatttattataattacttatcaaataaatcatgcctaatcaattactacagcactttttttccgtctctaatccctcttcagaaattttatttgttttttttataggttttttttttaattttgagatatattaattattttttatgtattattacttaactattttatttctaaatattaatgagaaataattcagtaaatagagttaattttggaataataataat

SEQ ID NO: 98036 - DNA, 316 bp, Glycine max
  Clone ID: PAT_MRT3847_5953C.1
ctagtcggggcccccgtttttttttttttttattatttttacattgtaaacttatgaccaaaaatgaaggctaagtttaattataatcaccaagctaatcttcacctccccaaaaaataaagaaacaaactcatcagcaaaaactaaattaaatattacaaacttatgtttctcatggctcctcagggatagtggtggtaagatgctggtggtggcggtggcggtggtggaggcagatgcggaagctttaaacctaaattcttttacaaacactttttgcatagtaatacaacagtttcttgatccacacatacct

SEQ ID NO: 98037 - DNA, 455 bp, Glycine max
  Clone ID: PAT_MRT3847_59540C.1
ggctcgagcataacacatccttacgaacatagatgtccaaatgcttgctcaaacacaactgagagtgctgtgtatacggctttacctgtgatcagatcatatactgaagtcatgcagcataataacactgagatccagcacaaccatattcacatggaccttgctggtaacgcgcataacactggccgttctctgcctatgcaactgggcattcaggccatgcatattcttattgtttacaaaactcacctgagaaacggacgtgtctaagctcagacacagtcttgaccagtgagaccgcaagaaacggagaaggcaggctcgccatcgtcatcatcacgcacaaattcaccccacttgagacgctcatgctcaaacgtgactccatcagttgccgatgccatcatacactatgcgaccgacaacaatacgccgaatgggaccctccaccagat

SEQ ID NO: 98038 - DNA, 399 bp, Glycine max
  Clone ID: PAT_MRT3847_59541C.1
ctactggatgttatcttccttggaatatgaatgtttatttgtaagttactaattattgcatgccaaaaaactccaaccctaaaaaggtctaggggatgataaaaatgcatggaagaaggacaaatataataaggcttatttaacagaatatactgcttaaatgatagacctctgaaaagatacaaatgcaaagataaacaagagagagtgatctcaccataataatgaatataaactcaaatggccatgaaaaatacataacagaataatgagtcatgtggaaaacataaatgagaatcaagaattaatggcagacatgatggtagaaagatagatatacttatataagggggtggacatagaaaaagccaatttaactaaaaaacaaggtgggactga

SEQ ID NO: 98039 - DNA, 405 bp, Glycine max
  unsure (1)..(405): unsure at all n locations
  Clone ID: PAT_MRT3847_59542C.1
ctttttcccttcgtttgtgacggaaattggtctcctgcttaggttgtatgtccatctcactttcacacttgttgcctgccataacatgtttttccagttgtcactcctctcgctgtattttattcgtttttttcttgtaagatagaaagaaataaagggtagcagttatttttcgttttgttttgtttttccctctcggngaaggaaacagagaaagaaaagtttaaagataccaacttttaactgaaacagaaatgtgggtgtttgcaagctaggctttataataactcagtaaagccactttcttcgttacatgaaaaatagcttgatccccgtgctaccacgccagcagcatctgcttttttggtattccttttggtctggggtggaatctacgtataaaag

SEQ ID NO: 98040 - DNA, 2015 bp, Glycine max
  Clone ID: PAT_MRT3847_59543C.1
ggctcgaggagtctttctctgctgctgcatcaaaagcttctgcagcaccatcttcagccggaataactcctccagctgtgaaaattaatgaaactgacaagatgtggcattaccaggatccatctggaaaagttcagggaccattttccatcgtgcaactacgcaaatggagtaacacaggatactttcctgctgatttgaggatttggagaaccactgagaagcaagatgattctatactcttaacagatgccttgacagggaatttttctaaggaaccatcaatggtggataaagctcaatcggtgcatgatttacattacccatcatcatactctaggaagtctccacaacaaggtatagaaggtcaagttggagaaagactgtcattagatcaaaatggtggatcttggaattcacatagtactctgggttctccgggacaaaccacaggaggaagttggagatctaaagataatatgaactctttagctaatagaacttctccattggcagttgaggtccccaagaaccctgcaaatggctggggttctgatgctggtgttaggaatgatgcaacaaatcttccttcacctactccccagactactcctggtggtactatggggctggcttttgaaaataaatggtcaccaacacctgtccagttgcctgggtctctcttaggaaattcattcccaggcagtcacggaggtttgcaggcctctgtggcagtgcacccagagcatgctgtacaaaatgctgaaaaaggctcaagttcacaacctggtattagttcagcttctacggataataacaagttacatccacaagcaacagcagtggcacctgttgtggcttcaggggttggcatcaaaatgacaggtgcaaatatgcaaaaccaggttgtgagtagccacaactctcatgctgaaactcaagggtggggttctgctggggttccaaagccagaaccactggcctggggaggtgcatcatctcaaaggatagaaccaaataatcctgctaccatgcctgcccagccagcttcccatgccccctggggtgatgcttcgtctgtgcagaacactgcctcttttaacactggaaatccaattgcgagtttacccacacctggatttctgggcatgactgcacctgagccttggagaccaccagcttcaagtagtcagtcaaacaccacagctccatctccagctcaacccaatatgccttggggcatgggcatgccaggaaatcagaatatgaactggggtggggttgtacctgccaacatgaatgtaaactggatgcctgcgcaggtgccagcacctggaaattcaaatccaggatgggctgctcctagtcaggggctgcctcctagtcaggggctgcctcccgtgaatgcaggtggctgggttggacctggtcaaggccgttcccatgtaaatgcaaatgcaggttgggttgggcctggtcagggtcttgcacctggaaatgccaatcctggttgggctgcaccgactgggaatccaggcatgtggggaagtgagcaaagtcataatggagacaggttccccaaccatggggatcgtggtgcacagggtagagattctggttacggtggtaaatcttggaataggcagtcatcatttggcagaggaggttcttccaggcctccttttgggggacaaagagtagtctgcaagtattatgagagtggacgttgcaggaaggggacttcttgtgactttctacacacttagttgtagggctaattacttagtggcagagaaacatctcttactgtacagtattttccaatttcatggctaaacgttgtataaggatgtgtcatgtatgtagaacttgtgcattgtagtatctcgtttatttatcttaattgtcttttgggctttgttttacttgcagttgacttatgcaagggttaagtagttgaagaagttgaagtggcttttagattaataataataacggaaaaaattgaggttatt

SEQ ID NO: 98041 - DNA, 444 bp, Glycine max
  Clone ID: PAT_MRT3847_59544C.1
cttcgttttttttttttttttttgtttatgttttgggggttgattgtggttttttttttttttttgtttggctgtacatttttttttgtttcgtttatatgtatacagggcaaaaagtcttttcaacttgccggaggctaactgaggaaagattatataacggggacccaaaaagtaaatgcggcggcgagtttttaaaacctggggaaggggaaaaccggggggagtccaaaatttacccgttgcggaacaaatcccctttgggcggggggacaaaaccaaaaaaggtctaccagcactagccttctgataaatgttaaacaccctgaagggtgggggggcccccccccaatggggccacaataaaagccatagttggggagggaaccagcacgtggatccaatggtcagaaggcccttagaacgccatgcttttctgtaaaa

SEQ ID NO: 98042 - DNA, 201 bp, Glycine max
  unsure (1)..(201): unsure at all n locations
  Clone ID: PAT_MRT3847_59545C.1
gtgaagaaagaggttgacattaacaaatcatagcatagcagangnanaagaagaagagtacataganngaaagaacaaaaaaatganttnganggnagacnatgaaganggaagggatctgaagaanccatttctncacacgggaagttggnatcnnatgannggnagacaatccattgtgnacgnttccacacangcnat

SEQ ID NO: 98043 - DNA, 710 bp, Glycine max
  Clone ID: PAT_MRT3847_59546C.1
agaatatgaacgggggtggggttgtcccgccaacacgaatgtaaactggatgcctacgcaggtgccagcacctggaaattcaaatccaggatgggctgctcctagtcaggggctacctccagtgaatgcaggtggctgggttggacctggtcaaggacgttcccatgtaaatgcaaatgcaggttgggttgggcctggtcaggggctagcacctggaaatgccaatcctggttggactgcaccggttgggaatccaggcatgtggggaagtgagcaaagtcataatggagacaggttccccaaccaaggggatcgtgtgacaagagattctggttatggtggtaaatcttggaacaggcagtcatcatttggcagcggaggcagaggaggttcttccaggcctccttttgggggacaaagaggagtctgcaagtattatgagagtggacgttgcaggaaggggacttcttgtgattttctacacacttagttgtagggctaattaattagtggcagagaaacatctcttactgtacagtattttccaatttcatggctaaacgttgtattaggatgcgtcatgtatgtagaacttgtgcattgtagtatctcgtttatttgtcttgcttaattgtctttttggcgctgttacttggagttgacttatgcgagaaactagtgaaaagttatttttttcttgttctctagcc

SEQ ID NO: 98044 - DNA, 592 bp, Glycine max
  Clone ID: PAT_MRT3847_59547C.1
ccacgcgtccgctttaattctctgttggatacttcgacttgcccattagtttgaggatggtagggggacgccactctatgattcacatggtattgactcaacaccttttgaagttgagtattacagaaatgcgaaccaccatcactgattaagattcgaggtaccccaaatcgagcaaaaattttcttcttgacaaatttcaccacagtcttagcatcattccttgaagtggccatagcttccacccatttagacacataatcaacaactaccaaaatatatttgtcataccctaatttcgtccggggaccatctgtttgttgggatgcgaccctcgcttgaccacttcgaggtacttgacacccatcgttagacaatccgtgaagtttcgcgacatgtcgggagttgaaaggaagtgttaatgtgcaatccgtaaagttttgtaacattccggaagccaaagaagggatgattgcgtaatctgtaaggtttcgtgacattacggaaagaaaacaaggatcgttacgtaattcggaaaggtccgcaacgttacggaaaaaaaaaaaaaaaggggcgggcgcccttttttttt

SEQ ID NO: 98045 - DNA, 389 bp, Glycine max
  Clone ID: PAT_MRT3847_59548C.1
atcttctcccctctcgtcttctaccctaaggttactaccctaaggttactatcctaaggttccactgctgaatcaatactggatagtaaaagcaatggagagttagggagactaacctcgaaggctgttcgcggagaagacggagaagaagaagaagcttggctcgtggtgtccggaagaagaccaaagcttggctcgcggtgtccggaagaagacgaaagcttggaggatcaacaggaatggaagaagaaaagaagtagcagtggtcttccgagaagaggagcgcgtttttaaatttttaacttaaagggcaaaatggtcattcactaaaattgctgggtgcaccagcaatattgctgggtgcacctagcaactccctttattatatt

SEQ ID NO: 98046 - DNA, 1221 bp, Glycine max
  Clone ID: PAT_MRT3847_59549C.1
acctgacacgtcatttcgttgtccgataatcccttcgcgtcacgcacttcaattcaacactccatcctcagaaaacgacccctcctccgtctcttcttaagcccatttcttgataatcaatccaatgcttatctctcgaagcgtgcaagatcgattcgggtcgaacatggatgggaaatcgccggagaaactaatactggtgaaccgcgagccaaacggcgtcgcactggtgacgattaaccgtcccggttcccttaactcgctgacccggcccatgatggtggacctggcccaggctttcaagaggctcgaccgggacgagttggtgcgggtcattatattaaccgggtcgggccggtcattctgttcgggcgtggatctcacggccgctgaggacgtgttcaagggcgatgtgaaggacccggagagcgatccggtggtgcaaatggagctctgccgcaagccaattatcggagccatcagaggattcgccgtcactgctggcttcgaaattgccctcgcctgtgacatcttggttgctgccaagggatctaagttcatggatactcatgctaggtttgggatatttccttcgtggggtttgtctcagaagctttcgcgcgtcataggggccaataaagcccgcgaggtatctctctcagccacacctttgactgcagaggtagctgagaagttgggtttcgtgaaccatgttgttgaagagggtgaattgttgaagaaaagcagggaaattgcggatgccattgtgaaaaataaccaagacttggtgttgaggtacaaggcggtcatcaatgatggcctcaagctggatcttggccatgcactttcccttgaaaaggagagggctcataattattataatggaatgacgaaggagcaattcaagaagatgcaggaattcatagctggtcgaagttccaagaaacagtccaaattgtaggttctttattttcgccgatctctcgtgctgtaaatgtgtatatgtttgcttccccaatttggggttttacgaacactattccatacaaaatctgactaccttggcttttaataatgaattatataaatgatagcagttcctcgtcatcaaaattctagaaaaaaatgaatgttgttatgaattatttctggtttttgttgacttaagtatgtctgtattagtgtttttaaatatggaaattctattagtcccttgccctg

SEQ ID NO: 98047 - DNA, 198 bp, Glycine max
  Clone ID: PAT_MRT3847_5954C.1
gctttgttttggctgctatctgcgatgtggcatgtggtgcgctacatgctgctccacttgaaactgcgaaacttgatgccaaacggcttcctgataaatctctacttggtaaaaagtttgccatggggaagattaacctgaagcgtttaatagtcgcttgtgagaagagcacccgacacttgtcaattctaaatgaat

SEQ ID NO: 98048 - DNA, 829 bp, Glycine max
  Clone ID: PAT_MRT3847_59550C.1
caagaacctaaaaaacaaagtcatggctgtgtgctcaataatgctgctgctgctactttttacgcttctcattgcaacaactaaaactcaacccatgtcaaagccaaactgtccaacaaactgtggctctgtcacggttcccttcccatttggcatgactgaggattgttccttggacgcttcatttctcgtctcctgcaaccgaacctcttcttcatcacatgtccttttcttgccacaaaccaacataagcgtcctaaacatctcactcaatggcgagctgcagatttcatggccagtagccagcgactgctacgctgaaagaggcaaactcgtgagccaaacattccaagacataaacctaacaacttttcaagtctcttcgaaccgaaacaagtttactgtaatcgggtgcgacacgctgggagtagtggtgggaatcgattcaaagggaaggaactacaccacgggatgcgtgtccctgtgcaacaggctccaagacatcgaaacgaacgggtcttgttccggcaccggttgttacgagacttcgatcccgcgcggtttgtcgggtttctcctacggttcagggagcgtggtcgacttcaacttgtgcgggcacgcgttcctcacggacctcgtcaacttcgacaagacaacgttccccgttgggatggattgggtagtgaagaaccaaacgtgccaagaagctatgaagaaggtttcaagttatccgtgtagggcacaaaacagtactagtaaatgctaccattcattggtgtaactgctaaagaggtttcgagggaaacccttacctacttcatggttgaga

SEQ ID NO: 98049 - DNA, 247 bp, Glycine max
  Clone ID: PAT_MRT3847_59551C.1
gaggaatactgcctcgtcacaggcaatggctatgtcatataatggaaacccgtgctctgatgcatggagaaaggaatatctgtaacgggctggatttcactgcgaggtcattggggtcactggatggcctgccaccacagtgcacgatgttcgagatacaattgagaggcttataagcttttaagaatgctggtccaacacctatggcggcttaaattcacacacaggctactggctaaatttgtgg

SEQ ID NO: 98050 - DNA, 348 bp, Glycine max
  Clone ID: PAT_MRT3847_59552C.1
attcaagtgtttttccggctaagttgacctattggctgcttcgccgtctttacaactagaatggcccgtgagagtaactgtctccaaggctacgatgccgttctatatgcgaaatatactaattctcctagatcgatgacaggaagccggacattctgtacagcggaggaggtaggcttgcgccctctgcgacctagaatgctccctcgtaggctactgccaagaaggattacatgtcactggcaccgtcagattctatgccgaagatgcaaccattgtcgagctgatctgtgtatgcagcatcgatatcatgtccgagcttcttgcaagacgagtctacggtgtacc

SEQ ID NO: 98051 - DNA, 372 bp, Glycine max
  Clone ID: PAT_MRT3847_59553C.1
acggtctaacgctatcagaatcaacacatcggcatatacattaacgtgctatgctgttgagttagtaaacaccgcgcctaaaatcgttcgtatcagattgaacatgtctccaagtagcacggctgatataatggctacccctgatgcagctccctggcagctcaatgtagatacatatgatgcattcataatcaggaacaataatttctacaccttattatcgcttcaactttgacacaacattaacatgcatacactctgataccacatctctgatgacaattggactaaggttactaatatatgttcatcatttgcatttaccctagccaaatttcatcaacaatgatctcttggataacttatatattg

SEQ ID NO: 98052 - DNA, 433 bp, Glycine max
  Clone ID: PAT_MRT3847_59554C.1
tcgggcccggaccctgcgggggacccagttttccttatagggagccgaataaaacctgggggaaaccagggccaaagttgttccctggggaaaatggttatccgttaacatttccccacaaaatacaacccgaagccttaaggggaaaacccgggggggcctaaggagggacctacctcactttattggggtgggcctaatggcccgttttcaagcgggaaaacctgtcggcccagttgatttaaggaatcgcccaccccccggggagagggggttggcttttgggcccccagggggtgttttttttttccccagggaaacggccaaaagttgatggcctttaaccgccggcccctgaaaaagttgcacaaggcggccccccctgttttgccccaccaggcaaaaatcctgttggagggggggtaaagggggg

SEQ ID NO: 98053 - DNA, 1383 bp, Glycine max
  Clone ID: PAT_MRT3847_59555C.1
ggtgtggctgtctgtccccgtctcttttttttttttcatctttgtccgttgcaactttcaaactttatagtttatgtagttgctgtgattcccgtgagcagcgtttagattactaacttggacacatcggtttttgaagcatcggatagaggtgattaacgctaaaccgtaccagagtaggctgttacctgactcgaactcaggcggacgtcagctgacattcacggaatagttcgatatcataattcctcgtcctttgctgttatagctcccgatgtctaacactacttttagaccttttactggttcctccaggaccgtggtcgagggagaacaagccggcgcccaggatgatatgtcgttgttacagtcacttttttccgacaaatccagggaggagttcgctaaggagtgtaagctgggtatgtataccaacttatcttctaataatcggcttaattatatagatctagtccccaagaacactggtagtagagctctgaacttatttaagtcagagtatgaaaaaggtcatattccctccagcggtgtgcttagtatacctagagtgctggtttttcttgtgaggacgacaacagtgactgaatctgggagtgtcaccattagattggttgacttgataagcgcttcgtcggttgaaattctagaacctgtggatggtacgcaagaggctactattcctatttctagtcttccggctatcgtttgtttttctcctagttatgactgtcccatgcagatgatagggaatcgacacagatgtttcggcttggtaactcagctggatggtgtcatatcctcagggtctaccgtcgttatgagtcatgcgtattggtctgcgaactttcgtagtaaacctaataactacaagcagtacgcacctatgtataagtatgtggagccctttgacaggttgaaacgtttgagccgtaaacaattgaaaaattatgttaggggcataacgaatcaatctgtaaatcatggttatctattgggtaaaccactactgaagactgacgagcaagatccagagatgattgtgttagaggaggaatcactaacccctaccgacagcaacggagtcggcaaggataaaatcgctgtgaccgcgaaatccgttgcggggcttccgacagcctcgatgtctatcaatcgtagatagctagatctattgctaacagacttagtgtcatgggagcaaaactcatatgaggtcattgaaacatgaactgggaagaatcagaacccgccgaaaggacaggctgagggcgtacggttcatgcgtagttgattgggtatgagacacaaaaaaaaaaaaaaaaaaaaaaaaaaaaaaaaaaaaatccccacaccaaaaaaaaa

SEQ ID NO: 98054 - DNA, 203 bp, Glycine max
  Clone ID: PAT_MRT3847_59556C.1
gaacatttctttgctcacgtatcacccacaactgtcctggtgaaggcgaacaatgcgtgaaagctgtctatctcctgagctgtaaaagtgcacctagcgtgatatccgttgtctaaaccgataacctgctgagcaagagggacaatgccgagcagcgtgacgacatgcgagatatgatcctcgaattcttggcagaagcggga

SEQ ID NO: 98055 - DNA, 723 bp, Glycine max
  Clone ID: PAT_MRT3847_59557C.1
cctgcccctcagcagtgagcacccaaaattccctgggctgctctccaccccaccaacccccaaccctagaagacatcagctgcagttcttgtgtggaaaagtccaagaaagccccttgtgggactgccaatgggccggtgaacacagagataaaagccaatggcccacacctctacagcagccccactgattccacggatccccggcgacttcctggcgccaacacccctttaccaggcctcacacaccggcaaggctggccccggcccctcacgccaccatcggctgggggacttcagaaccacgtcggcatcattgtgaagacagaaaatgccactggccccagctcttgtccccagaggagtttggtacccgtcccaagcctgcccccttccattcccagctcttgtgccagcatcgagaacaccagcactttgcatagaaagactgtccagtcacagataggaccttcgtcgacagaatcgaggcctctgggctcacccccaaatgccacccgggtgctcactcccccccaggctgcaggagacagtatcttggccacaggtgccaaccaacgattctgctcaccagcgccatcatcagatggcaaggtcagccccggcacgttatccataggaagcgctttaaccgtaccctcttttccagccaactctactgccatggtggacctcaccaactcacttcgagcatttatggatgtca

SEQ ID NO: 98056 - DNA, 511 bp, Glycine max
  Clone ID: PAT_MRT3847_59558C.1
gataacgatgcacactaggcggtaggtccttaccagaggaaaaacctatagggtcagataccaactgatcatattgcactgatggtgaatgatatatcttacagcacctcaatgggggcactccgaattcacactataataaactgaattaagattaatcttcggaacggtgttgcgatgatatccaggctcagactcaaccatttaagccacggatgctttgcggtcactcaaatccatcacacgggaactgttacccgattcggtggcataccaggaaacacgttttacaaaggtgtcattcaaggaaattccggcacttggcgttaaacctgctagacctgttatgaccaacgtaattgagagactcagcatcatcttacgtgggacccacattacccttcaatttgccctctgattcctccttgatagcagacatgatatgctcatacgacgctggcttatctagcctaacagtgcggtcaacatctgacacatctacagtggggac

SEQ ID NO: 98057 - DNA, 282 bp, Glycine max
  Clone ID: PAT_MRT3847_59559C.1
ccggaaatagggtaaaccgcgacacaggttgtctaccttaaaaccggatacaaaagcaatcgttacttgatttcaagaatctctcaatgtcttcctactggaatgtggacgatttcttaagggaaagaaaatcactctctgtgctggtgacagacttcgtgaatcattttcttttccactcttagtgtagttgctgaacactctcctatttgatataggatttcgggtcagatttaaactacttctggttctttttcagctctctgttaaattcaaggtcaa

SEQ ID NO: 98058 - DNA, 281 bp, Glycine max
  Clone ID: PAT_MRT3847_5955C.1
gctactattccgcggccgtccttttttttttatattactacttttttattaaagctcttgcaacttaaattccaggtagggtaccattcctcccacataatttctcctctttctcaactttaaaacaaaatgataacattggtcccatctctcgacacatgctccacctaattttaataatcttacatctttacatacaaaatccaaatactctcaattctaaaatcaagaaatgacacttaaaaatcatcttaatgaaatgaaaccaaaacccacaaaca

SEQ ID NO: 98059 - DNA, 221 bp, Glycine max
  Clone ID: PAT_MRT3847_59560C.1
ctatactcatagtttactgatatattgatgaagcctcttactgattatgtgaatctcaacgacttcgctctaagttgagctcaagatatagatcaaacttttgtgtcatactcatgtcgagtattgtatgtagcactacgtagcctaaaatatatcctcttgaggacgtattggcgtgttgcattatctgattcgggtataccatacttatcgctattggt

SEQ ID NO: 98060 - DNA, 269 bp, Glycine max
  Clone ID: PAT_MRT3847_59561C.1
aacaacacaacatccagaattaagcattaagtaatcaagatgtcgagttccctaatccctaatatgctcttcttgagaaaaatgaaacaataccattttacatgccacaaatagcatcatttaaacctgcaagagttggaatgagaatgcatattttctcgactaagaacctttttttacattttgcaacagaatatctgcactaatgaagagaaacaccactataagggaagaaccttaaatgggaccatacatgttgtagctggtgg

SEQ ID NO: 98061 - DNA, 116 bp, Glycine max
  unsure (1)..(116): unsure at all n locations
  Clone ID: PAT_MRT3847_59562C.1
taaagataagcnaaaagaggcttttgagaaggaagataaatccaagaagtcccgtgagcatcactgagtttctganngtatgcttncncctcagcnnggcttcagaaactcagtga

SEQ ID NO: 98062 - DNA, 245 bp, Glycine max
  Clone ID: PAT_MRT3847_59563C.1
agagaagcaaaaaatacaaagaaaatttgaggtggaaaaagcaaaatcgttaggtgggaatagcacgggcccaacgaatgacgtccaaaaattacgtaccatgaactgaacagaaattaggccgaacaggtaaacataaactgaataaagagagagaaacgttggtggccatgtaatgacagagaggccaacgaggaagagaaaaatgggagacacaaaggagagagctacgaagaaacccgcgg

SEQ ID NO: 98063 - DNA, 3411 bp, Glycine max
  Clone ID: PAT_MRT3847_59564C.1
ccacgcgtccgcacggccttcagagttgaatgttttacggttgaattaactaggagggttgatgagggtggggtgaaagatgtgttaatagatggtgcgcatgtgaagggttcattgattgaaaggaaggcagaggctcgagggcagttgtatggtgatcatcatgatgtgaagaagaaattagagaagccgggattgactgtcgtggatcatatcggccctggaagggttccaaaggctatagaaggagagcaagttgcggcaggatggccggcatggctttcttctgttgctggtgaagctattaagggatggataccacgtagtgcgaatacttttgagaggtttcataaaattgggcaaggaacttacagtactgtatataaggcacgggatgtgattaaccaaaagtttgtagcattgaagaaagtacgctttgacaatctggatcccgagagtgtcaagtttatggcaagggaaatccatgttctgcgtaggcttgaccatccaaacataattaaattggagggcttgattacatcacgaatgtctcgcagcctgtaccttgtttttgagtatatggagcatgatcttacgggacttgcatcaaatcctgatattaagttctctgaaccacagctgaaatgctacatgcagcaacttcttagtggattggatcattgtcatagtcatggtgtcctccatcgtgacataaagggctcaaatcttctcattgacaataatggagtcttaaagattgctgattttggtctggcaaatttttatgacccccatcacaatgttccattgaccaagccgagtagtaactctgtggtatagaccaccagaacttttacttggagcatctaattatggagttgctgtggatttgtggagcactggttgcatactgggggaactatatcgtggcagacctatattacctggaaaaacagaggttgaacaattgcataggatttttaaactttgtggctcaccatctgaggactattggtgcaagctgcggacgccacattcaacagtattcaggcctcctcaccattataggcggtgtgttgctgaaacatttaaagaatacccatctgctgccacaaggcttattgaaaccctactttctttagatcccacacttcgctgaacagcagcaacagcccttaagagtgagtttttatcatttcaagactttctcggagaccgaactatgttaccgaaatattctagcagcaaattgattgacactaaattgtgggaagaagcaacaaggcatggagctgatagggaaaaggagcaaaaatttagaccaggaggtcgacaagagaaagaacctcagacatttatattatccaaagacagtgccgactcctgcatatcaatgcagcaagggcaacgccttccaaactcaaggagccggaatgagttcttcaatcctcacagagaacctgtgtctggacatttggtttttccacaaaaacagtcagaagatcataaagaaacgctaaattatttctccggccctctttatcagaggcctttgcattcaggtccattggttccaggttatggctgtgaaatggttggaagggaagccggtgaacggcggcctcatgtttcaaacaaagtcaacctaccaaaactatctgggttagtggcatctaggacttcttcattgtctggagatcaaaaagaaaatccagttccctcgaggcctcgggaaacaattgaagtacaaatatctttggagtcaactaatggatcagagtcaagaagaaggcatgataccaaacaccattctcagagaattgatcccaggaaaattgaaaatggaaaagtttcaactgaaaccttaattcaggatgggcatggatccatgggaaacaatatctaccacctctctggtccgttactggtttcttcaaacaacatagatcagatgctcaaagagcgtgatcgaaagatccaagaatattcaagacgagcaagaatgtacaagtctggtgagatagctcatgcaaagcaaaattaggatgattcatagtcaattacaattttttttccaattacgcagctagttacattttttaatgaccgtgatatttatctcaaaattatagaaagagaggtaaagggtggaaagtgtgttcatgcacgcttctcttgttaattacatatatagtgtaaattgctaataagaatttgatgttccttccattattcatgttttatccttatgtacatgcgatccaattttgaaaaattgaattactaaagctccatttgtttggtcaaaaaaaaaaaaaaaggaacagcaactacagccctgaagagtgagttcttttcatcggaaccccttccttgtgatccatcaagtttaccaaaatatcctcccagcaaagagattgacactaaattgtggaaagaagcatcaaggcacggagctgatggaggaaaggagcaaaaatttagaccaggaggtcgacaagagaaagaacctcagacatttatattatccaaagacaatgctgactctcacatatcaatgcagcaagggaaacgccttccaaactcaaggagccggaatgaattcttcaaccctcacagagaacctgcgtttggacatttggtttttccacaaaagcagtcagaagatcataaagaaacactaaattatttctccggccctctttatcagaggcctttgcattcaggtccattggttccaggttatggctatgaaatggctggaagggaagctggtgggcggcctcatgtttcaagcaaagtcaacctaccaaaactatctgggttagtggcatctaggacctcattgtctggagatcaaaaagaaaatccagttccgttgaagccccgagaaacaattcaagtacaggagtcaactaatggatcagagtcaagaagaaggcatgataaaaaacgccattctcagacaattgatcccaggcaaatcgaaaatggaaaattttcaactgaaacattaattcaggatgggcatggatccatgggaaacaatatctaccacctctctggtccattactgctttcatcaaacaacatggatcagatgctcaaagagcgtgatcgaaagatccaagaatattcaagacgagcaagaatgtacaagtctggtgagatagctcatgcaaagtaaaattaggatgattcatagtcaattacaaattctttttccaattacacagctagatacattttttaatgacagcgatatttatctcaaaattatattaagagaagggaaggggggaaagtgtgtttatgcacgctcctcttgtaaattacatatatagtgtaaattgcaggtttttataataagaatttgattttccttccaaataaaaaaaaaaaaaaagaaag

SEQ ID NO: 98064 - DNA, 237 bp, Glycine max
  Clone ID: PAT_MRT3847_59565C.1
agaggataaatattttgttgtatttgattgtagaactatttgaattgtatacatgtacaaattgacgaggcaaaatttttcaatcctcagcggatccctaaaatttggatgctctgcaggatttggatagaaaatcatgactctctaatcttattgagtcataatgttcaaaaggcaggctcttgttttaaccatgcgcctaaaaacttcctccaaaccattttctatgctttcaat

SEQ ID NO: 98065 - DNA, 1215 bp, Glycine max
  Clone ID: PAT_MRT3847_59566C.1
ttcacgcgtccgcccacgcgtccggtttctgataaatatgattgccatagagactatgcagacaggggattggttgattcttttcaaggttcaattcagtcatcagagcaagcatcatccaagaatgggtccatgtttatcaaggaaaagaagagggaaatgttggtcaatggtggtgtcagtggttcttcctcaagagcatcaaatcttgatggtgctgttcatggtggagtgaagggaaagagaagcgagagggagaggaatcaaagccgggatcagagcggacaaaattctattggcagagctggacgcatgtcactggacagtagccaaaatgagaacaaaccaaaagctaagaagcaaaagagtactgctagtggacatgataggattatggaagcaaaggaatctgctcgtttaccaattcatgatacaatcaataatgatagcaaagatggggctacgatatctggttcaatcgacacttctcaaataaaggaatccaatgactttgggaatttgccgctacctgacttaagttcaatagaagaatttggtggtgcgcaagatcttagttcatggttgaactttgaagaagatggtttgccagaccatgattctattggccttgatattccaatggatgacctatcggatttaaatatgcttatgtgaagggatgtacacgtgttatatctgaaggagagtttgtatgtactcagtgaaccttgtggggcgtcaagatcttgatggtatacttgggtttctctggaggggaaatttttgtgattggaattatgaattttgacacatttatagggtgaacgggagatggggagtgacttaaaattgcaatttgatatttttgtggacgttgtatagaggaagctacaatcatggatttcatgaaattgctgtcagatatctcccttctcccatgaatcaaactagttttgctgtgttaaagtcatgatctcagaaatggcttttctataggagattagattaattaaagtgctatagcctgagagtggtttcatttctgaagctgtgacttcagctaccatactatgtaaaatgtttattgttcttgtagaccgaaactcgcacaatgttgattgttttctcctgaataatggagaatgagtttttaattaagtttttctaggattaaaattagtaattaatcccttctagaagaatgtgtttttaatt

SEQ ID NO: 98066 - DNA, 541 bp, Glycine max
  Clone ID: PAT_MRT3847_59567C.1
cgaggatatggttaagccgaagcaacagaagaagctataccagaagaagcaaccacacccacaaattaagaagcagggaaaacaagtaggtacttctcaatttcggactcagttggatggtctgggcttacgcattgttgaagtgactgcagatggtaattgtttcttcagagctgttgctgatcagttggaaggcaatgaggaggaacatggaaagtaccgcagcatggtggtgaaacacatattgctgtaattaacaggataaccgggagatgtttgaaccctttatcgaagatgaagtcccatttgatgaatattgccagtctatggaaaatgatggtacgtgggctggacatatggaattgcaggcagcttctcttgtaacgcgtagtaatatatgcattcatcggaacatgtcccctcgttggtacataagaaattttgataatcgtggagttcgtatgatccatctgtcttatcatgatggggagcattataacagtgtgcggttaaaggatgatccttgtgatggagctgcaag

SEQ ID NO: 98067 - DNA, 552 bp, Glycine max
  Clone ID: PAT_MRT3847_59568C.1
atcagagcggacaaaattctattggcagagctggacgcatatcactggacagtagccaaaatgagaacaaaccaaaagctaagaagcaaaagagtactgctagtggacatgacggctcgagacagctgcgggatgacgaccgttgggcaattcatgatgcaatcaataatcatagtaaagatggggctacgatatctggtaatcaggacacttctcaaataaaggaatccaatgactttgggaatttgccactacctgacttaagttcaatagaagaatttggtggtacgcaagatcttagttcttggttgaactttgaagaagatggtttgcaagaccatgattctattggccttgatattccaacggatgacctatcagatttaaatatgcttatgtgaagggatgtaacttacactctcaaggttacacgtatcatatctgaaggagagtttgtatgtactcagtgaaccttgtggggcatcaagatcttgatggtatactctggttgctcatggaaggaaaatttttgtgattgaaattaagatttta

SEQ ID NO: 98068 - DNA, 210 bp, Glycine max
  unsure (1)..(210): unsure at all n locations
  Clone ID: PAT_MRT3847_59569C.1
ttattggaaacttctggctttaaacgaactttggaattctcagaacctttcgttttccgcgggatcgcgattccgcagaatcgtctaatcgtcgttgatcgtcgattncgggtcggctgcatgaactggtcgggaagctggattatatcgcgactgaacttaatcacttcgtacggttgttggtttttctcattttggctaatcgcactt

SEQ ID NO: 98069 - DNA, 503 bp, Glycine max
  Clone ID: PAT_MRT3847_5956C.1
ggggaagtagtgaaggcagattcggttcttcagaaggcagcccagcagagccagatgaagccaatattttctacctacctaactattttggagcagtatgctaagaggggtgacatccataactcggagaagattttccttagaatgaaacaagctgattatacatctaaagcaaagatgtaccaggttctaatgaatgcctatataaatgcaaaggttccagcctatgggattagggacaggttgaaagctgatagcatatatcccaatagaaatttggtaaaccaattggttcaagttgatggatttaggaagaatccagtctgcgatttgcttgattgaggaggccaacagattcttgcgccagtgttgtttctactcatacacatgcaactgttgttagtcaaagagtactcatagggatggcaaacaatcccctacctgtcggtaaccatatacccacgctccgagtttgacggataataaccaagttgactggacat

SEQ ID NO: 98070 - DNA, 1079 bp, Glycine max
  Clone ID: PAT_MRT3847_59570C.1
ctgccccctcccacgacagaagggggttgaagaggtgaaggaatggaggttggaggttgcaacgtgcaaacgcctcttttgagagaaaaggaaaggcccgaagacgcacaaaatggtaactaatccagtaatactggcttaacaaagcacaaaatgtcctctaatccagtaatactgcagagtgtgaacttgaccaagtatatactggagaccagcgtttatccacgagaagaagagactctcaaagagctaaggaaagccactgcaggccacccttggggctttatgggcgctgctcccgatgcgggtcagctaatgaccttgctcttgaagttgttgaatgctaagaagacaattgaagtgggagtttttactgggtactctcttctcctcactgcacttaccattccagatgatggaaagattatagccctggatccagacagagaagcttatgagataggattaccgttcattaaaaaggctggtgtagagcacaagatcgacttcatagagtctccagctctaccggttcttgataaactcttagaagatccttcaaataaggaaagttttgactttgccttcgttgatgccgataaagataactattggaattaccacgagaggcttcttaaactggtaaagattggtgggttaatcatctatgataacactctctggggtggaactgttgcctggcctgaagaggatgttcctgtaccaaaaaggaaactcaggcaggctacactggctttcaacaaagcaattgctgatgattctcgtgttgaaatttctgttgtttcaataggtgatggcttcactatctgcaggcgtgctcattgaacatcatctgccaatgttgtattaagattcaagttaatttcatgtactatgttttcgtgttttatttttctctcttttgggagtggggggtttactaaatttacgtgataacttgtggtataatttgatttacctccgactctggggcctatgccctatggtgtgactctaatgtgaaactgggcgtgtcgctatttatttactagtactaaataaaataaaatgttgtgtct

SEQ ID NO: 98071 - DNA, 212 bp, Glycine max
  unsure (1)..(212): unsure at all n locations
  Clone ID: PAT_MRT3847_59571C.1
aattccacactttctgatacttctctctctctctctctcactctaatctaatgttttctttccacatttcatactatctctnaaaannngcanncgngnnncntngnanaatcagcanangcaaaccccccaaggcacaggaaccaagcaccaggaaaacgccccaccacacgaaacccgaanaacaaacccgcggcagacccaccaaacca

SEQ ID NO: 98072 - DNA, 1264 bp, Glycine max
  Clone ID: PAT_MRT3847_59572C.1
gaacgatcctcgtcttctaaaggaagatactcttaataatgaactgagttcatcaagaagagatatgcaattatctgtaagggatgcacttaactcaaagaaagacgagcctcagaaagattcagatgctggtagcatggcatgtcttaatttcagtgatgacgatgaagcagattttgatgcaagaatgcgcatgcaaatactcaaaaagaggaaggagttgggtgatctccctcccaagccaaagttgcgaaatgcaggaaggtccagtccagagaaccatgatacgtcgtctgcagccaggtccaatgctgtaagtgttgatgaggatcaaccaaaggtggaaaaattgtccttgaagaaaaagggagttggatctgaagcaagagctgaacgaatgtctaatgcagatgcagatttgcaactattgaatcaagctgagagaggaagacaattgcagaagcagaagaaacgcagacttcaagggcgtgaagatgaagttctggctaaacttgaaaaatttaagaattctttatcagcaaaggcgacacccccaactgatgaatctgaagacgttagtaatgaggaattgtcagactggaaaggtgttagtttaaagtttgccccacagactggcaaggaccgcatgtctcgcaatgaagacccaaacgactatgttgtgcatgaccctcttctggagaaggggaaagagaagttcaataggatgatagccaaacaaaagagacgagaacgagagtgggctgggagttcccttacttgaccttacatgtgccaacatggctgtgtaaatatacaaagctgattggttttcaaggctagcacatcactgtgctgctgggaaagtaaacttgccctaataggaacccaggagaaaaatgttgcattgaggagtttagcaaacatggttggcaagtacattgatattggtgagtgagatgtggggttactcatgaaaggacctactttgaattgttcgtatttttggtccaatgtcaaaagatgtattgtgtagattttaacacaccaagttgttgtgttttatatatttaggattcaagagaatattgtattattgtggaactaacgatttcggcagatgaagtcgttactcagaattatgctagttgagatgggttttacgttgcactattttatatgggtattcaaattaatagcatgtttggtaatgcatcatgcacatggtttttcacatcggattagaagttcctagttcgaggttttt

SEQ ID NO: 98073 - DNA, 538 bp, Glycine max
  Clone ID: PAT_MRT3847_59573C.1
gggattggctcatagaatatagaggatcttttgatatgccaaaagctagtgcagagtggagctgatgcaacagccaagacatcgatgcgagcacatcgtgtacagactgacatcctagtcgcaataaataccggaattcagggatttatacatgctagcatcagtctatcacaaacatcactgagtgaaatatttgggtgcacgagatgcagaaacatatattgtcaaaaccaacttgctgctgaagattgtacctgcgagacatgcactaatggcgatggttactgcagtctctgcatgtgcgttatctgcagcaaggatgactttgaagacaatacatgccgcttgattggatgtgataagtgttctcattggactcagacagactgtgccatacgtgagcaacatattagtatgggcccttctgcagagaatggagcaagggcaagtgacatggtgttcaggtgtcaagcgtgcaacaggacttgcgaacttctgtgttgagttaaagatgccttccagcattgtgcaccatcat

SEQ ID NO: 98074 - DNA, 274 bp, Glycine max
  Clone ID: PAT_MRT3847_59574C.1
gacccaggcatccgcccaggcttccgtacaattttgagttctgtagatataaaccaaacactatgtagaatcgcgggatattctggaccatatttgtgaaaaatgaacagaagtgccaaatctcccaaaaagtgcaccatagctatgggaaaatatttgagattcttaacataatgatatccatttaattacaagccaatctatccggatttcgggattcttaatgtaagacaataaatgatttctttaaacataatcctatttgtacaatttt

SEQ ID NO: 98075 - DNA, 442 bp, Glycine max
  unsure (1)..(442): unsure at all n locations
  Clone ID: PAT_MRT3847_59575C.1
tgagcatcgtctagctatctcgatcgaactgtccaaggtcctgtcacccccatgggtaaaacaacaacgacaacaagataaaaacgttgggtgctttgggttggagggggtgtgtgtgtcgaagcctcacggtggtaacaataaaagtgacgccattancgtgctcggtggtggtgtgtgtataggtgaatactggtgcggtcgaggtaatagtaaatctattggggtatgtattggtcgtacgtggtggtaatgtctatcgcatggtttctgttatggttttcatatcgcgccaattgaggttgcgtttcgttcttgtttgcataggtccgttccggtctttgcgattgcgttagtgttttcaatctcagttatcgtagtntcaccaactattactagtattcttatcggatcgtgtacaacaaaatcgcgtagcgcggtg

SEQ ID NO: 98076 - DNA, 282 bp, Glycine max
  Clone ID: PAT_MRT3847_59576C.1
cccacgcgtccgttaagaattgatttgttcatttgagcattacacaaattaatatcaagtttctcttttcaaaaaaaaaaaaaaaaaaaaaaaaaaaaaaaaaaaaaaaaaaaaaaaataaaaagaaagtagaaaataaacaaaataaaaaaaaaaaaaaaagaaaataaaagaaaactaatatactcaaaatgaaaaaatattttacactccagttctttaagacccctaggctaaatcaacttaagcccctggtaatactcctattttgaccaatctacc

SEQ ID NO: 98077 - DNA, 383 bp, Glycine max
  Clone ID: PAT_MRT3847_59577C.1
agcatgcgatcggttctagctttagcaggaatgtctgttgtaagacgatgcttcgtttacttgattcttaaccagtaatccacgaaggctggtacttgcatcatctctatgacgatgcgcgatgaccatacctagctcattgtaactcgattctctccaaggccgacaatgccgaacgtggatatcacagttggtcatctgacgctgatcacagtcccttgtatgccatacatgcggtcgtatacagctgggcgtggatacctgtactcttaaacgtgtacagccttgtcagataccatgacgggatctactgagttgaacatcggctttgacgccgatcgtggccacactgatgagagacatctgatctggtcctggtacaa

SEQ ID NO: 98078 - DNA, 325 bp, Glycine max
  Clone ID: PAT_MRT3847_59578C.1
taacacaaagacgtcatcctccatggctgccttcgtctccactgtcggagctgtcaacagagctcttttgaacctgaatggttctggagctggagcttcagctcccacatcagccttctttgggaccagcttgaaaaaagttattgcctcaagggtcccttacaacagggttttcggtggaagcttcaagattgttgcttgtagaacacaagaaagagattgatgagacccagcctaccgacaaggacacatggaagggggttgcctatgatatcttagaacacccacaagaacttacaaaaggaaagggtttgggtgactccct

SEQ ID NO: 98079 - DNA, 696 bp, Glycine max
  unsure (1)..(696): unsure at all n locations
  Clone ID: PAT_MRT3847_59579C.1
ggagtcccgaggtgggtgtctctagaacagtgagaaattgacagtaatggtggacagagaaatacagatactactattcttattctactactagtctccaaggaaaggagatcactatccaaaccattctcactttctcccttcaatgccactcttcttcctttctctttgagagactgcacacaaatttctactgtttccagagcgacaatggatccggcggccatgatgaacgccgccgccaacacggcgtcatatcacctgtcagagatctggcacttcccgcctcccaacgcgccagacgcgctgggcctcaggagggcccacttcgccccgggtccgacccgacatgccgtcccgggtcgcgacctggctagcatcgcccccaagaagcgccgccaagccgaggaggaggaggtggaatccactaggggcgcttccaccaccaatgccgtggatgagggttgtggtgatggaaaacgggttaagacgagtgagagtgggaaaggtgaaggagaaagctgttcangaaagcctgcgaagcatagcggtaagccaccttcggagcctcccaagcaagactacattcatgtcagagctagaagaggtcaagctactgatagccacagtcttgcagaaagagctagacgggagaagatcagtgaaaggatgaaaattccttcagatttagtcccg

SEQ ID NO: 98080 - DNA, 302 bp, Glycine max
  Clone ID: PAT_MRT3847_5957C.1
aaaaaaaaaagaacaaaaaaaaaaaaacaaaaaaaaaaaaaaaaaaaaagacaaacagatgggaatgtgtaggctctcaaatgggggcggccagcgtactaggtcttagctcgtgtaaactttaatctaattacaagtcagtggtttacaatgtaccacctggaaaaacgcatggccttgtaaaatcactcgtattgcgaaatatacgcctttccccagctggcgtgtttgggaaaatggccgaatagagcaccgttccaaactgtttagaattctcaagggtgaatgggacacgatctgta

SEQ ID NO: 98081 - DNA, 270 bp, Glycine max
  Clone ID: PAT_MRT3847_59580C.1
tccacacatatgagccacaacaatacccgggatcgactaagaactgcccatggtgtctcgctcctatctcaaaccgctacttcctgaccttgaacacctgaaacaagtaccaatacgcctacaacagtggtgagggtgctgacgtttacgctgtcgacactggcacaaacactaagcacgtcactttgatgttctgccaagtgaggctgaccatcacaacggtatgcacgccaggatggcaacttccacagaacccactgctccagtact

SEQ ID NO: 98082 - DNA, 768 bp, Glycine max
  Clone ID: PAT_MRT3847_59581C.1
acgcaataaataataaaagctgtcttatatgagaaatgatatatgagtgggtgttcaaaaccatttataaatctacatgctgatacaaaaacataaaaaatcacttaaataaaaaatcacatgaaccaaaaatatgaaaaatcacatgtttttcgattttcacatcttgttttaaaaatcaaatcagtatatcataattatattaatttttttattgtgataattaataacgagtattaactaatttattacttttatttaatttataatcaagatgtatattttattttcatgtacttatattgttaaaaaaaaatattaaatatcatgggatacacaaattactattatattataaaataagttgataatattattatattttaatactaaatagaagtgaagataataatttttaattaaaatatattaaacaaaatttaataaaaataaaattaatttttaaaattatataacgtacataatacttgagtaagtttaattgatagctttaaattatgaaaatagactaaaaaaaaataaaccccaaaaccaaatcgagtcaaacaataaataattggtttggtttaaatttgatgttatatttaaattgaaccttatatttattttatgtttgatttggataacattttgtctaaaaattgaaccaaattggactaccaacaccccttgtgtaaaaaaaataaattctttcaatctctcacttttttttttttatcaagttatatcattgataaaaatagggat

SEQ ID NO: 98083 - DNA, 396 bp, Glycine max
  Clone ID: PAT_MRT3847_59582C.1
acactgaatggctgcagggatgaagacgattcctcatgctcatcagagtcgagtgaaagtgaatgcgagggccaagttatgaggatgagccgctgcgctacaatcaccgcaccggaaatgccacctccaagcacgggtcttccaatcatagttcctcaaattccagcacctttggcaccacagccgtctcaatctcaaccttcagagccagcaaccgcagtgcaagccaccagagtcagcagcgttgcagtaactgagacatccacaaccagcagaattgaggtctgcatggggggcaaatgcaagaagtcaggcgcgcttgctctcctgcaggagttcgagaaggctgtgggcaccggtggcgcggtcgtcggctgcaagtgcctggggaagtgc

SEQ ID NO: 98084 - DNA, 159 bp, Glycine max
  Clone ID: PAT_MRT3847_59583C.1
caaactctaatcctaaatctaaggagagacaaaatttcacaagataatcagcaaataagatttgtcatgcattttgagtaattcttagtttagaacacagtgaaggacacttgagtctagaattactgatattagtttgattctgtcgagaagcttgag

SEQ ID NO: 98085 - DNA, 918 bp, Glycine max
  Clone ID: PAT_MRT3847_59584C.1
tccggcgctctgttgaaattcccatgcgtattgtccctcgacagaatccgaggaagaacgaacagcgatactttctctctttctctgagtgaaactgaaaagtggaaacaaaacgtgtgactgttgcatgaattgtccaagttaagaagattgtgaaatcctcagaaatggagaggttacctttggaaatctgtatgaagatattctatctcttggactatcagcatcttgctgttgctcaacaagtatgtaggaagtggaagctcgtggcctcagagaatgctctatggtctgatctttttaaggagagatggggagaagatcatgctgctttttatgctcctgtgggttcaaaatcatggaaagatgtatatgaggtgcaagatcgttgtgatcgaattggagtgggtttgaagattattagagaaggcattgactactatcttattcaccaaggcgagatacagcgacatcttggttcaagaaagaatcatgaaaaggaaattggtcactgctccaatactttgaattcagaaagtaacttcaatggagaaggttctctagctgaagagagatcatgtcgtggaattttagacagaatcctttttttcattggggatttggaagttgcttctgcagaagcaaaacgtagccgtgtgatatgatcgtgtctagtattcaatccaatagtgaagttcagtgtaaaaattcccagtatctaagcattgtttcatgtatataactatgtgtatcaatgtattcagttattttaataatttgggtgctgtgtagcattttcagataagtcgtgagaatcacacaagtgacaagtggttgtttatcctgttacacaagtttgtttaaaccattgtgtaaatatgctttgtctaatcttatcagatgatcctgttatcatta

SEQ ID NO: 98086 - DNA, 303 bp, Glycine max
  Clone ID: PAT_MRT3847_59585C.1
gcaacagcctattactggctctctggattgcccatggccccagtactctctattagagagaggtctctcatctactaccctaattgcaaagtagatgagcctgcataagcgatgctccgtctgaagatgggatctgctcgatgctcatgcattgagcgactatcaggctggcatcatgactgcatttgtcagctgggtctaaagcaatagcgtctaatcttgagcattgagaatctccgaatataactgttctggcatatgatactgctatagaagaaggatatctagtcaagccaactggat

SEQ ID NO: 98087 - DNA, 203 bp, Glycine max
  Clone ID: PAT_MRT3847_59586C.1
aaagctgcaagaaaggaccgctccaacagtatcttaaatcaaacaagatgggtcgcatgcactctggaggaaagggtatttctggctcagccctgccatacaagaaaactcccccctcttggctaaagaccacaccttctgaggttgccgagcatgtgatgaagctgtcaaagaaaggactcaccccctctcaaatcggtatc

SEQ ID NO: 98088 - DNA, 320 bp, Glycine max
  unsure (1)..(320): unsure at all n locations
  Clone ID: PAT_MRT3847_59587C.1
ggctcaccaaggatgcgaggaagagcctccttcctcttcatattcatttaaaggttttacttgatcaactggaagaggatgttggtatcccgcggatgacgtatccaattctttctttgacaaggtaattgtgatcattgaaacatggcgagtagtctccaaaggaagaaggctcaccaaggatgcgaggaagaggacgtggtcgtggaaggggcaggggtagaggattttacaatgggggtatggaatatggtgatgattgggatggtgggcgtggctatggtggaagagggcgtggncgtgcatggtggcgtgctttt

SEQ ID NO: 98089 - DNA, 223 bp, Glycine max
  Clone ID: PAT_MRT3847_59588C.1
tatttttttttttaaccctttttaactacatatttctttcataattttgggttattaataaaaaacttgttatcataaacaaaacctacattccattcttcactttctcaaaacaaatatacttctcacctcatcacaaaaattaaatttttattattaacaatctaaatctataacatctcattccactttactgtttacatcctcttcattcaacataaaa

SEQ ID NO: 98090 - DNA, 155 bp, Glycine max
  Clone ID: PAT_MRT3847_59589C.1
gagacttcaggtcaggcggggctacccgctgagtttaagcgaaaaaaaaaaaaaaaaaaaaaaaaaaaaaggcggccgttttaaaggatcaaagttaacttacccttgcttgcaacgtaatagttttttaatagggtaacctaaattaaattaat

SEQ ID NO: 98091 - DNA, 492 bp, Glycine max
  Clone ID: PAT_MRT3847_5958C.1
tttcttttttttttttttttttttttttttttttttttttttttttttttttttttttttttttttaaaggaagggaagccgattttatagagtttttgaaccgtttaaagtttttgacaggaaaacccaacccctggaattctttttttgggaagtgagaaaaaaaaaaaaattaaaaccccgggaattttttgggggggcccaatttaaaaaaccgccttggtcttctaaaaaggtggttaaaaatcctggcctggaaaaaactttgggacggggacattattttccttttggggtgggggtgaaccaagggcccttttaagagcctgtttttggaattgctcgggtagctttttcagggtttccaagttttttgggcctaaaggggggaaaagggtagggggtatatcctgcaactttttttgtttgggggaacccctgaccaccccagtttttaccacaaggggagcttgaactttgggaattaaaaa

SEQ ID NO: 98092 - DNA, 376 bp, Glycine max
  unsure (1)..(376): unsure at all n locations
  Clone ID: PAT_MRT3847_59590C.1
agatgggaatcaccccatcatgatgtgtgctgganagttggaaagtggaaatgcacgagagccancaaaactgatcaagaagagataccgtgaaactgaaaacatgttttttaagggaaagatgtgcgctctcttcatcaattatattgatgcaggagctggacgacggggtgtttttttttttacacagcgaacaaccacaaggagaaagcaacactctttgttattgctgataacgcgacaaatgtgaagcttgcaggtatgtacaataatgaagagaacccccgtagtatgaataattgtaaccggtaaagatttctaaacaatctatgccactgttatacttgatgggataatggggaaagttctatgggga

SEQ ID NO: 98093 - DNA, 1831 bp, Glycine max
  unsure (1)..(1831): unsure at all n locations
  Clone ID: PAT_MRT3847_59591C.1
ggaaggagaaagaaaaatgattttctcaaacaagatctttgaatatagaggggacaaacaagtgaaaggatgatggaaacaaattttgacaaaagataaaccttgtttaatgttgttcctcttcatacttactttcactttcaatctccaagcaaaaaaatcaatggaaggaaaaaaagttcgcaaaagggatctagaagaaataaataatattcaaatgatacacggaattaatatgtaaataatagtcattaactgtaaccataaaaaatgattacaaaagtgccaccaaatccccaaagtataatcccatttttggataagaacattatacttccaaaaaagatggtagcagtcctcataaaccaaagctgaatgccagacacacacataaaacaagcaacttatactcgagtcagttatcttttgcgaagccaagtgaaacagaattggaagttcagaagaagaaaaaatggtccacaacacacttaaaagttattataataaagttttctctgccccaaaattcacccgttcctcaatattcctccatagaggaatgaggtataacaagattttaaaaacatgtcggggaaaatctactaagataagaaggaaaaaaaatacaagtttcagaatctggttctttaataatcaaatagactaaaagtacaaattaaaagatgcatttgaatagtgcctggtacttcagaagaatcagcggagtccaaaactaaatgattgatgcatcttatgagggtatctctggtactaatgacccatgtaaggagcaccagcaccaggatgaggtctcacaccactgctctgtcccatttgaggattctggtatccgggttgcattgctggctggttcccataccccatagcaggttgattcgcatatggagcaggcggccccccctggttaacgggggcaccgccaagccctccaagaagattcccaagccccaatccagctccctgattaatcaatgcagtcaacgcctgtccaagcaccggattcaacccctgggccggcacaccagggttgaaaccccccacagcagagcccgagggcgccatcaaatgaccacttccatgtgatggtccaccaccaccggaggaatacttgttcttctccttcctctgataatgaggctgatggtggtgatggtgatgatgagaatgagaatgctgttgatgatgataccccttgctccccttaggaccatcaacagccttctgacaatacaaagtatgcccctcatagttcttattgggctcttccaaagccttcttagcactctccacagacttatacacgaaaagcgcaaaacccttaggtttcccagtgttcttatccaaaccaagaggaccatcctcaacctctccaaactgcttgaagaattcaagcagcttctgaggatcaatctcagcactcacattgctcacaaaaatcttcctctgggtgtactcagacaccggggtcacgctcggcggtggagccggaacggggccggcggaggccagctggcacgaggtggtgcggtttccgatcttcttttgagggtgtttcagcgccttgcgagcatcgtccctgtgcttgaagaggataaaggcgtaacccttagatttcccggagaccttgtcggtgacggccttgcaatcctcgatctcgccgtatttcccgaacacggcggttagagtatcggcagtggcgtcccagccaaggcccggcgctgcatctgagcaacaattgcctgacaacaaagattcttcgggcactgagagtctgggcnattataccaaacttggcttggttagtgatagt

SEQ ID NO: 98094 - DNA, 164 bp, Glycine max
  Clone ID: PAT_MRT3847_59592C.1
gcgcccacgcgtaccgcttgttagcacactcgatgttgcttgtcctcttggaacaatgacagccatttatgacatactgcagaacgctctgatagacattgagctgtcccaccatacacacaatccttataccgccttgttacatcagtgagatattaattttt

SEQ ID NO: 98095 - DNA, 2012 bp, Glycine max
  Clone ID: PAT_MRT3847_59593C.1
aatacaataaatagttattcatactgtagctaagactgagcagtcaccatactgtagcatcactatctttataaaacaagaaaggcacgtgagaaacagattaccaaactagatattaacattataactgcaaaacaaaatatggaaagcataatttcatcaggttcaatgcagccaaacacaattagtatgccacttgggctcatccatgaatgaaagaagcctgattgaatcatgcaattggttaactaattttaatactcattttagtacacatcaatatcctcaacttcatgtaattccttgtttaccaactaggggcattcaaagatagggcagcatatggattaacaacaaacaacaattcacgagccactcacctaatgacccatgtaaggagcaccagcaccaggatgaggtctcacaccactgccctgtcccatttgaggattctggtatccgggttgcattgctggctggttcccataccccatagcaggctgattcgcatacggagcaggaggtcccgcctggttaactggggcacccccaagccctccaagcagattcccaagccccaatccagctccctggttaatcaacgcagtcaacgcctgtccaagtgctggattcaacccctgtgcaggcaaaccagggttgaaaccccccacagcagagcccgagggcgccatcaaatgaccacttccatgcgatggtccaccaccaccagaggaatacttgttcttctccttcctctggtaatgaggctgatggtggtggtggtgatgaggatgagaatgctgctgatgatgataccccttgctccccttaggaccatcaacagccttctgacaatacaaagtatgcccctcatagttcttatgaggctcttccaaagccttcttggcactctccacagacttgtacacaaaaagcgcaaaacccttaggtttcccagtgttcttatccaaaccaagaggaccatcctcaacctccccaaactgcttgaagaattcaagcagcttctgaggatcaatctcagcattcacattgctcacaaaaatcttcctctgggtgtactcagacaccggggtcacgttcggcggtggagccggaacggggccggcggaggccagctggcacgaggtggtgcggtttccgatcttcttctgagggtgtttcagcgcctttcgagcatcgtccctgtgcttgaagaggataaaggcgtaaccctttgatttaccggagaccttgtcggtgacggccttgcaatcctcgatctcgccgtatttcccgaacacggcggttagagtatcggcagtggcatcccagccaaggccgtggacgaagattttcctgtgcgcagggtccacgtcagcaagccggcgcacgctatcgacgaattcgggaaacatatccacggcctgcgtgacgagagagtggagctgctcctttgtgaacggttccagaagcttctccacgggctcttcttctagtgtgagatcctcctcttcctcttcttcgttgtttccttcattgctaccgttcgcttcggcgtggtttgcagccgccagggtttctggatcctgttgctcttctagggtttctggttcctgctcctcttgttgttcatcttcttcctcttcctcttcttcgctttcggcgttttggggttcggcgtcttcttcttcttcttcttcttcctgttttggttcgtcgacggccatcgtgttaggatcttctagggtttgtttggggttgggttgttgttgctgttggtcgagttcaacagtctcttggttctgttgctgtggctcgacgggtttggtgggttcggggttggaggatcgaagctttcgtttcttagccatgggcatggggccgaggaggtagggttagggtttcgggaattgggggtgttgtgatttttggtttgttttgtctgaagatataagagagcgatacgatacgattgcgctctcccccttctgtcgtcttctcgcagccgaaaa

SEQ ID NO: 98096 - DNA, 389 bp, Glycine max
  Clone ID: PAT_MRT3847_59594C.1
tggcttggaacctttgggctgatttatgtgcttgaatatgtgcatgacggttatagcgataaaagcggtagcaccaggcactactaggtgtgcgtgggtagtcgttaatagtgctcagactaataactctgtctgtcccgtcgcagatgattacactaaaagagagaacctagcctcggagcccgctaaggcgaccagcgtatagtagtatgtggccctcggagcgaaccatcatacaataccggaagtaaaatacggcgataccaaaaacgagtacaaagtgaatgcccgggagagggaactttaacagccgtcagaacctacgttaataccaggcgtacgatgtgagactgattacgctgtctgtcccgtcgcacaagaataaaata

SEQ ID NO: 98097 - DNA, 428 bp, Glycine max
  Clone ID: PAT_MRT3847_59595C.1
tggcacctgccgtggtgcacctatacaattcggtggccaagaacgcgagagcgttcaaggccgcctggaaacatgctgcgaaactcgtacagaaacgactaccagaatccgcacaacctacagatgcggtactgcaacccatcctcgctcgaaatgctccgaagcaccctctccaccgtattgcctacctcaagcaaagcaagggccgttggtacaccacccatagccagatcagcgctgccgttcgacgctttaccacgtctgctgctcgcaactcaggcgtgaagtacgacaaggcctctttccccaagtcacgtatcggaggcatcgttaccgctcaggccggccgcgcaccctttgcgtcgacccttcgccccaaccttaccggaggcacgcttgtactaacagcaggacgctacagatggggc

SEQ ID NO: 98098 - DNA, 403 bp, Glycine max
  Clone ID: PAT_MRT3847_59596C.1
aaaaagtggaggattgttgaagagagagtctcgtgatttgagaaggccacaaatctccgaagtaaaagcttcaaatttcggtcacaatttaaagaaaaaggggatttatttaaaaacttttttaaataaaagaacagaacttggggtgtggcaaagcagagaaagaagaagaagaagaagaatcatttgggtgtgtttttgaagtgaaaggtgatgtcgggttcttcttcatctgggtctgaagaggaggatgaggggttcgactcttaccggaaaggagggtaccacgccgtcagagtcgccgatcagttcgccggcggcaggtacatagcgcagaggaagctcggttggggtcagttttcaacagtttggcttgcctatgatactactacatctgcatatg

SEQ ID NO: 98099 - DNA, 179 bp, Glycine max
  Clone ID: PAT_MRT3847_59597C.1
attgagctggagctcttgatcagtcaaggcaggatatccgatacaagtctcttttgtttcaagaagctcttaattattagtctagggagtacacccttgccgttgggggcttctttatcataaatatatccgcaacaacagtgattgctaacgagctacatggttctgaactctgaaac

SEQ ID NO: 98100 - DNA, 211 bp, Glycine max
  unsure (1)..(211): unsure at all n locations
  Clone ID: PAT_MRT3847_59598C.1
gctcctgggttgngccctgtntttggtccgnccttccttcttcccgcnntcccngcngtttcnnttggtttcctgttttggnngngtgggcctccctgtccctnnttgttggcttttcccgnnnttttctgcnctgctctctttgcnttgcttgctgnccttttggctgccctcttcttcntnttggggtgtttgngctccttcgtctgtc

SEQ ID NO: 98101 - DNA, 760 bp, Glycine max
  Clone ID: PAT_MRT3847_59599C.1
ccacgcgtccgcggacgcgtgggctccctcatccttaagcacagtacccaccaaccgtttttccccaccattgcttgtttcttctccaaaatctacccattttcactcactctctctttgcattttttttctcttcataaaaatagtatttttgtctggcactccaatatatctttgtttatttatttcttggtatcttagtctttttgccttgagtttatatgtgacccacttgaggtcacaatcctctatagtttaactacatacaaaaaactgcatctttttgcagcatcttggttttgtagggcttgttctggtattgttctgtcattcctgcacccatctatgctcattgggtctttggaggttcagagagaagaccctctgttgcttctgtgggtgctggagatagaggatcaaggagggtgatttagatcaacacaaaggtgggaatgtattgattctactctctgaagaatctggagatcagcttgtagcatccaactatgtcagcaaacagttctttgcatgtggaattatcgaggaagacttcgtttttgggattgagattatgggttttgattgggataggtgttggtgtttttatagttgtgattctttgtgtattatctgtatgggtgatgtttcggagaaagtctaaaagatctctggacaagtactctttgtcacaaataccacatgtctcagaggacatcataagtgacatgattggggtgcacatatctcatgatcaatcaag

SEQ ID NO: 98102 - DNA, 1548 bp, Glycine max
  Clone ID: PAT_MRT3847_5959C.1
gggaccattaaactaaatatgaatatattcaatgggacaaaataactcccatgggagaactaatccactctcccacgtcaaccagcgtccgagtctatattctgatggtcaaaaaatacaaaacaaactcaactttcccttgaataataaccattttacttctcacgtgtattttgttttttcctcaaacaataaccatttcacttctcacgtgtattttgttttttcctcaaacaataaccatttcacttcttcagtgccggatagttctcaacatggctctcatcacaattttttttttttttaaggtatattcaattgagttcacaatgtggtcaaacccctcaaggaattttatctatctttagaattcaatttcaacagattggcaatcttaacaatctaccctcctgggaaaaatattaagaaacggataatgcttctataaaatatttctgagaacacaaggtttcagaattaagtcccaaaattgcaaaggcttgacaatagttaaatgctaatactaagtcctaaaacagcagtagcagttttactctaacacatctaagggaagaaaggtaacaaaacaacctcactttgattaagttctctagtacctttcaggatatgcagaaaaatcatcttttaaagatgatgagacaggttacccactcagtcttcaaactttattttctttggagcaggttggatgttacccacaatctcagggcattcataatcaatcccagcagcctctatccttttacgtcgtttttggtcatgtttcagaaccttctccaccaacttcttgtgctcttccaatgttctatccttgtcatgacgcttccgttcaatttggacagaatccaatggcttgtaatggtaattgaatcctctccatattcttggatgaacatgctctggaggtatcacataaacttggagaaggtgttcaaaaaggagataattatgcatagtatcagccacaatttttgctacctcaggagattcaaattctatgaacccaaaatgtcttgattttccagactttttatttcttgcgattctcaacctcttaatggttccaaattgcccaaaataaccttccatctccttctcatagaacccatgtgggatccgaccgacgtacaaaaccgtggcggtgttctccggcggcggcggcggcttctgctggccggcgagcttacgagcagggccaccttccaagggcaagaaatcagcatcctcagatggattcttattaaaggaagcccttttcaaattcttcttcatagctttcttcgccttcttccccatatctcactatgcgaacacaaagagagtatcaaaaatggcgtgggaggcgcagaagctttcaaaattagaggccggcgagcagtggtggtgagtcgcgagtctcaggcttggctttagagcggcgcaaacacaaaaggttttagccttttaaagttaggtgacggcttccagtctgagcagtggtggtgagtcgcgtcaaagagtatagagaacggcgcaaacacaaatgtc

SEQ ID NO: 98103 - DNA, 375 bp, Glycine max
  Clone ID: PAT_MRT3847_595C.1
ccttacgagttagggctgtgggtgcgggatgtcactagaataaggtcattttgtgaaggactatgcatagtattacaccaggacctcggcagaatacgttggtggtagttagaccaaataaccaaacatcgcgtaaattcatctttccactctaacaccatttgataggtaagctgtagaatgctggaacttatgggccgtagtttacatgagcacgtgctattgtcacaattaaatcaacttatgagacacgagctactattgcgagccatagcgcgctcatcaatgccgtatcgaaatgatcggagcgcaagatcttctgatgcatatgtcatgaaagacgccaatattatgccggcaacatccatcaaacct

SEQ ID NO: 98104 - DNA, 249 bp, Glycine max
  Clone ID: PAT_MRT3847_59600C.1
aagcatatatttaacgcttgacttaattgcatgaatcatacgggcataaaggccaacaagtgtacattataaggcctaactataaccatatacgatattaaacaatgacaataacaaagcccctcattcatcggcttatccttaagaacacagcctgaaggatctttggttatcaccacattcaacacctaccaactatttacattctacaactgaatgcagctcaactgttatcactcaatatgtaaa

SEQ ID NO: 98105 - DNA, 550 bp, Glycine max
  Clone ID: PAT_MRT3847_59601C.1
tgttttttttaacatctttcttttttgtattatacttggaattgttgtatgaatacaggcagggttcattccgtacaaggccctggggcacagtccaggttctcactgaaaaaagaaacactatagaaggaggctgcgcaagactaacacgtcctacctggaacccatgttaaaggcaacgggaaggatcactgcgggtgctctatcatcacgtgttatcatgactgaatcagaggctgagtcgctgacagccaccttccacttctatgccaacgcactgttgaccctgaatcacaacccaaggaccattggggtttccccggagtactgcacaaagccttcactcggaccgggacggtaatggaaccgagacctgtgacacaatccgcgttacccacagcattgccaatatgactgaaactgtattcaaagttgcaagatgacaaaagacgcttatgccatcactttcagatgaagatgataaccctgtagcagcttcagacattgctgctaaaattcagagtcaagcaagtttgacttccacgtacct

SEQ ID NO: 98106 - DNA, 154 bp, Glycine max
  Clone ID: PAT_MRT3847_59602C.1
ctatattttttattttttggacttgactcgtacaatttctatacattgctaaatcctctcttaagactcatatggactcctatccaaggcaaaagagccccaacgctcaagcttcttgcactacatgtacctagggatcgcagatgaaatacct

SEQ ID NO: 98107 - DNA, 112 bp, Glycine max
  unsure (1)..(112): unsure at all n locations
  Clone ID: PAT_MRT3847_59603C.1
tccagtggagagacctgggagaaggagcnggangattataagaagtatgggtttttctaacagaggggaacataatccatcatcggattgctatattaaagcagctgtagtg

SEQ ID NO: 98108 - DNA, 386 bp, Glycine max
  Clone ID: PAT_MRT3847_59604C.1
tttcttttgcgtgggaaagaattcctcttgccacatctgagggtcttcctcatgtactttcactcaaaaatggtgataaaggcacaaggagatttgttcctgggcatggtgaacagatgacactgattccgggatccagtgttgtagcggcttacaacaagctaatagatgaacttgagaaaagtgtacctacattggtcggcattgcatgtcctaaagatgagaaacttcctcgtcgcctaatttttgacaaacctaagacgcgctgcttcactattctccctatggagtttaatcctgcggtccgtccgaagtttttacatattgcgaggcacattatgcaaaaacgggacaagcttagatggcaagttggaatcatcccatac

SEQ ID NO: 98109 - DNA, 357 bp, Glycine max
  Clone ID: PAT_MRT3847_59605C.1
cggtccggaattgcatggccgtcccattgcgaccgttcatttttacgcccaccataccctgaaccaccgacgggacgtgaaaaactaacggagacagattgtgatcgcaagggtgcgacactagggcagacacgcgccgcgtgtgggccgttaactaggaggtcgtgttcaatttacggtggaccgcggcaaaacacttgaccacacgcgcaatctcggcatcagccggcgcgtagacaacgaggatggcgagcgcgtacgaggcgcaccgcgtaccgaacattgtgacaaagtttgtggaaggagcaacggtggtggtgatagaaaaagaggtgggcccaatgatgctagctgttg

SEQ ID NO: 98110 - DNA, 430 bp, Glycine max
  Clone ID: PAT_MRT3847_59606C.1
agcgtgctataattcccggtcgacgagctacacgccctttttttttttttttttttttttttttttttttttttttttttttttttttttttttttttgttttccggggagcctaacccggacctgaaacccgcaagcagacgaataatgtccgctaaaatggggccactgaatcgcaatttacagggcgttggttaaaaactccccggcgggacccaccttggagtctccgcataaaatccatctagcagaaaatcctcctataagctagggggctattaacgaaggggcctcccaaaagctgccctaacaaaagggcgacgggaaggagggctgtaggggcgccctttgggggggggaattaagggcggcggtaggggggaccccccccctggccatcgtactattgaccgcctcattagcggccgtt

SEQ ID NO: 98111 - DNA, 289 bp, Glycine max
  Clone ID: PAT_MRT3847_59607C.1
aaaaaaaaaaaaattttttaactataatttataaaataggggaagttacacctttttaacggggaaaccactttctgccacattttgtaccaaaaaccatttttaggggcaactttttttttacaaacaaaattttgtttttttgccactctcatctggatactaatatatgctaaggtgttaaaaacacccttttttaaattttttttgggggttttaaaaaaactaaacttgactttattttggggatggggcaacgggaggttcaattgtgagctccacagggtta

SEQ ID NO: 98112 - DNA, 746 bp, Glycine max
  Clone ID: PAT_MRT3847_59608C.1
ctgttgccaatgaggctccttggatttccacaattggtgcaagcacactagacaggaaattcccagctacagttcacatgggaaatggacaaatgctctatggagaatccatgtacccactgaatcatcacccaatgagcagtggaaaagaagttgagctggtttatgtgtctgaaggagacaccgagagtcaattttgcctcagagggtctcttccaaaggacaaagttagaggcaaaatggtggtatgcgatcgaggagtaaacggaagagcagaaaagggccaagtggtgaaggaggcgggtggtgttgctatgatccttgcgaacacggagataaacttgggagaggattcggttgatgtccatgtcttgcctgcaactttggtaggatttgatgaagcagtcaccctgaaggcttacataaactctacaaaaaggcctattgctcggatcgaattcggaggaactgtgatagggaagtctagagctccatcagtggcaagattttctgctagaggaccaagctatacaaacccttcaatcctaaaacctgatgttatagctccaggagtgaacatcattgcagcatggcctcagaacctcggtcctaccggccttccggaggatactagaagagttaacttctctgtgatgtccggtacctcaatggcatgccctcatgtcagtggaattgctgctctcattcgctcagctcacccaagatggacccctgcagccgtcaaa

SEQ ID NO: 98113 - DNA, 265 bp, Glycine max
  Clone ID: PAT_MRT3847_59609C.1
atttagagttgaaatatctggacccaaaatagtcaacttcagtagattatttagaggtgaaatatctggacccaaaattgatatttttcatgtcctaaattaagttgttcagggaatatggatgggatgttttcgttcttgataaattttattcaacgggcttcttgtttcatttgtttacatgaatttaatgtttagccgaaaatgtgtttaaaacacttgacatttatttattcccaattgaaatttaaaatctagttgtttg

SEQ ID NO: 98114 - DNA, 498 bp, Glycine max
  Clone ID: PAT_MRT3847_5960C.1
tacggctgcgagaagacgacagaagggatccaacacttcttattaggtgtttgatttcaaaaatactttttgttagcttgaatacttaaattgtcagctttatataactaatacacttgaaaaatcatagaagattagtttaaaaagatgaatataacatcaatttaaatattttatcatatgtttctcatatttcatttaactagaatctctttgtttgtgtgttatgtgggtccttgtgtcctatattttagacattaaccgtgttgaagtgtccgtgtcatgtcagaatccgtgcttcatcggcaaaaattctatttagaatgtgaatgaaacacagcagaagcaaaagaaaatcaatgaagatccgataatttcttaggtcttgctccccatttctgcattacagatagctaccattttcagtgcatggaaaacttggaaattacatgacaacaaaatcagtaatgaaaccaataaaaaccaagtcaacatgat

SEQ ID NO: 98115 - DNA, 194 bp, Glycine max
  Clone ID: PAT_MRT3847_59610C.1
caagtatgaaaaacatatttaagcctaataataataataataagcaggcgtttcattgtatgctgctggaaagaacataaattaaagggccggggaggccaatcaaattttaaaaaacttttacatttgataccaatttccggatttttcttggattggaacaatgtgaacttttttttcatttacacgatttg

SEQ ID NO: 98116 - DNA, 1601 bp, Glycine max
  Clone ID: PAT_MRT3847_59611C.1
ttaatgaagctcataaagttgctgaattcatttcactgaattaggcaattagcaatgttacaaggacccaaagaatcaactcaatcttccttatgctcatattttacaactgaagtgggacattatttgaatatgaatgtagatgcacaccattttggtgcactgtattttggttatttgctgtttccctcaaaatacaacagtcctcttttcttcataaggtaacacccgaagttcacagtaagatctgatagccttggaaaggcattgtttctctaggttttctgatttctgtacaaagctctgcaagttatccctgtgagaaactctctcaaccatttgttcaattataggtcctgcgtcaagttcttcagtcacatagtgacttgttgcaccgattaatttaacacctgcttcaaaggcctgtttagatggattaccacccttgaatgatggcaacagaccatggtgaatgttaattataccggtcccatagctccttaaaaagtttcctgatagtatctgcttagatggtgcgagtccgctaaatgatggaaacaggccatggtggatgttcattatatcccttcccatagctccttaaaaagaagctggatagtatccgcatagacctcgccagtactaaaaaatcagtatttggatcgacctccacgatctttactactcatatatgtgatatctactggaagtcttccatcctgccatccatgtaataaatcaaccaggcagtggtcctgttttgatgccagaaccgctatcttatatttaggatccagagctggcacccttacaacagatcttattgcattgaatgtttgtgaaagctttaggaagtcctcctccatttgcacccgtggccatttaacaggatcaaaaacaaaatcacttctggagtagaagacttgtttattttcaggaacaaaaacatcagcggcgagaatgtttccacctctagaggcaatacagtcggacagcttggctacaattccaaccgcatcggggcaatgaaagacgtggattccgtgggtgagggaggaagggggatccaaagatttgaaggacatgttcctttggaccgatcctaaaacataacgagggactcttcgggccatggccattctctatgtctgaatcgcaatgttcgggttcaagttcaagcaccaaacttcctcatggtgaaccaacaccgcactctctcaatcctccacctacctatcatttcattcgtttcattacattacacgacatgccgttttgcttttgtttttcttttctttatttctaggttaaatgtctttgaccaccatctcgtgttcgggtgtgtaagagtatatgaaggatctgtaatgtgtgcccagatcattttcctgtggattaagagtggtagggtcatgtatagacgataacatgtcaatgcagagtttcatatctgttattttttggatcatattgaatccttacaacctatgagtggttggtggtccctgtatagagatggtaatacgttggattatgaaaaagcccctgggtgtagcctacatctgtattgagaaaaaccaggcaccctttggaaggtcttc

SEQ ID NO: 98117 - DNA, 368 bp, Glycine max
  unsure (1)..(368): unsure at all n locations
  Clone ID: PAT_MRT3847_59612C.1
acgagcaagtctccaggtgcagaaggtgcattcaagcttgtttcagaggcatggagtttactatcagataaggtcaaaagactagcatataaccagaacaggagattggaaggatttcagcataatgctcccaaccttgtcgggactcaatcaaaagcacccagttcaaatggttataaaaaacataacaagaatgctacttcaagcattagaactggaaataatgatgctcgggcacatccacatccaccctccattcctcctccacatacaaatgttggtaccttttggactatctgtaataaatgcaagacacattatgagtatctcaggacatatttgaatcaaacccttttatgtcccaatnn

SEQ ID NO: 98118 - DNA, 124 bp, Glycine max
  Clone ID: PAT_MRT3847_59613C.1
aattcggctcgaggggacccaagcatgccatctctggccgctttcaccgaaactatgtcagatattcttgaataccacgagaaccttagctgggcaaccagaactgctgcggcggcaactacac

SEQ ID NO: 98119 - DNA, 322 bp, Glycine max
  Clone ID: PAT_MRT3847_59614C.1
gttaaatattttgtcggacaaaaaaatcagcgagggtgggaagaaaaaaaaaaaaaaaaaaaccacaaaagaagaaaaccccacaacaagcgggaaaaaaaaagaaaaaacaaaaccaaaagaagacaaaacgggcaatgacggccgaggaccgcgcaccactgtctgaacaccacgcagcaaaaccagctcctgcaaagccgcccgctgaggagccgggcgcctcctcaagaaggccgccggctgacaacatgaaggggggggggctaccaacactcaagcacaagcgtggataacaacggcggaggaagccctgggggaa

SEQ ID NO: 98120 - DNA, 904 bp, Glycine max
  Clone ID: PAT_MRT3847_59615C.1
ggtcttctcctcattcgaagtttgctgtgcatagatatggcaaaaccgcgctttttggtttcgacgattcctgtgtctgtcagttttcagcttggttcctaggcacattcatggcaaactatgctttggtggtacaaaagttgaacctctagtaaaaatcaggcacacattctgccctagcaggataagagttgccgaagaatatcaagaaggtttgtctgatgaagatgatgatctctgtcccgtcgaatgtgtaagagaattcaccactgatgaagagttcagcaaaattctggacaaggctaaagaaactggatctttggtggtggtagatttctttcgcacctcttgtggaagctgcaagtatatagagcagggttttgcaaaactgtgcaagaaatctggtgatcatgaagctccagtaatctttctaaagcataatgtaatggatgagtatgacgagcaatccgaggttgctgaccgacttagaatcagggccgtgccccttttccacttctacaaagatggggtcctgttggaagcattcccaaccagagacaaagataggattcttgcagctattctcaagtactcatctcttgaagctgaagatatcttaggttaacatcaagggatggggtcatggcaccctccgagactgtggtgcactgcagggaaattagtcaagtattgtacgtgacaaagttcgttaaacatgttgtatactcaaaataataatacacttcagggcttgccaacctaattcactttgttaggatacaatatttgcttgcaaagtatctagtgaagagtttaatgctaactatgatactcccttctctttccccagaggtcataaataaaattttctttctgcttaaaaaaaaaaaaaaaaaaccccaaa

SEQ ID NO: 98121 - DNA, 701 bp, Glycine max
  Clone ID: PAT_MRT3847_59616C.1
ctcggaattcggctcgagtggaacttctacaccttctctcctccaagaaaattctatctttactattattattatttctctttttatattttggagttctgaagtattgttgaggagtctgacactctgtgaggtctgtcggttcagtattcagtgttccacttgggctaactcagcagcaaaatctgttccttgctttggtatttgtttagaacttatttcactatctgtctgttgcacttcttctgtgttagcaagtgaaggcttatgcaagtggctagtgagaattagtgcatgatttagatgataagaaactgaaagccatgaagttcatgaaactaggatctcgtcctgatacattctacactgcagaagcagtaaggtcagtctcttctgaagtttccagtgatctcataattcaagttaagggaagcagatatcttcttcacaagtttcccttgctgtccaaatgtttgaggctacaaaagctatgttcagaacctcctgattcgtcttctcagcaccaaataatccaactccctgatttccctggtgggatggaggcatttgagttgtgtgctaaggtctgctatggaataaccatcactctcagcccttacaacattgtggcggcacgatgtggcgccgagtatcttcagatgactgaggagggtgagaaggggaacctaattcagaagctt

SEQ ID NO: 98122 - DNA, 603 bp, Glycine max
  Clone ID: PAT_MRT3847_59617C.1
gttattgctgactatcctttatcataatggagatcgttccactacgttacacattaacactcgttgcttgttttagataccatacttgttgaacgctccaatcagcccaccggtagatgcattgggtccctcaccatggcctgcctcatgatgctccttgagaatatacttggccaggaccctggccagctaaacaccccactggacagagctggtgaggtccaaaatagccccctcggtaaaggtgaggggcgtccagaacacgaacagggcactcggctaggcgggaccaatggccccgccgactaggatggaggccgtgggtcgacttccaaggaaccgcttgtgaggaacaagctcctggggagtgccctcttcacggacctgatcgtatgtgttgccaaccttgacaccctcatcctgggccaagtatgtggaggcacgcaattgctgtgggaggatggctgtgacaggggtgtgggacctggcgctaaggatgacgtcaccgggggttatcttgccgcctcggtggactatctggatacaagcatgctgagcgcttttgcagggctccgccgaaagaagggggccattggtgtactt

SEQ ID NO: 98123 - DNA, 220 bp, Glycine max
  Clone ID: PAT_MRT3847_59618C.1
acgctcgtcccaaatccaggtgcaacaggaataccacagttgtacacggcgacgaagatgagatttatcctccacaatcacggcggccagtgcggcaaccagatcgctacgacgaactgggacctcatctgcgatgatcacggcatcgaacacaccggacagtacagcggcgactccgaactccaatatcaacgcgtgaatgtctactacaacgaggcca

SEQ ID NO: 98124 - DNA, 500 bp, Glycine max
  Clone ID: PAT_MRT3847_59619C.1
ggacagacaaagcttgacatctttgttccttaggctttttctcttgtcggttaacaaagaggccatggtgagggatatgagaaggtggagtcatgagggctggttgtgggagatcgcttggcgtagagagaaggttttgaatgggaaaactatctcattcaacaactctttcttttgctgaacagtgtgatcattcatcactctttggctgattcttgggtgtgggaaccttgtcccacggggagatacacatccaaatcagcatatttgctactttcttgtgactctcccttgcagtattcaacaaatatttttgttgtgttgtggagactaaagattccacataaaacatcattcctcatttggaagattttgaggaatcgtttaccgactaaagataatttgtgcaagcaaaacattttgaattgaagtgagacgttttgtccttttttgtcttcttgaggaggaatcaacccaacatttattctcttcttgtatgg

SEQ ID NO: 98125 - DNA, 219 bp, Glycine max
  Clone ID: PAT_MRT3847_5961C.1
tgacgtgcactcctcccgtacctaggatcgtatacagcggacgggccgcccttttttttttagaatcaatgttttaacgctatactaaaatggatatccacgcgaattccagttggttgaacagggacccaaaatgaaatggggtgtcgaaaatgaaacgaaataactttttacatagtttgcgggacacgatagggcatgctagtaaaccccacatat

SEQ ID NO: 98126 - DNA, 384 bp, Glycine max
  Clone ID: PAT_MRT3847_59620C.1
gaacaatatgacatacacctgggaggtaagatacaagggcaatacatcataactttaagcaattaaaaagtttttttaactagaataaatgaaggtatacactattctacatttatgaaaaacacactatatgatcaagctaacatgatattgaagagacatatcggtgaatctaaatttaaccttgtaaaccgaacgcttccacatgaaaaataactcgtaaatgcattggggaccatctatggccctgagaatgacgcatttcatttgttggagatgaagaacctgccctacacattcaatattacattgcccatacgtggggacggttaaccactaaccctgggattcgtaaggcgctatcagtaggccagaaacattcga

SEQ ID NO: 98127 - DNA, 428 bp, Glycine max
  unsure (1)..(428): unsure at all n locations
  Clone ID: PAT_MRT3847_59621C.1
gcacattatttgtttggtttcagaagctcatatcatttgagttcccccggaaccaaatcttcattgaccatctttaccttttcaaactggacccttaatcttaatattatncctttttctttttcttcattagatatttgaaatatgaaattgttggatttaaggcaaacaatggacgacggacagcaaccagtaaaaagcattttccggattcgggattcaggattccatgaaagcccaacctacacttctttcccaaactcctaagcggncacaaagcgcgccaatctcgcccggtaaaattctcctccaatgggggcgccttctcgcctttctccgncgncgacaaagaccctcccgaacctatggctttcacgaactccgactcggacttcgagagccctgacgctgtccncgatgcagcagta

SEQ ID NO: 98128 - DNA, 342 bp, Glycine max
  Clone ID: PAT_MRT3847_59622C.1
gccttgtgtttcaacagcaatactatgctgatgatggcacatggatggagactcatcaggctcagcaacatggctatgccttccacgaagagtcgtcttggagctctgataacaactacggccacaagcgattcccagcagccatgcacatgaacaagcttggtgcttttgctgtggactctgatctctcaatgtcaaaacagaagcataccaagttaggaggagccatgcgcatgaacaggcttgctgcttttgctatggactctgacatctcaatgtcaaagcaaaggcatggcaagttaggaagaggcatgcacatgaacatgaacatgcttggtgatt

SEQ ID NO: 98129 - DNA, 1288 bp, Glycine max
  Clone ID: PAT_MRT3847_59623C.1
ccaaaagaagatatggaagcaaagaaaatcccagaagtgatactaaactcagggaaaaagatgccagtgataggcctaggaaccgcatcaattcctcttccatcacatgaagctctcacctccatccttattgatgcctttgaggttggctacagacactttgatactgcttctctgtatgaaagtgaggagtctctaggcaaagctgtggcaaaggccttagagctaggcctcataaatagcagagaggaattattcatcacatcaaaactatggtccactgatgctcatcctgaccttgttgttccagctcttaagacctccctgcagaagttgggattggagtatgtagatctctatttgattcattggccagtgaggctgaaacctgaagccaaagggtaccataatatattaaaggagaatgtgcttccctcctttgacatgaaaggaatatgggaggctatggaagagtgttacagattgggcttagccaagtctattggtgttagcaacttcggcatcaaaaagctaagccagctcctggaaaatgcaaccatccctcctgctgtcaatcaggtggaaatgagcccagcatggcagcaggggaaactcaaagaattctgcaagcagaaaggaattcatgtgagtgcatggtcaccactaggagcttacaaaagtgctcaaggtacaaatgcagttatggagagcccaatccttaaggaaattgcttgtgaacgacagaagagcatggctcagattgcactaagatggatatatgagcaaggggcaattgcaattgtgaaaagcttcaacaaggagaggatgaaacaaaaccttgacatatttgactgggaactgagccaagaggaatcacagaaattcagccagattccgcagcgtaggatgtatcgcggaataacttttgtatcagaaaatgggccttacaagaccttggaagagctttgggattgagattcctgaaatcattcctaatagcagcaaaatgtcatataaggctgtgtgtttggtttaagatgggaggagggaactaggagagaaattttgtacttttcatgtggaactcacatcttttacactttaataaaacaaaaaaaatcttctatttctatcctttaaaccaaacccaccctaaatgtgtatctctatatttacgtatgcaacccatggcatggattcatcaatgttgccgggccatttaaaggaataagatggatagaaaaagaattcctggcattttaataaaaactcactttatattcaaaaa

SEQ ID NO: 98130 - DNA, 796 bp, Glycine max
  Clone ID: PAT_MRT3847_59624C.1
gcacccaaaaaaaccatggttcttctgcagctagatccggttctttatgagcttaccagcatgtttgagcgcattgccaagcttggctctggttgggtgactcttaaacgatgtgggataatgttgtctactttgttaggttttttgcttaatatgtctcgaaactgattcttgctcgtgtgcctctttttagcatctttgaaatctaaggtgcagaggaataaattggccactgctggtgaagcaattgagtatagatgccttatacgtgccactgatgggaaaaagacaatttctacttccgttggaccaaaggaaaagaagagagaaaggaaagacaataagaagactgtaaaggcagataaaagagaagggagttaaaagagaccaaaaaagtcttaaaataatctgccttttgcgcctgatgttctgctcaaacttcgtttcctactgattctggttatgtttcccccaattttttttttcattagtaaaatgtgataaatgaaggtgaaggggaaaagaagtgaagggaaaattgaaatattcttggattttaatctttagaaaaatattcattgaagtggcaatttgagaaaattttctcagttccccaggtggttataaaatgaatcttcaggatatatttcttttccccaatttatttattgcatggctaagcacattctgagttcatattctggcagcaaaattcttgctgaaccatatgggttcttgcttcaagtgtataactactgctaaatagaatgctactctgattgacataatatttttt

SEQ ID NO: 98131 - DNA, 537 bp, Glycine max
  Clone ID: PAT_MRT3847_59625C.1
ctctaaaaccactcctaacaaacgcctcatacaacaaaacggtttgcattcccaatcaagcgaagatggccgatactccttcagaatttactgtgctaaattctgaaaagataccgaaacatttaggtgcaagaagtataggggaccctatctatgtattcgatccagaagcaaataatctctcacttggaataatacctcacacgtgcgatgagaacacagaccgtaatgccgatgaaactagccatcttatttactctgagacagatgatcacttctgcaaggattgggaaacgtaccacttgatagcttaaggcaagccatcaggggttctaatgggacacctctatggcattacatttattgatactgcgaggagatagacactatttcatttcaaatggcgaagatcaaaccattaaaccttgggacatacgcaaaatgtcatacaatgctaccagcaatactgggtatacgagctacgaatgggattacaggtggctggattatccaccccaagcaaaagacttgactcac

SEQ ID NO: 98132 - DNA, 1319 bp, Glycine max
  Clone ID: PAT_MRT3847_59626C.1
ggccgatacatctagtttatagtctggttataaaatttaactcctcttcatagagggtgaaggttgagtagcattgaccatttgatcctaaaagaaagcttggtgaaaggaattcttaaaccatgtaaatgaactgaagtgtaattatggaaagctatagtgtgcattcacatgcttcttacctcttgtctttttttaggggccagtacatcgggtagacagacgggtccgaaaacgtatagagctctcaggcgcgttttgcatgctcaatttttgaccttttgacttctacactctgctcctctacttcccttttctcctcctccacgctacgacgtcgtttgcccctcgtcggcgcgttttgcatgctcagtttgggactctccaatctctgcacgcccttccattcctctgccctcaaaacgggatccaagttcggtattcgaagccactccagcaccagaatggaagggagtaactccactgtgccgagtattgttgtctatgtcactgttcccaacaaagaagcaggtaagaagttggctgaaagcatcgtcaaagagaagcttgctgcttgtgtcaacagggtaccgggtattgaatcggtgtaccagtgggagggaaagatccaaactgattctgaggaacttcttattatcaagactaggcaatcccttctggaggcattgacagagcatgtcaaaactaatcatgaatacgatgtgccagaggtgatctccttacccatcactggaggcaatcttaaatatttagagtggattaaagagagcacaagggactgactatcaagtttatagcccgaggtgtggtttccagagttcttctgctcgtgtgttaaataaagtcagtttgtcatctatgtaactaggcaatgataatattatgtagaggacgatgatcggtcttgtattactgctaatggctctgttgactatgattttatgcgaatagaccttttctttgtgattttatgcacatttggcattttgtttcttattttttctgattctgtaccatccatctatctgcttcgggtttaagaatatttttctttttttagaaatggggatatagattttacatagtgacaaagaaatgtccttatgaaaaaatattttccttgttcatttgcacataattccaattatgtttgaacttgttcagttaaatatgaatactatttctttaactatatattccgtctggcagtatgcacaaaaaaaaaaaaaaagacgagggctgtacactctacaggattccagtccgagggcaggggtacgtcatagctgatagatagt

SEQ ID NO: 98133 - DNA, 203 bp, Glycine max
  Clone ID: PAT_MRT3847_59627C.1
tacaagaatatgtggctatgaaaacggatgctgttgttgctagtttaatcgattccgatatacaagagctcaaggttgcagccaagaagctcctccacgatgccaccatgctaggagacaaaggctttggcacttctttttttaaatggattgcttcctttgctgccatttatttactgatactggatagcacaaactggggg

SEQ ID NO: 98134 - DNA, 690 bp, Glycine max
  Clone ID: PAT_MRT3847_59628C.1
atgcgcgtccgccacgctacgacgtcgtttgcccctcgtcggcgcgttttgcatgctcagtttgggactctccaatctctacacacccctcaaaacggggtgcgttcaatctctcttacgatccaagttgggtattcgaacccagtcctgcatcagaatggaagggagtaacaccaccgtgcccagcattgttgtctatgtcactgttcccaacaaagatgcaggtaagaagttggctgaaagcatcgtcaaagagaagcttgctgcttgtgtcaacagggtaccgggtattgaatcggtgtaccagtgggagggaaagatccaaactgattctgaggaacttcttataatcaagactaggcaatcccttctggaggcactgacagagcatgtcaaggctaatcatgaatatgatgtgccagaggtgatctccttacccatcaccgggggcaatcttaaatatttagagtggattaaagagagcacaagggactgactatcaagtttatagcctgaggtgtggtttccagagttattctgctggtgtgttaaataaagtcagtttgtcatctatgtaaggcaatgagaatattatgtagaggatgatgatcggtcttgtattactgctagtggatgtaataggttgactatgattatatgtgaatagaccttttctttgtgattttatgc

SEQ ID NO: 98135 - DNA, 317 bp, Glycine max
  Clone ID: PAT_MRT3847_59629C.1
tgccgttcaaacaacacatccttctgtttctgttggctgagaactatatatggttgcctctgtccgaataccactaggggattcaagctgcgatgcagactacaagctggttcgattcacaacagggtaccgattgctacattttttagtgacaacaaattgtgcctatgcgcacatgtcttgagcactagttgaactgaagggtcatgtatgcatgtggaatgcaatctataattactctaaaaacagggctagctgactatctattaacagggagtaatgtagaaaaaaatggaccatgacaagactgggtgcca

SEQ ID NO: 98136 - DNA, 467 bp, Glycine max
  Clone ID: PAT_MRT3847_5962C.1
cccacgcgtccggtttggagttgctaatgctaacattactaaacaattgttgttcattcagagcttcactcaatcctttgcacgtctcaatttgactcttcacttcacttcatcgattttgtgattctctctctcaataatggcagcacgctttcaatctgcagctttgctgcattggcatcttgggaccatttttttttttctttaccactactttttcactggttccattgttgtatcgtactcttccttgtgctagatctgaagctggaaccttccccttctggttctagtatatgccctgcttgatttggttgctcttaacccttttcagaaatcaaaaacacttgcaagttccattctttcagttttattattattattattattattattattattattattattattattattattatcaggttttagtctatatttgctgttgtgatctgctgctgatt

SEQ ID NO: 98137 - DNA, 758 bp, Glycine max
  unsure (1)..(758): unsure at all n locations
  Clone ID: PAT_MRT3847_59630C.1
ggctgcggaagacgacagaagggataactaatttaattggaactaaaaatataagttgttagcagaaggctgacaaagaacaatcatttgtttttgcctaattattagtgtaaaatgtttgtatgcaaatatgacagttattgatccctattcaatagccagcttatcaccattcattatgttcttagcaaaaatagtttagatagttcattggtaagctgtagcctagttggagtccctattctttaaattaaaagctaacataagaagggaggattggatattattttagagtattgttttactccagtagtccgtgtagttgttgtaatgtgttttttaaatccagttagtttgacagctgtactctgtaatcagctctcagtaggtagttggttctttactgtacaaacaaatcagctataaatggcttgctctgctttaatagtatatagtagatacagctgagtcattgctgactcagcataagagttagttagtttatctaactgcttctgcagttagaatgctcntatataaaccattgtgtaattcttgttgtaactgactgattcattaatacaataacagatttcataacagttttagttttcttcattctctctcacctacatgattntcttcattctctntaagttttctcttatggtatcaagagctctggttcgatccctagacccaagcttncatgggctttcgatcaaatttctnctncaccactgatcaatgctgaacca

SEQ ID NO: 98138 - DNA, 190 bp, Glycine max
  Clone ID: PAT_MRT3847_59631C.1
caaaaaccgtaccaacccccaaacaatttctggaatttccacgaaaaatttggcgcaggttgttaattgttatgtacacctagctgtacagtacaagtcccatctcttttatttattttttactttattcgatattaattatattcctgtttagtgaatactgtcttattccttggtttttgttctccat

SEQ ID NO: 98139 - DNA, 325 bp, Glycine max
  Clone ID: PAT_MRT3847_59632C.1
gtccgagggagcgtcaatgactcactaggccagcggccgctttttttttttttttttttttttcggggctagggagtcatagtaaagaaaatctttacagacgatgccaatgaataacatacttttacaggacttgggggtcactagaaaaccaactgtttgttatatgagtcaaaagagttggacttgtactgtttcatattgattgaaccgatctggttgatttggcatcaccctacggaagaaatgattggggagtttgggactaggaagactcaaggtcctgttttgcgctaccattccttatacaagatgcatctaaaaa

SEQ ID NO: 98140 - DNA, 389 bp, Glycine max
  Clone ID: PAT_MRT3847_59633C.1
gattaaagtatgtctaaaatttttaaaaagattttttttgtcaatctttcgcttaggttctccttgggggggaattttccggggggacccaagaaaaaaaaaaaaaagcttggccccccggccagccggggaaaaaaaacacaaaaaggggtccctccttgctaggaaaaagaataataccttcaataaaatccggcggggcccacctggggggcaacaccgggggagagccttcatgccagacaaaacacgggccgccctcaggcgcgcgccaaagaaaacaacaggggaccgggcttgttcttgggaggtgaaaaatgggcgaaaaaaaaacctccgtggatgaacctggggaaatcgggcgcttgccccctcacctggggggggaa

SEQ ID NO: 98141 - DNA, 261 bp, Glycine max
  Clone ID: PAT_MRT3847_59635C.1
ctctctgctttctttctatttttttccccatattaactgacataacagcacactctcttaaagactacaaaaccctctccaccaacaccatattttccttcttgtaagaaactcacacaaactctcttttccttaaaattatttgtttaattttctcttcactctcataacaccccaaaagcaaaattactacggaacctgctgctgggaaatgcactgatgtataagctttgcaccagaagcagacagcacagcacaaca

SEQ ID NO: 98142 - DNA, 260 bp, Glycine max
  Clone ID: PAT_MRT3847_59636C.1
cgagattgcctgcgtaacggccacggctgcgcagagtccactcccttacatctactcccgttgtttacgcgactggtgctcgaataaactttgtactgaaatacgttcacatctcgtaccattttcgagacttgatgaatatcgatgcgcgcctacacgtctcgtcgagcattgaagtattttcctacacggaaaaggtagcgtgtggctacgacacacgtaatcgagagatttacattctaatctgccactgaatcaat

SEQ ID NO: 98143 - DNA, 2799 bp, Glycine max
  Clone ID: PAT_MRT3847_59637C.1
ctaacgtccgacgtgcatttgtatgtagaagtagctcgggctcaggtttttgttttcatgttgcgggttttaactaaaatgataactttgattttgatgaggatgaaattcaaagtgtgttgtataatgctttggaagagttttcgttggagaaacaataaatggattagtgttcattgatgttggtgcatgctttgactgttgaaaggactaggagtcagaggataagcactgttttgaaggagatagaaattacctgacctccaagtatcaatggattgtctcttctgtacttatggcttcactttcttcgcatttcccagttatactgcattggtattttaaaagaaaactggaggaggtaagtgcaattatggatggagagttctgtgatgatgcatctcaaaataaagatggcatgaatttagatgaaaaaggaaaaatatgcaacaaagttggtgaaatggatgttgatgagtgctatagcgaccataggttctcggaaaacagtagacttgtgaagaacattggaaaagttgttcttgatcttaggaatcttggatttacttccatggctgaagatgcttatgcttctgctatatttttactactgaaggcaaaagtacatgatgtagctggtgatgattttcggagttctgttttacaatctattaaaagctggatacaggctgttcctcttcagtttcatgcagtgatgctgctagttattgtgaagcggcctgttcctcatgctgctgcaacagtaggagcctggcttaacatatttcagtctcttttattgatttctatatgcactaactgcgctctatgagtttggctatgtgatgaggggggaaaatggaaaatagagccagcacttgcggcaatattaatcatggaacatgtcctcttgttgactaattttggtgacactcgtttcatacctgaggaaccagcttgggtaatagccaaccgtgcaaaacacactacacaggtacaggctatttgttctaaaaagcgtttacggactatttccggaggagctaagacatttgaagaagggaaaaaattggattcatctctttaagcccttaggacaatagaccctgcaggtgtttttcttgaggcagttggtgaacccataagggattatctaagaggaaggagagataccataaagtgcatagtaaccatgatgacagatgggactggtgcacattcaagttcatctggaaatcctggagatagccttcttgaagagttgaacagagatgaagagattcaagagaatgctggtgttgatgattttaacactgatgataggcaagcatggatcaatgccatgcgatggcaacctgaccctgtggaagcagatccattaaagggaagcagaaaccaaaggaaggttgacatacttgggatgattgttagcataattggttccaaagatcaattagttcatgaatatcgaactatgcttgccgagaaacttctaaataaatcagattacgatattgattcagagatacgtactctagaactcctcaagatacactttggagagagcagcctacagaaatgtgagattatgctcaatgatctaattggctcaaagagaaccaacagtaacattaaagctaccataaatcagccatctcagacaagtgttgaagtgggagacaatgcaatatccatggatgcaatttctgctactatcatatcttctaatttctggcctccaatacaggatgagccccttaacctgcctgagcccgttgacgtggaaaacatggctgagacaagtaagaattgaaatcaaaactccccgtaagctgcagtggaaaaaaagtcttggaaccatcaagttggacctctaaaaaccttgcagctgctattgggatacctgcagatgttttaaatcggagaataaatttctggataagcaagggaatcattgcagagtcgcaaggggcagattcctctgaccatgtactcgacccggtggaaaacatggctgagacaagtaagaatggagctagtactggttgtgctcaggaacttctaggaggtgaagaggaggaagagagatctgtggcatcggtggaaaatcaacttcgtaaggaaatgactgtatatgagaaatttatcctggggatgctcacaaactttggtagcatggcattagaccgaattcacaatactctcaagatgttttgcattgccgatcccccatatgacaagtcactccagcaactacaaagctttttgtctggtctagtttctgaggagaagttagaacttcgggatggaatgtactttctaaagaagtagtttgacttcggagttgaaatggaatcaatttggtcatgagttctgagcaaaaatcagcttgagctccatttttggtggcatctttgtgttgtcctgaggaaattgctatatatgcttccactctagggataacacaaattcaagcacaccaaagataatctttgttccaggagatgaggatttgaagacattatttgctcttttggctttcatggtgtgctactcctggttttgctaatccttttccaaagattcctcttttttatattatctattctcactgagtcacctaccgctatgtaaatgtgtattatttactgctaatttagtgttgtggataaattatattatattgaataggagaaaatattttatatggccccatgcagtgtttacatcaaatagtgtaaaagttaattcgtatgagcaaactaagggaatttgtatggaacaaactcttcccaagtt

SEQ ID NO: 98144 - DNA, 1717 bp, Glycine max
  unsure (1)..(1717): unsure at all n locations
  Clone ID: PAT_MRT3847_59638C.1
ctcanaatatactgcattggtattttaaaagaaaactggaggaggtaagtgcaattatggatggagagttctgtgatgatgcatctcaaaataaagatggcatgaatttagatgaaaaggaaaatatgcaacaaagttggtgaaatggatgttgatgagtgctatagcgaccataggttctcggaaaacagtagacttgtgaagaacattggaaaagttgttcttgatcttaggaatcttggatttacttccatggctgaagatgcttatgcttctgctatatttttactactgaaggcaaaagtacatgatgtagctggtgatgattttcggagttctgttttacaatctattaaaagctggatacaggctgttcctcttcagtttcttcatgcacttcttgtctatcttggtgatgtcgttagttatgagagtacttcatcaggtctgaaatcacctttggcaccacagccatcttcatgctgtcctggaattgatactccctctgaagggcttgtaaggtggaagttgcggctggaatattttgcatatgaaacactacaagatttaagaatagccaaattattcgagataattgttgattatcctgagagctctcctgcaattgaagacttaaaattgtgtcttgaatacactggacaacattcaaagctggtggaatcatttatttcagcactgcgttatcgcttgcttactgcaggcgcctcaaccaatgatatattacaccaatatgtttcaactatcaaagcacttaggacaatagaccctgcaggtgttttccttgaggcagttggtgaacccataagagattatttaagaggaaggagagataccataaagtgcatagtaaccatgatgacagatgggactggtgcacattcaagttcatctggaaatcctggagatagccttctcgaagagttgaacagagatgaagagattcaagagaatgctggtgttgatgatgattttaacactgatgataggcaagcatggatcaatgccatgcgatggcaacctgaccctgtggaagcagatccattaaagggaagcagaaaccaaaggaaggttgacatccttgggatgattgttggcataattggttcaaaagatcaattagttcatgaatatcgaactatgcttgccgagaaacttctaaataaatcaaattatgatattgattcagagatacgtactttagaactcctcagatcactttggagagagcagcctacagaaatgtgagattatgctcaatgatctaattggctcaaagagaatcaacagtaacattaaagctaccataaatcagccatctcagaccagtgttgaattgggagacagtgcaatatccatggatgtaatttctgctactatcatatcttctaatttctggcctccaatacaggatgagccccttaacctgcctgagcctgttgaccagctcctatctgattatgcaaagagatttaatgaaatcaaaacaccacgtaagctgctgtggaaaaaaagtcttggaaccatcaagctggagttgcagtttcaagatagggaaatgcaattcacagtagcacctgttcatgcatctatcattatgaaatttcaagatcaaccaagttggacctctaaaaagcttgcagctgctattggggtacctgcagatgttttaaatcggagaataaatttctggataagc

SEQ ID NO: 98145 - DNA, 134 bp, Glycine max
  Clone ID: PAT_MRT3847_59639C.1
cttaatgttacttgctttttcgtaaaaagcaagtaacattaagctggctcttgattctgcaagttatttacggactgataccagctggcgatccagctatagctataccgagacgatatttcaatgtccgaaaa

SEQ ID NO: 98146 - DNA, 430 bp, Glycine max
  unsure (1)..(430): unsure at all n locations
  Clone ID: PAT_MRT3847_5963C.1
acgctttggttcacgcctacggatcagtcaactcagataactttaacatccatccagaaagcagcgcgattcgtggattgtagttgagtgctttatccaggtcacagagctcataggacaatggggagctctctagctacgcctatacactctatatgatggctcaattcaacaagcggaactggcaacttcaacatgaccatgatagatgtgcatctgtcattacgtaggatcctaagacaattcatgttaatttcagttttcagatttccactacattctcataccaatcacccataccctccttcgaatgcgacacatggcatatttctccaagcctncacagtgctcatcaaatctacgcatccagaacaccgagcttgactaacatcacaatcccttacatagactcatgtcttacgacaactat

SEQ ID NO: 98147 - DNA, 545 bp, Glycine max
  unsure (1)..(545): unsure at all n locations
  Clone ID: PAT_MRT3847_59640C.1
attcggctcgagttgcaattcgcaatctttgcgagttgcgagactgagaattcagaaatttctcttttgttttgcatttttcatggcaaacgttgtattttgttgcaaatgaattggattatgaaatctagaaaggatggaggggattttgctttgttttaaataaaagaagagtgaatcgaattttgaggagtagctggtgatgaatgaattattggcatgagctgcgacaacgtttctgcgcaccgtgtattgtcacacgggttgttgttgcgatgaataatgtgccaaaatgctaatctgaggctctctctctcttttcattttaggtttttgttctctcttttatcgtttcacaagctcttcttacgattttctttctttccccaaattattgattcggattgcagactcgtggctctgcattntctaggatccatttcattctaaatgaatcgcgaatgaatttttgaaactctgaattgaaaatatttattagtgaaaaaaatgttatttcttggaaaaaaaaattttaaaaatagcat

SEQ ID NO: 98148 - DNA, 327 bp, Glycine max
  Clone ID: PAT_MRT3847_59641C.1
tttttaaacaaatatggtcttcccatcatatgctataaaacaatctggggggtggggtatgaattgaaaataagtaaacaattccatgggtgattacggaaccatgtgggacactatacaagacataattagttttgtcacagattctaaataaaatctgtgacagccatcgaactatgatattaacagcatatatggaactatacctttcgggtgctgaatatgcctataccattatattgggtttttaccataaactggagaatccatatgaaacagtgatagtatgcgggtattggtttatgtgaaaaattcgacatgcaggct

SEQ ID NO: 98149 - DNA, 228 bp, Glycine max
  Clone ID: PAT_MRT3847_59642C.1
atggggaatggtgattgcgactctgggatcaacaccaactctcttgaaagcatcggaggagaaaacagcatagaggcaagggatgcttacttctacaagtgtgccaaacttgccgcatggaccatttttctcgttttcatgttcaggataactgtggtcgtattcagcaacggtcacagtgatcaaaagcagcaggaacacaccaacgaacttgctcatcttaactaa

SEQ ID NO: 98150 - DNA, 636 bp, Glycine max
  Clone ID: PAT_MRT3847_59643C.1
cttgtttttttttttttttttttttttttttttttggttgttttttttttttttttttttttttttttttttttttggaaaataaaccccctaaaaatttacccaattccacccaacccaacccaaaaaaattttttttcttgccccattttttttttggtaagaagaaaaaccaggtctcagggttcccaaccccctttgcaaagggggagaccaaaacttgaataatggcaaagcccctacctaaaaacttttgaccccaccccggccccaactgtttttccaccttttctaaaggcaaattttttccccgcttcaaggggaactgctaaaatcaattaaaacccgggagaaacattgtccccaggcaaaaccatttaaacattttcgggcaactttacttttccagggacatcagcagccccaaaaaaaaactgaggtttgaagttaaaaaaaaaagcagtgtgcccccccccccaatcctttgggagtccaaatatccctcccccaaatttcttggatgtttttacaaaaccaggtttggcaatcacctgaccccgttgaatgtcttcccgcttcaaaccacggaaaaaaaaacccacgttataaccagcctgtccttgacccaaaatcttt

SEQ ID NO: 98151 - DNA, 563 bp, Glycine max
  Clone ID: PAT_MRT3847_59644C.1
agctcaaattattaacggacaacaaacatacagtacacaacacagactactgtatcctgaagctttgacgaattgtaaaaacctcaggttgcgtaaccataaccaacgttctcagccatctacaagctgcaattacattagagaaaacaatgaatcagcatatgctactttataacagccaaaaatgtgatgaatttaattagttcagtatagaaatataacaatttatcaatataatagataaagtttttgaaatataaataattattcttgatagatatatgctcatatatatacctgaaaaatatgttttcatttatgataggtaggtaagttgtggtctatggcttgttggcgaaatggcaacgatggggaatggtgattgcgactctgggatcaacaccaactctcttgaaagcatcggaggagaaaacagcatagaggcaagggatgcttacttctacaaggtcattgcagcactgataactgtggtcgtattcagcaacggtcacagtgatcaaaagcagcaggaacacaccaacgaacttgctcatcttaactaa

SEQ ID NO: 98152 - DNA, 656 bp, Glycine max
  unsure (1)..(656): unsure at all n locations
  Clone ID: PAT_MRT3847_59645C.1
aaaaaaaaaaaaaaanttttgatggtaagctgctgtaccggtccanaatattccgggtcgagagataactaaaaggaggggggagggggggggggggggggggggggggggggggggggttattatatctgctcttttttttattttttatggagaaagggacagataacccaaaaccttttctgaacaacctgacaagaaagcctgttattgggaaactcaattggggtatggagtacaagggttatagttgcttactgcgcgacctcatatatgaatgctccagcttgccaaccctggaggattacattgatggatcaatatctctggtaaaccttgggagagattctgatcaggcgcaacaacgtcatgtatctacgaggcgttccatatgatgcagagatagaggatgcatagtgagaagatgcgatcaatgttagattgataaatgtaatatggttctgacatctatagttggaatatgccggtgacaagtatatctatcgggatcgttttgttctattgagtgatgaaacatgatggtggccgggctaagggctgaagctggtttcagttagactatgctggcattgtggtgaatatatatcagatttcttgaacaaaaaaaaaaaaaaagggcgtgccgttgtaaagga

SEQ ID NO: 98153 - DNA, 804 bp, Glycine max
  Clone ID: PAT_MRT3847_59646C.1
ctattttcgtctccgtcttctttcttttcccctgaaactgaaagtgaaaacagcaacaacaatgtcttcttcatcttcttcgttcacgagtctccacatcacggccttagacgcgatagtgaacgtcaactccctcttcaccctcgccgtcttcatcggcctaacctggaaccccaacgacccgccgccatcgccgagaacctcatcgccttccacgtctactctttcagctccttcctcttctccagcctcgtcgccctcgccctcaagcaggccatccgcctctcccgcaccacctccttccactaccccgccgtcgtcgaccacctcgtcgcggacgtcaaccgcaccgccctccgcctcggcatgctcgtctccggcgtcggatccgtcgccggctgcgccttcctcatgctcgcgctcgtcaacgtggcgcagatcaagctcggaaccctcgcctacgccgccgtcgttccgcttctcatcttcgtccccctcgcgctcctcatctacgtctccctcgttctctacgccaactctcttgaaagcatcggaggagaaaacagcatagaggcaagggatgcttacttctacaaggtcattgcagcactgtgaagaaacaggaacccatgcatttcgtgcagccttttcgcagtgacgcagtttatgcgtcaaaattctaagtgtgctaaacttgccgcatggaccatttttctcgttttcatgttcaggataactgtggtcgtattcagcaacggtcacagtgatcaaaagcagcaggaacacaccaacgaacttgctcat

SEQ ID NO: 98154 - DNA, 291 bp, Glycine max
  Clone ID: PAT_MRT3847_59647C.1
atggcaacgatggggaatggtgattgcgactctgggatcaacaccaactctcttgaaagcatcggaggagaaaacagcatagaggcaagggatgcttacttctacaaggtcattgcagcactccttttcgcagtgacgcagtttatgcgtcaaaattctaagtgtgccaaacttgccgcatggaccatttttctcgttttcatgttcaggataactgtggtcgtattcagcaacggtcacagtgatcaaaagcagcaggaacacaccaacgaacttgctcatcttaactaa

SEQ ID NO: 98155 - DNA, 331 bp, Glycine max
  unsure (1)..(331): unsure at all n locations
  Clone ID: PAT_MRT3847_59648C.1
actaactaacatcactcaacccagataacctagttcttgacatcacataccaattcgtataaatgtataactacaacaactacctctcctccactaacctccccacacattatatctcccaccatttctacctctccatatccaacacctacataaactacttcttctccccaaaacccttctacaacaacaacacttgcttcatcacaccatacaacatcatcacctgcacctccactagnctctaactctcgcaagacttcatctcaatccaatccaccaactgttttaactcctatactaaacattatcttatcacgcttcttattct

SEQ ID NO: 98156 - DNA, 316 bp, Glycine max
  Clone ID: PAT_MRT3847_59649C.1
attaattattgtgaaaaacgactcaatatattaggaaaccaatataaacattggagggtattgaatgttaattgtgggagattggataagaaatctaatatgcttaacgaacagacattttggacatattttgttaaaacatgacctgtgcgtgatgattgtaaaatgaatatctggaaggtgatgaggttgacctgtgaaaaggaagagatgatgaaatgtaaaagttctgattgactatgatatgcaactaggattcaagtttaagaagttatctcaacagcattaatgaatgatagtgagaattttcctgcat

SEQ ID NO: 98157 - DNA, 236 bp, Glycine max
  Clone ID: PAT_MRT3847_5964C.1
gtcttacgtatgtacatgggcaacctagtgagtgattgcatttttggagccccacacacggcgactcattacgctgatcaactctcgctggtggggactgactctttcctttctgaaaacagcttagcgaggaattgctaatcaagtcaaacagaatgtgcatgtggaatattgcgaatggcctaataagttctgagacttctgtaagagagagtggcaccagcattaagggaagg

SEQ ID NO: 98158 - DNA, 435 bp, Glycine max
  Clone ID: PAT_MRT3847_59650C.1
acggctgcgagaagacgacagaaggggtttaatatactttgtaatgtatacattattttacttcttatgtctgtttgttatgataacataataaattaatatattatgtttgtaaatacatgcctatctatacacaattgaccaaaccatttgttgtacatacttgaatatcattatatttgataaatgcatttgtgaaatattgaaatggtagcattattaagccacatgttgaatttttttcttcttattttaatttgaattatctttgctcttagggtgtatattcttcaattctaaagattttttgatatatttcaaagtaagatatgtggtgcagagaaaaataagagaaatagagaaatatataaagtaaatataaaaaaagtgtagaaagtaaaggttatctgaacattttttcaattgtaattccaa

SEQ ID NO: 98159 - DNA, 552 bp, Glycine max
  Clone ID: PAT_MRT3847_59651C.1
ttatgtcatatagaaatttgtagcaacctttaacacatactctgctattgtcgctaacgcagtgatcaagagcgtggtcaaaaggtcaaggaaaaatacacaacacacactactgtatcctgaagctttgacgaattgtaaaaacctcaggttgcgtaaccataaccaacgttcccagccatctacaagctgaaaaatatgttggaatttatgataggtaggaaagttgtggtctatggcttgttggcgaaatggcaacgatggggaatggtgattgcgactttctacaaggtcattgcagcactgtgaagaaacaggagcccatgcatttcgtgcagccttttcgcagtgacgcagtttatgcgtcaaaattctaagtgtgctaaacttaccgcatggaccatttttctcgttttcatgttcaggataactgtggtcgtattcagcaacggtcacagtgatcaaaagcagcaggaacacaccaacgaacttgctcataaaaattgctttgcaccatgctctatatatactgaaaaccttgttcacaagcat

SEQ ID NO: 98160 - DNA, 350 bp, Glycine max
  Clone ID: PAT_MRT3847_59652C.1
gaaccacgtctcacagcaaacgagagggaactaagccccgcaagctctaagtatattttgtgaacaaactatacacgaggaacctcttaagtagtaaggcatagcggaaagtgaacggacttaacccccaaaaacacagagtctgtgcaaaggaaaaattcaaatgccttcattaatggcacattttcacggtagaaaatatgttctagggagcaagacagatgcgaccccaagcttggttcaaatgcgagtcaccccgatataaatgccaatactatgccgctatctggatgacactttaaaaacattttggcctcacagaaagaaagtgggagtcttgaacccagtca

SEQ ID NO: 98161 - DNA, 978 bp, Glycine max
  unsure (1)..(978): unsure at all n locations
  Clone ID: PAT_MRT3847_59653C.1
ggccgtttctagtgcgattccatatttccatccattttcgtctccgtcttctttcttttcccctgaaactgaaagtgaagacagcaacaacaatgtcttcttcatcttcttcgttcacgagtctccacatcacggccttagacgcgatagtgaacgtcaactccctcttcaccctcgccgtcttcatcggcctaacctggaaccccaacgacccttccaacagcctcaactccgatccggcgtgtgcccccaccgccgccatcgccgagaacctcatcgccttccacgtctactctttcagctccttcctcttctccagcctcgtcgccctcgccctcaagcaggccatccgcctctcccgcaccacctccttccactaccccgccgtcgtcgaccacctcgtcgcggacgtcaaccgcaccgccctccgcctcggcatgctcgtctccggcgtcggatccgtcgccggctgcgccttcctcatgctcgcgctcgtcaacgtggcgcagatcaagctcggaaccctcgcctgcggaagctcacacacctacgccgccgtcgttccgcttctcatcttcgtccccctcgcgctcctcatctacgtctccctcgttctctacgccttcacacgctagctaggtaggttttgcgattgcgatgatgtttgatgcgactagttctaaagtccgatttaggattatttttttcacattgagacgtgaaagataatttgaatctgaatgaatactgtaaattaaatagtgatgtggtttgaaatggaagtggtgttttgttagtgtcactttttgaatttgacggtgagattgattgacatctttgttaacccgagtaatttgatgcttgacaaggatagagtagggtttttcaatgcgcattacagactggattatacatttctattggagtttgagcagaggttttaattcctaagnaaaatttaaaaaaaccaaaacaacc

SEQ ID NO: 98162 - DNA, 1507 bp, Glycine max
  Clone ID: PAT_MRT3847_59654C.1
ttttttttttatggaaagaaaacaaaaaaataattcagtacgacttaaccatcgatttatgttctaacatttagtatttcttttgaaactaatgttaagtaattcatccgaaggataacaaggaaatcaaaatatactaagttttcaattaactcattaatttgaagcatagtatgaaactcataccaaaccataacaaaaataaaacaaacaaacaaaactctccacttgacataatctaggaatattgggcctcaaacaatttagtggtaatctaagatgaagtgccacttcgaagagcttgggatttcttgcttgttgctaacttagtctcgggctccttcttcacaggttcttctttttcagataatatcaactctatgtggcacggagatgacatataaggattgattcttccatgggctcggtatgttcggcgtctttgcttctgtgcttgattgacttggatatgagaaatgtaaagcgcatcaacatccaaacctttcacttcagcattgctctcagcatttttgagcaaatcaaggatgaattttgctgacttgacaggccaccttccttggccattagagtgtctattctttgcttgagctgtccttccaacaccacgacagaaacgtctgaacggaatggcctgcttgtgcgcaagaacatcttccaagtaccttttagctttaaccaagggcaacttcctgattgcaaaggcagtttccctagtgttcttaaaatgaaccctaaggtcggcgcctctagccttgcaagacttggttggattgtcaggctcccttgagtacttcaccattggttttttttttttttttttacgaaaacgtgaatttatttgatagagaataaaattgtacattacaaggtaatttatttgggagccttgataacaagctcaaattattaacggacaacaaacatacaatacacaacacagattactgtatcctgaagctttgacgaattgtaaaaacctcaggttgcgtaaccatagccaacgttctcagccatctacaagctgcaactgaaaaatatgttggcatttatgataggtaggtaagttggggtctatggcttgttggcgaaatggcaacgatggggaatagtgattgcgactctgggatcaacaccaactctcttgaaagcatcagaggagaaaacagcatagaggcaagggatgcttacttctacaaggtcattgcagcactgtgaagaaacaggagcccacgcatctcgtgcagccttttcgcagtgacgcagtttatgcgtcaaaattctaagtgtgctaaacttgccgcatgggccatttttctcgttttcatgttcaggataaccgttgtcgtattcagcaacggccacactgaccaaaaccagcaggaacaacccaacaaacttgcccatcttaactaaatgaatttgattgatgatttactctttttaagtagcttcaagcttgaaagagagagagatagttctctctctc

SEQ ID NO: 98163 - DNA, 459 bp, Glycine max
  Clone ID: PAT_MRT3847_59655C.1
acacaacacagattactgtatcctgaagctttgacgaattgtaaaaacctcaggttgcgtaaccatagccaacgttctcagccatctacaagctgaaaaatatgttggcatttatgataggtaggtaagttgtggtctatggcttgttggagaaatggcaacggaggagaaaacagcatagaggcaagggatgcttacttctacaaggtcattgcagcactgtgaagaaacaggagcccatgcatttcgtgcagccttttcgcagtgacgcagtttatgcgtcaaaattctaagtgtgctaaacttgccgcatggaccatttttctcgttttcatgttcaggataaccgtggtcgtattcagcaacggtcacagtgatcaaaagcagcaggaacacaccaacgaacttgctcatcttaactaaatgaatttgattgatgatttactctttttaagtagc

SEQ ID NO: 98164 - DNA, 177 bp, Glycine max
  Clone ID: PAT_MRT3847_59656C.1
aagaattcgcagccgcaggaattttttttttttttttaattcattttattatgttccaatttcacattccttaatagctcttctttgcaattgcattagctagagtcctgttactactgtatatatgtttttgtttcatcacctcgtccattcttgatcgttggatatcaggtgatg

SEQ ID NO: 98165 - DNA, 2378 bp, Glycine max
  Clone ID: PAT_MRT3847_59657C.1
ctaatatctcatcatgatatcattacccttctcaagttgagcatctaaattacatatctctaacttgcacaacagagaggtgaattgagtgggaccaagagccttagtaaaaatatcagctaatcgtgcatgtgtagaaacataagtaggtgcaatattgtcagtgagatactcatcacgaatgaagtggcaatctacttgaatgtgcttggtgtgctcatgaaaaacagggttcttgacaatatgaagcactgcttgactatcacaatgaagtcgcatagtctgagaatgagagataccaagactatggagaagaccttttaactgtttcaattctcctgttacagctgtcatggatcgatactcagcctcagtggaggagtgagatactgtttgttgtttccaatcagagtcacacaaactagatagttgcaagtcaaaatccttacgcaacaaaacaccctgtcctggattccctttcaggtattgaacaacacagagagcagcctcccaatgggtctctttaggtgcttgcataaattgagacaacacatgcacacagtatgaaagctcgggtctcataaaacataggtaaatgagacgacctactaaccgcctatgctgatcaggatgaggaaaaaacaagtctactgcaagtgctagacgatgattctgttcaattggcacatttgatggctcagctcccagaagtccagtttcggctataatttccaaagcatatttgcgttgacaaagaaagatacccgcggaagattgcaccacttcaacacccaagaaatatttgaggatccccaagtctttcatgtgaaagcaattgtgtaaataggctttacatttgatgatagcttcatgattatctcctgaaatgattaggtcatcaacatacactaacactacaatatgtacccttggtctttgcaagacgaaaagagaataattagatagagaatgccgaaatccgtagtgtttaagtgcagcggatagcttggcaaaccaacaatgagacatctgtttgagtccatataaggacttgttgattttatacactatgccatattgctgaggaagaaagccaggaggcagcttcatgtacaaaacctccttaaggtctccgtgtgaaaatgcattgtgtacatccataacggtgaaaaagtctgtgtaatcgatcccctccttttgatgattgcaaagaattactaaccttgctttgaaccattctacacttccatcagctttattctttattttgtacacccacttgcagccaagtgctttctttcctgaaggtaattgtgtgactgtccaagcttcattggtttcaagggcatgtatctcactttttattacatttctccatcgattgtctttcaccgcgttagtataagtgacaggctccttttcctgtgaaatggatgcaagaaaagcacgatgtgcaagagaaaaatggtcataattcacataatcagttatgggatagggcgcacccgagtctgcctttggagaaggtgaacagttggatgggctcaatcttttgatggtatttgtcacataatcttgcaatcgagtagaaggttgtttggttctgtgtcctctaccaaataatggttcggttggtgatatagatggaagcattatatcttgtgtgtccatattttggagagtaacaccttgttcatcgaaccccatatttggcttaccccctctatcatccattgccatattaccactttcttcagtacctcttatgtgatccgtttcttctacaccatcagtcacatcaccaacaatttcttcatacctccaatttttaagaggaacatcttcttgggtagtaacatcaataaaaaaaggatacttggtctcaacgaattcaacatctcgaaagacaaaaatctcttttgtttctaagtcaaacaacttccaccctttctcaggttgcgtaaccataaccaacgttctcagccatctacaagcaactctcttgaaagcatcggaggagaaaacagcatagaggcaagggatgcttacttctacaaggtcattgcagcactgtgaagaaacaggaacccatgcatttcgtgcagccttttcgcagtgacgcagtttatgcgtcaaaattctaagtgtgctaaacttgccgcatgggccatttttctcgttttcatgttcaggataaccgttgtcgtattcagcaacggccacactgaccaaaaccagcaggaacaacccaacaaacttgcccatcttaactaaatgaatttgattgatgatttactctttttaagtagcttgcaagggggggagtgcggaattcttgcactctgggggtgtgaaaattgtagagtggccgtcaccgc

SEQ ID NO: 98166 - DNA, 245 bp, Glycine max
  Clone ID: PAT_MRT3847_59658C.1
tctcgagccgattcggctccgctcaaattcaaggaatccatatcatcttgcccatatggagtcttcctctcttggaatacatctaatcacttatgtaattggcctggaatcacatgcaatcccaagcttcaagagttacacagttaaacttgacacgatacaagtttgagggatccatatctccccacgtaggatatctctcttatatgataacgttacacctagcaaccaacagcttccacggg

SEQ ID NO: 98167 - DNA, 249 bp, Glycine max
  Clone ID: PAT_MRT3847_59659C.1
atcctcccaaaagaagagtgcaccacccccagatgatgttttagattttattaagacctcttcccccttcttattcattcaataaccccgcgccggccaaaaacctgaaaatttttattgtcatatttcccccttaaaataccattaaccctctaattgatatcccgaagccatgcgagaattttatccccttccgtttttttttaaaaaacccctcaaatccattcctttttggcttcaacctttaaa

SEQ ID NO: 98168 - DNA, 174 bp, Glycine max
  Clone ID: PAT_MRT3847_5965C.1
cttagctagatcagacactctgatctgaaaaatgagatccaaagatagactaatgctaggtatgttcatagccactatgctaacgatctcctctgaggatgcacccgatgatgcataccacaattatcacaaatcaaatggctagcgtatgcaaatggtgtagatgaaagcaaa

SEQ ID NO: 98169 - DNA, 569 bp, Glycine max
  Clone ID: PAT_MRT3847_59660C.1
agcgcattactgatggtggggcagatttctcgttgaaatgtgtaggtgacactgatatgataaccactgcattgcagtcatgctgtgatggatggggtttgactgtaacacttggtgtgccaaaggtgaagcctgagatgtctgctcattatgggctactcctaatgggaagaacattgaaaggatctctatttggaggatggaaatctaaatctgatcttccttcattagtagagaagtatcttatcaaggaaatccagattgatgactacataacacacaatttgtcatttgatgacattaacaaagctttcaatctcatgaaggaaggggagtgtctgcgttgtgttatccacatgccaagataatgcatgcggcttctttttcttctttttttttttttctttctaagagaaagttgttgaagaaatcaatgccctggagaatgaagaaactactttgcctagttatcattgaacattggtgagagttgcatcttgtaaaggacaaaatattgatcatgctaatagtaataatatgctatgctaatttttgtctttgctcaaaaa

SEQ ID NO: 98170 - DNA, 1214 bp, Glycine max
  Clone ID: PAT_MRT3847_59661C.1
ctgcagtggcatggagagctggggaagcattggtgatggaggaagtagaagtgagtcctccccaaccaatggagattaggattaaggttgtctccacctctctctgtcgcagtgatctctccgcttgggaatctcatgccatatttcctcgcatatttggccacgaagcatcagggattgttgagagtgtgggacagggagtgactgaattcaaagagggggaccatgtgctaacagtattcattggagaatgcatgtcatgcaggcagtgcacatctggaaaaagtaacacttgccaaattttgggattggaaaggaggggtttaatgcatagtgatcagaagacacgcttctcattaaaagggaagcctgtttaccattattgtgcagtttcaagtttcagtgaatatacagtagtccattctggatgtgctgtgaaagtcagcccccttgcacctcttgagaaaatatgtcttctgagctgtggggttgctgcaggtcttggtgcagcatggaatgttgctgatgtgtcaaaaggatcaactgtggtgatttttggtcttggaactgttggcctatctgttgctcaagcttccaaactaagaggtgcatctcgaataattggtgtggacaacaatccacagaagtgtgaaaatgccaaagcttttggggttactgaagttgttgatccgaattcctacaaagaacctatagctcaggttattaagcgcattactgatggtggggcagatttctcgtttgaatgtgtaggtgacactgatatgataaccactgcattgcagtcatgctgtgatggatggggtttgactgtaacacttggtgtgccaaaggtgaagcctgagatgtctgctcattatgggctactcctaatgggaagaacattgaaaggatctctatttggaggatggaaacctaaatctgatcttccttcattagtagagaagtatctcaacaaggaaggggagtgtctgcgttgtgttatccacatgccaagataatgcatgcggcttctttttcttcttttttttttttctttctaagagaaagttgttgaagaaatcaatgccctggagaatgaagaaactactttgcctagttatcattgaacattggtgagagttgcatcttgtaaaggacaaaatattgatcatgctaatagtaataatatgctatgctaatttttgtctttgctc

SEQ ID NO: 98171 - DNA, 1452 bp, Glycine max
  Clone ID: PAT_MRT3847_59662C.1
gaagatggagactcgtgccgccgcaaagagaaaggcaaacgccgccatcgtagtggttgtcgaaaaacaacaccccaaaagacagcgggttgtgttgggtgaacttcccaatttgcaaaaccttattgtctccaaaattcaaaatccgcgcaaagaaaaactccaatgtcggaagaatcccaatgcgaataaaccatcacccacaaacaacaccctttcttcccctcagctcgacggatcttatgtttcggacatccacgagtatcttcgtgaaatggagatgcagaaaaagagaagaccaatggttaactacattgagaaatttcagaaaatagttacaccaaccatgagaggaatattggtggattggttagtggaggttgctgaggagtacaagcttctctcggatactcttcatctctctgtttcatacatcgataggtttttatcagttaatccagtcactaaatcaagacttcagttactgggtgtttcgtccatgctcatcgctgcaaaatatgaggaaacggacccaccaagtgtggacgagttttgcagcatcactgataacacgtatgacaaggcagaggttgtgaagatggaagctgacatactcaagtccctaaagtttgaaatgggaaatcctactgtaagcacctttctaaggaggtatgctaatgttgcttctgatgtccaaaaaactccaaattcgcagattgaacatttgggcagctatattggtgagctaagtttgttggactacgattgtttaagattcttgccttctattgtggctgcctcggttatatttcttgccaagttcattatctggcctgaagtgcatccttggacttcttccttgtgtgaatgctcgggttacaagccagctgaattgaaagaatgtgtccttatcctgcatgacttgtatttgtcaagaaaggcagcgtccttcaaagctgttcgggagaaatacaagcatcaaaagttcaaatgtgtggcaaacctgcctacccctccatatgtaccgagttgttactttgaagaccagtgatacagtgaattccttgataaatggtcgaattgaccattgtttgcatgggcatgggttagaaatttgatgcataggtttgtgtcgttgaattgcaagggcagcaggatcacattagatacgaaagttcaattgcctttcctgatgaactatcagggacaaggcctttaaagaaggatcaattaacaagatcttagaatgtacaactgcatagttatcattgaggcataagggtgttacagtgcttcttctaggcagcaaacaagggatcttgatcttataggagacagaaagatcttgagatgcagagaaagttcaaagagttaaaaaagagattattcaaatgatactgtccgattgtatgggttgcgtttgttttgatgcagattctaaaataatttatt

SEQ ID NO: 98172 - DNA, 602 bp, Glycine max
  Clone ID: PAT_MRT3847_59663C.1
aaatttgtacgtcctccatggatctgaagcgcgatggaaacgggattgaggatctgagcggtggcgttcatcaactcccctgctgatggtcccgcctccgtttcccactatttcaaaaccaaacatatagctctcgtcgacgacgagggtttacctttacaagaggtgcattttagaggctactccaaggaacaacactccctctttctcacggttttgtcgtgtgtaagaaaagttcgcctcctacctccgacgaaaactctcactcttgggacatgatagcagaccaaagacaggaaacgcggaaacagaacaagagagtaaaacagcagaaataggggtgcaagtagcaaaggccaagagaaggatttgcagacccacctacctcaaaggctatgtctgaagatgatggcgctgagttggcagagcggatttgcaggattttggttgtcttgctgctaagggcacgtctctaacggatttctgttattgagaatattccttaatcattaggaaattacaattatgtcagtagtaggcactatatcatcatgtaatgacccaagcaaggaataacaataaaaaatatacttgcctgcccg

SEQ ID NO: 98173 - DNA, 554 bp, Glycine max
  Clone ID: PAT_MRT3847_59664C.1
agcatcaaatcatttacactgctaagctcaactctatgaatagagtacatcaatcacagttaatacaatgaaattgtaacacaatacagactcaaaatgctacacattgcaatatgagatttttctgttgctgctaccctgtcaactttgtacaaaagaatacatatagagcaaacaatgcagatcaaggttttaaattgctggagcaatcgtagttgcagtttcatttcgattggaaaattgcagacaaatatgactaatgcaactacaattgaagttgtgaactgtttttaaaacttgaagtaaattgtctcccatagtaagaaaaagtaaggctaccaagcaattattttacaagctccttaggaatgagatatcgaaaagtaaagttatgtggaatccattctatgctcttcttggattttgcaagggcacatttctttacactctttcttagagattcaggtagagacttttggatcatctccatggtaccagcagggcacaaacccgagtccttgacgaaagactctacaagcttgggaaaaatattt

SEQ ID NO: 98174 - DNA, 390 bp, Glycine max
  Clone ID: PAT_MRT3847_59665C.1
gcgcatagcctgagtaaaggggctataatgcttctgatacatgtacaaccagattcacatgattttcagaatgtacagcttctctaacaagtgaaattgctatttgctaatctcactcactccctcatcatatttaaatatatgctatgcatatggggatttaaattacacatttaaaaagaaaagttcttataagaaatctcttatagataaagaactgaatgtagaaatcctccttcttcgactcttattttatcattggtctttgggatcattaggccttcactagcttgggttgcatttggtttcagctctttcaaatgtataatcatgtcaccccgcaagggggctttgtccaacttgagttcaaaactccatctttatatggtc

SEQ ID NO: 98175 - DNA, 432 bp, Glycine max
  Clone ID: PAT_MRT3847_59666C.1
atctggtgatttacagacactgcagatggtgatgtaataaagtagcaagacctcatgtcatactgcactcgcatggtggcaagctatcagacaagtatccattgatggatttcgcaagtcgctgactgcaacagtaaatggtgctatactcatggacaaagttgatgtaggtgatccttaaacttcttactgatgggaagttgaatgaaggaaaacatattcctgtatctaatataagtgcaggggagaattatgtagttcaaatacccctaaaggcacaggaggaaaatctgtcttctagagcaagtgatttcagaactgcaatggtgatttaaaatattaagacctaagctcattggaatgcttgtgggagctatttaaattatcaatgatagttttgcaagtcctgacagcaacatagttggttcaatt

SEQ ID NO: 98176 - DNA, 125 bp, Glycine max
  Clone ID: PAT_MRT3847_59667C.1
ggcgcattgctagaacgaccctcctgctgtttacgtcagtggcctgactagtactgggaataagcttttttctggtcactcatacaacttaagtatggttcgtcgtttgagatcttccactctat

SEQ ID NO: 98177 - DNA, 145 bp, Glycine max
  Clone ID: PAT_MRT3847_59668C.1
gattttcccggggtgggataatcatcctttggctaggaaagaaatgatggatctgggtaataaaagtgggaaattcaggagaaaatttgaggagcttactgcaactgatgggcctctaggaaagagattaaacgacaccaaaacc

SEQ ID NO: 98178 - DNA, 311 bp, Glycine max
  unsure (1)..(311): unsure at all n locations
  Clone ID: PAT_MRT3847_59669C.1
gaattcggcaccagtttaagtgaatctgagctttcaaagaaggaaatcagggatacagagtcagtgaaggcatggtagagaaaacaagtcatgtaatcactacgcgaattcaatcattgcaaaataacacgttaaatatctgtgttcttcactgttcaaacttcataaatcttcttcttgtcttgtacgttctactctggagaactaattatttaacttttggtccagtacactacataaactattattattattattattattattattagattacagctgtttatctttatgtttacttcaacnnaatt

SEQ ID NO: 98179 - DNA, 320 bp, Glycine max
  Clone ID: PAT_MRT3847_5966C.1
cccccaaaaggaaaatgggttcccctaaattttttttggaaattttttttccaaaatctggcaccgaaaattttggaaaaacctttggggggggggaattttttgccttccaaaaaagggcccccaacaaatgtttccaggcggggggggaaggattttctcaggaattgaaaaatcttgggccaagggggaggggggaaatccccttttgggggggcttatttgaaagggggggccctttcggactgaacaattggggccctgtttttatcccgtctaaactgggtggcaaaaccccgggcttccccttggctcccttt

SEQ ID NO: 98180 - DNA, 569 bp, Glycine max
  Clone ID: PAT_MRT3847_59670C.1
tttccacccttaataaattcccttcaccacaccttaagatagccatttgaatatttattcaacagaaagagtactgcataataagcttaggttactagagatgatctaagaaagacattttaatatatattctaacagaaaaaacagagtagaataagcttaggtttgttgatattttggccttgtaatataagaaccaaaatgtagcagttgaatgcacaagctaaagctaatagtggagtggttctatatggatacacactattctgtaatataattcatactaactgagatcactagcatgacataaatcaaataaagctagacactggattcaaactaatgtggtgcacatccggttctgaatatgtgaacactccaatggccttgttcttcttcaacttcaaaaatgcaagtgtcacctttcatgagcttgttatcacgaacgaatctttcccatcctctcttaaacgcagcataccatgtatttcgatttctaaaataatgcactcgcacttcccaagattttccttccgaattccaaagatagatctgttccagtgcttcag

SEQ ID NO: 98181 - DNA, 764 bp, Glycine max
  unsure (1)..(764): unsure at all n locations
  Clone ID: PAT_MRT3847_59671C.1
cacgcgtccgctgctggtgatttatacataagtgcaatgcacctattataccaccctctaatacaaaattaaagatcaacanttagccccaccacatatactagatatgtgtaacccatattaaccaaaatattccacaaggttggacgaccggtggttgaaagaagtacataaatttttgtctctggactttaaccatgaccacatgagaaataaagcatcttccatcacttttgctgattcaaatctgttgccttggaatatcaaataattcctatgctgccatattgaacttgttaatgcaatccaccatccacaccatcgtttttgatttttcccagctccaaagccatcacagaattgagcataatgagatgctggagaggctgcaagaggtccaaccatccgattccacctcataggttcccaccataatccactggtcaatttacagttgaaaaacaagtgaccagccttctcttgatagtatccacatagaggacatgtgtgttcctgaatgggtacatttctttttaggagattgtgtctagtgggtaatctatctttgataagtttccaagaaaaaaccgcagctcttggagggatgttaagcctncaaattgtcttgtagatgttggcctgtgggagatatctgttggcagtgattaataatctgtaagctgacttagtggagtataaacccgaagaatcagctgtccacaacaatggtgtcctgcaattgaggctggatctgtgcattattt

SEQ ID NO: 98182 - DNA, 234 bp, Glycine max
  unsure (1)..(234): unsure at all n locations
  Clone ID: PAT_MRT3847_59672C.1
cgtttaccattacaattatcttcgncctcgtatnggcataccttctcggcgtgctttatactatccgctggcttacaaaaaatacttactttttctaaaacttcctaaggtcaaaaatcacacacaatattgatttctccacttctctgaactcaaaaaaatattgctctacgcttcatataccccatatgtcgcccctgtgacacacccccaaagctcatacatactattact

SEQ ID NO: 98183 - DNA, 674 bp, Glycine max
  Clone ID: PAT_MRT3847_59673C.1
ttcttgcggtcagggaaaggccaaagtagcattagcaatagcatgtttgttgctcccatttgagtttcaagtttgagcatttgcttttgtttttttcctagagcgcagttatggttcagcttcctccaaacgcgagccccctcaagtgactgctttataagccaacctctttcacaaacaaacatcacaatctctagagttctacacacaagcacgttctagagagagataggaaattattaaattaagcaaatgggtcgcaatagcatagacatggacagggagagattaacggctgagatggacttcaaggactcatcctccgccgtgatcagaatccggcgccggctgccggatttccttcagtcggtgaaactgaaatacgtgaagttgggattgggatacggttactcatactcatgcaaagcagccagcattgtgatgctagccatcaccctccctctcgtgttctctctaaccggtggtatcaagctctccaaactctgctcccacaaccaccagctcgacgccgagaccgtggcggcggcttcggcggcgctactctccctggccgccctgtaccggtggaagcggtccccggcggtgtacctggtggacttcgcgtgctacaagccggagaaagaacgcaaaattcggtggggggggttctgaag

SEQ ID NO: 98184 - DNA, 139 bp, Glycine max
  unsure (1)..(139): unsure at all n locations
  Clone ID: PAT_MRT3847_59674C.1
gtttggggactatgtccctgaagatccatcctctttccgcctatcctccaacttctccgnttatccccagtttatgtaccacctgaggcgatctcaattctttgatgtctcctacactactcccgatgaaactgcattc

SEQ ID NO: 98185 - DNA, 210 bp, Glycine max
  Clone ID: PAT_MRT3847_59675C.1
gaatctcgggtcgagcttttactttgtttaaaagtaaaagagcatataatatttttggcaaacaaaaaacggcggacctctgctggttattcttctttcgcgggactaaatttcggacctttacctaatgccaacccacgtttccgtctactaagtttgcttctacctggaccacctcatagctctagcttgtttctctgagaacatgaa

SEQ ID NO: 98186 - DNA, 127 bp, Glycine max
  Clone ID: PAT_MRT3847_59676C.1
ttgaggtttggctgtacttaaaggaaaatcccttactaaatggtattgttggttggttcattcttgcaaaggaaattttgagccccctcctagtggttcccgtatgggaatcacaggtgggatgggg

SEQ ID NO: 98187 - DNA, 2226 bp, Glycine max
  unsure (1)..(2226): unsure at all n locations
  Clone ID: PAT_MRT3847_59677C.1
ctcagaggcgtgtttggctttggggttcgggttgcgaatgaaggagtgagagcgagtgctgtatagaatcccatatttgattagggaaattaaaacagaaaacagaacccttcgaaaacccaaaaccctgtttggcgtcgcggccatggatttccaagtggtcgttctcggcggtggcctttccaagaagctcctccctctcgtttctcaggagcttccgaacgcgttgcttccggtggcgaatcgccccgttctctcctacgttctcgagtacttggagcttagcaacctcaaagatctcattgtggtggttgaaggcgaagaagcggttcttcatgttggggcttggatttcgggggcttatgctgatcgcctccacgttgaggttgctgcagttcctgaggatgtggggacagcgggtgcaattcgggccatttcgcatcacctaacagctaaagacattttggttgtcagtggtgatcttgttaccgatgttccacttggtgctgttgcagctactcatagacggcatgatgcagttgtcactgctatgctttgctctgctcctgtaagtggaccttcggagtcagtatcctctggtgggaaagacaaaatcaagaaacctggccgttatgatttgatagggctggaccccacaaaacagtttttagttcacatagcaactggagcagaagttgaaaaagatcttcgaattcagaagagcatgctccctgcagttggccagatagaaataagagctgatctaatggacgcccacttgtatgcattcaaaagatcagttctacaagaagttctagatcagaagagtgcatttcatagcttaaagcatgatgtattgccatatctagtccggagccaactgaaatcagaagtattattaaatggtatgccacaagcagaagaaaacggaactgaaaaggttatttctcaaagcaatcaacaaatgctatctcaaatactcgctaatgcatctgaaccaatctttcatctacgaaatgcactgggtcctcatggttctacttctgatcgaagaacccacaaatgttgtgtgtatattgctggaagcagcaagtactgtgctcgcttaaattctatacaagcatacagtgacataaaccgagatgtgacaggagaggctagtcacttatcagggtattccttctctgctcaaaacaacattatccatccttctgcagagcttggggcaaaaacaactgttggaccacattgtatactgggggaaggttcacagatgggtgacaaatgcagtgtgaaacgatctgtcattggccgtcattgtcggataggtgctaatgttaaggttgttaattcagtagttatgaatcatgttactattggagaatcttgttcaatccaaggttctattatctgcagcaacgtacagctccaagaacgtgccatcctaaaagattgccaagttggagcaggttttgtggtcactgctggtagtgagtgcaagggggaggtcttggcaaagaaatgaaactggaatgtgaaaatggaggctggggaaatacatagcaaaatgacttctattctgcttgatcattgcttggagcaaattttgtgctttttgctgtcagcagttacaatttggtgatgttagcagaaggagcaacgaagaaattctaatacttccaatttatatgcatgccctttgcagtttcttgcaatttgtttgaaaatggctgcaatcggtgttgaatattcatttgtgtaaatgactaccaattgcttccctttcatcacaattttctgccatatgttacaagggactttcggttggtatcttgctgctgtgctaattcggtataatccagcgccatcagttttgtattcgagcaaatgtagtactattggctaagctcgtttgggctttttgtttgagatttgtttgtaataatgtgcaatcggtgttgagtattcatttgtgtaaatgagtactaattgcttcctcttcatcactattttttgccattcaaatgcatgtttcaagggactttaggttggtatcttgctgctgtactaaaacggtataatccagcgccctcagttttgtatttgagcaaatgtagtactatttaagcgttttggctttcagttttttgaacatttgtttttgtttgtaaaaaaaaaaaaaaaaaaaaaaaaaaaaaaaaaaaaaaaaaaaaaaaanaaaaaaaa

SEQ ID NO: 98188 - DNA, 558 bp, Glycine max
  Clone ID: PAT_MRT3847_59678C.1
cggtctgtcattggccgtcattgtcggattggtgctaatgttaaggttgttaattcagtagttatgaatcatgttactatcggagaatcttgttcaatccaaggttctgttatctgcagcaacgtacagctccaagaacgtgctgtactaaaagattgccaagttggagcaggttttgtggtcactgctggtagtgagtgcaagggggaggtcttggcaaagaaatgaaactggaatgtgaaaatcgaggctgggggaatacatagcaaaatgacttctattctgcttgtcattgattgagcaaattttgtgcttttttctgtcagcatttacaatttgatgatcttagcaggaggagcaaagaaattctattacttccaatttgtatgcatgtcctttgcggtttcttgcaatttgtttgaaaatggctgcaatcggtgttgagtattcatttgtgtaaatgagtactaattgcttcctcttcatcactattttctgccattcaaatgcatgttacaagggactttatgctggtatcttgctgctgtactaaagcgg

SEQ ID NO: 98189 - DNA, 329 bp, Glycine max
  unsure (1)..(329): unsure at all n locations
  Clone ID: PAT_MRT3847_59679C.1
ggtcgatcccgacgaaaggccacgagaggccacggacgaaccacaagaccaacagggacggcgaccnccnanncaccagcgccaaggaccacaaccccaccgacngggacgccgacaacggcgaacgccncggcaccaaccgcggccacaacggcgccgangggggccgcgacgccccaagagaagcgggncggcccacaacgggaagngcggagcagaccgccaagccaaggaacgggcaaaccggccagcagaaggncaccnncaaaaacgaaaccccggcgagggccgcggacaacgcggacggcgaaaagcnagccgaacaacca

SEQ ID NO: 98190 - DNA, 355 bp, Glycine max
  Clone ID: PAT_MRT3847_5967C.1
gtccaacacaacaatgttttttggaccttaaccccttgcatgaggtcggcaatcatcatgagtgcagggagaagtactttaaaagcttaattcctctcggccttaaatatgctgagctttttccatggggagggaagctcacaagtgagtccataaatattttttcaccaattgtcatctggacaaagtttacctcaaacccagaaaaatatgatattctgaattccgcatttatggaatattacacggtatggttgaaatttgattgcaaagagataaacagacatatcaatctcagattttacacaacctctaaccacaccatagacatttaacatagtgagttgtaaaggat

SEQ ID NO: 98191 - DNA, 411 bp, Glycine max
  Clone ID: PAT_MRT3847_59680C.1
caacctttgaaagccgagttaacaggccactacacgtgcattggacgatgttaccacactttagcctctagcacgattctcttacacctgagcatgccctgatccaaatagagaacatattgttgatgagaggcctttcattcagtgcatattaaggagagtaagctcattttatttaacaataaatttttgttaaaattttgttaaatgggatattcacaatgctctttgtacataggtatcaaacaacatatgggatgttataatatcatatcaaaaatcattagagcaaagtgtgatgaaccgactccaagttggttgaaggtattagttgacctttatgataggtggcttgaacagtttaagaaacatacagggggcactaagcagaaacaatacgtatgggccttt

SEQ ID NO: 98192 - DNA, 1215 bp, Glycine max
  Clone ID: PAT_MRT3847_59681C.1
cccacgcgtccgagaaattcaagaaattttttaaacttgacatatctgctatcacctcttccgtttcttgcgattcgacgatggccgatcaaaagcttttaggaccggcgtttagttttaagcatgatgaattgacgagtcgatttcttgaaaaactccgacttcttgaagaactccgacttcttcaagaccgactttttaaagaacccgagaacaatgatgaatgtaggaaaaatgggagcctgaaaaggttaaatgaccagagtgatgtctgtggatttagaagttgcttcaaaaatgattatgatttgcttcagaatcagaggtgcttgaggaatcgagaagaagtgattcaggagacgatggaaatggagttggaaaatatgatggaactgggcaccctcgagggcaagaaaacatattcttttaagaatggtacaagaagtgcgttgaaccttgagaacaccacaagatcctttctagataacaataaatcaaatgataataactggaatggcgaaatgactttgcccctgctagtagacaagtccaccgtctgtatgttaaacaaggatgaggaagtagacgagcccctcagtccgggcaaacacatgaaaactgcacaaagtgttttatcatttttgatagcgactattgcgcttttttggattctcaccgacctatgcagcctgttatcaattatcaagcttcagccagaacatggccccctgcccatttggttttctttgcttgaacctgttggtttcatggtgtttgtttgggctgttgctgcaaagattgttattggtgcaccattttctcgtttgctgagtgccattcttttattttggggtatttggctgcttgtcagatcttctcaatcactcactacactatgccttccaatattgggaatccttctgatggtgtggcatctctgctcgaggaaaagcagctgccaaataaagggtaatgaacaaggaagtgaagctcccaaaattaaaccaatgtgtttcacttttgctgtctaacatgcaccttcccggttgctagtgtttctgttttagtttgtcagtaattaataggtgttctactttcggtgcagtgctgtgatgtaatgttggattttacttcccattctactgtgtgtttttggtaacttttatgctaaaataatgaatgtttttgtgcattttgcacaataacaatttttat

SEQ ID NO: 98193 - DNA, 1737 bp, Glycine max
  unsure (1)..(1737): unsure at all n locations
  Clone ID: PAT_MRT3847_59682C.1
cccaattccaaattcaagaaattttttaaacttgacatatctgctatcaccttttccgtttcttgcgattcgacgatggccgatcaaaagctttcagaaccggcgcttaaacgtgagcagcttgatgaattcgtggtatgttcggttattcacatccattctgactttttttctttactatgattttttcatctgttgttccctatttcttaagtttagggtttttcttatttgatgttttggacacaaaataatagcttcctgacctgattcccgatatttaatttgtaattatggaaggctatgttgtttaaggattcggttgaaggtatatgtttgttatcaaaatagaatatatanagttttggactcaaaggtaaaaagttgtccttgcacttctatgttctcctgttttcatgatcttatttattgtctctctgtttaccacttcctatgcttcagagtagtctatattttgaacaacgaattcttgaactccgacttcttcaagacctcgagaacaatgatgaatgtaggaaaaatgggagcctgaaaaggttaaatgaccagagtgatgtctgtggatttagaagttgcttcaaaaatcattatgattcgcttccgaatcagaggtgcttgaggaatcgagaagaagtgattcaggagacgatggaaatggagttggaaaatatgatggaactgggcaccctcaagggcaagaaaacatattcttttaagaatggtacaagaagtgcgttgaaccttgagaacaccacaagatcctttctagataacaataaatcaaatgataataactggaatggcgaaatgactttacccctgctagtagacaagtccaccgtctgtatgttaaacaaggatgaggaagtagacgagcccctcagtccgggcaaacacatgaaaactgcacaaagtgttttatcacttttgatagcgactattgcgcttctttggattctcaccgacctatgcagcctgttatcaattatcaagcttcagccagaacatggccccctccccattcggttttctttgcttgaacctgttggtttcatggtgtttgtttgggctgttgcagcaatgattgttattggtgcaccattttctcgtttggtgagtgccattcttttattttggggtatttggctgcttgtcagatcttctcaatcactcactacactatgccttccaatattgggaatccttctgatggtgtggcatctctgctcaaggaaaagcagctgccaaataaagggtaatgaacaaggaagtgaagctcccaaaattaaaccaatgcgtttcactcttgctgtctaacatgcactttcccgattgctagtgtttctgttttagtttgtcagtaattaataggtgttctactttcagggcagtgctctgaggtaatgctgttcgattttacttctcagtctactacagtgtgtatttggtaccaaacttttatgctaaaataatccaaggcgtgtgttttggacaattataattgttgtaacttttaatttcacatttttatattttcttggcaaaattgtgtttttgtccaccattttgttttcaatttcggattttgtctcccggacttgctggaacataagaaatcgttacatgaaagacgaacttgctggaacataagaaattgcccaactggtacaaagagaagagtccaagttagaaaaaacttacaacataaaccaactc

SEQ ID NO: 98194 - DNA, 539 bp, Glycine max
  Clone ID: PAT_MRT3847_59683C.1
tggtcggggaggaaggcattgctcgctgactatatctggtcagagagaatggctcctccctccagaacctatgacctccaaaacccgatcctcactctctgctgtgataaaggtggccaccccaataatctcgagatgattaagctctatgtgatgtatctcgtaatcgccgcttccgacccagatatatacgatgattactgtgaaacgatccactttatctccataacaacacgcttactgtcatatacaggaactgatgctcatgctggacgtatattgagccaggtgagtgcaagaacaaagtgaattgcacgttctagacccaagattgcgctctatgcgcgatgtggcacgtccgtgagtgaggtgctacatgtgtccgaccatgacacatcctgtgaaatagggaactatggggagcttgctacagtgacatgactacccctggcatcatgaccatgagcccttagagtacctacacattggcaaatttgagcttcattgagtatgctaccgaagctcactgtactaaaata

SEQ ID NO: 98195 - DNA, 680 bp, Glycine max
  Clone ID: PAT_MRT3847_59684C.1
aagcactgcggaagattcactattcattatctcattctcaaactctcattgttttcattaatcagattagattgagtccaaaatcagccaaggaatatggatctgtggaagaagtcacttgtggtggaaatgccttgagattctatgcagctgttcgtttgagactttcaagagtgagattgatcaaatttgttgataaggtagagggtgttatgatctgtgctcaagtggtaaaaaataaactagcaccagcagcaacgaaaagggctgaactgggtatcaagtttggaagaggcttttgccatgagtcagatgtcttagatttggcttgtgaacatggaatctttgtgaaacatgagggaagctactttattgaaggtaacagttttgatagtagagaagcagctgaactgtttttggctcaaaatcatgctgtttgtgacaaggtggttaaggatatgagaagactttatttttaaaatcaggtggaccttacatcttcctataaacttgctcagcatggtttcactaggccaaatctctttcaatggtatatatggcaaactttatgtaattgagcattgccaacattttttatcatcaaggcattaatattgtcttctatgggtaccaagtatcaaccattctttagatgagcttgtggcatttgaagttacaag

SEQ ID NO: 98196 - DNA, 101 bp, Glycine max
  Clone ID: PAT_MRT3847_59685C.1
gtgagatcgagaaaatacagtgcagagcaacaaacagtgccgccggcgatgaggactccgtgtgagtgcgccggcgacgatgacgggattcaccaaatgcg

SEQ ID NO: 98197 - DNA, 380 bp, Glycine max
  Clone ID: PAT_MRT3847_59686C.1
tggggacccttgcgggcgggcggggacgggcgcactctagctggcagcgcctttcttaaggattcactctctccgagttgcaagttgcagtcggacaagcgaggtatccagacttttcatgaggactacttacggtgaagactattacccctcgacggggagcgttctctctctttgacacgtgcgaagggcaatattcattagctggactgggtgcctccgcacctactcatggtgattagtgcgcgcctgcatttagaggaagaacgggccctctgtgactaaaggatgcggacgaaatcatctgtttcactgggactgcgccttcgggggcgaagtcatgctcgaagacatttgctaggagcaggcgtgttaacgtt

SEQ ID NO: 98198 - DNA, 441 bp, Glycine max
  Clone ID: PAT_MRT3847_59687C.1
gggtgaaaaattgttattccgttttttttttattactattgtaagattgaggatctagggaaccaaataaaaaattgacatggcaatataaatacaattatgcttgacccagaaaagaagagattatcattagtcaatagtggtgaaaaggagagagtatgtatatgaaggcagaaatcttttaaattatttatagcatccttggactcattgtaattatgttatgaactttatgtaataattatcattataatgtagttgtgctacaaaatatataagcatatgtaaagttcatgagtcttcactcatcctgaagtttccctttcctcctcatttggtctcagtttatcactttacctatctaaactattaacattgagaaacctatgcatctactccctggtcaatgatttagagattttgggattttttaaaatagct

SEQ ID NO: 98199 - DNA, 736 bp, Glycine max
  Clone ID: PAT_MRT3847_59688C.1
tcactctttagttggatttttctcaaattctctcaggtaactctgccacaaaactcattcattcattcgttcttgttcgttacaatctattctcgaatgtgtattatccgaaaagactagtacttggactagggtcactcttgtcttgtttagattcctgaacttccctccttgttctttatattttttttatcactttgttctacatatcatttacttcaattacttgatctgttcctgttctctgtaactgtgtttggagtgttaaaacgttcagcctagtcaaagattcttgtttctgctgtagctttatttagtagctaagcacctcagaaaccagatctctgtagaaagtaaagttttttttttggttcgaattctattctttgttgtaccaacatgctctccacggattcccttttggaaaatttccctggttctgtaaacggattcatatttgaaaacggtcctgtctcggtgttttcgaatcagaatccggcaagtgggtttgaggtggatgattcaatttccccttcagaatctgccactgattctggtccttcttctggggcaagctcgaatagagaacatgtagagagtactaaacactccaatccaattctgagatacataagtgatattctcatggatgaagaggatgatttggagagaaaaccctgcatgctgcaggattgtttgagactccaagctgctgaaaaatcattctatgatgcat

SEQ ID NO: 98200 - DNA, 597 bp, Glycine max
  Clone ID: PAT_MRT3847_59689C.1
gagccatgtaagactattccacacgcacgccacttttcttctccttctctaccatccgaatttctaacgacctcgctttctttctttcatttcaaccctcgtttattaatcttcttaacccttttttctcttctctcccggctatttcacatcctctctttcacagcactatatatatttatatacatatttgcgtttttctgcgtttgcatagctgcattctgagctccttcactctgtttgggtttcgcttccattctccgctatctattcgagatgagcatgcttagtcctgaaggtgaactgaaaataagttttggctatcaatgcaatagtgatagagctatatcttgtaatgaaatccaaagaacaagcagtttctcttggttgtctggtgctgccttaagtgcaaatgctacacttgccaacacaaacatctgcaatggtgtaataggagaagaaatccttccaagtttggactctcctaaatcgtttcgtagggtgccctcttcaccaagttttccaaagttggacatgttatcatcttctgtcaatagtagtttggcaaacctaagttgcagcccatccaccccaagt

SEQ ID NO: 98201 - DNA, 552 bp, Glycine max
  Clone ID: PAT_MRT3847_5968C.1
ggaaagaacaaaaattttcaagtgaatccttttcgtatatcctcaaataaacagtaagaaaaggcaagccagacaagattagttgcaagatataaatatttacagaacttaattcgtaagttctcacgttactccctaactacaacacaaatatcaaaatcagaagtcttagagacataaagtcgttcatgggcttctatggttctacctcacaactttggatgttaggagagttgaattgatcatattagagatataaagccagaggtattcatttcatagacttctactaactaccaccttaaggctttgttcattgacaaaaagaatatcatcaatcattacaaattgaaacccatgatcccagaggaaaaccgtgatctatcatcatatgacagattcagatcaatcatcattcataatggttagcagtgcagcattcgttgtcattgatcagagcaaacacttgaaacataaaaagtgatctgatcacacctgataagtgttgtcaaatttgtcatacatgaagcgagtgatgatgctggttttccc

SEQ ID NO: 98202 - DNA, 185 bp, Glycine max
  Clone ID: PAT_MRT3847_59690C.1
attattaccttaccaattatatttgcattcagaatgaaacaacgaaggccgcattcagcccttccctcttggaatcccttctccgtccttaatgggcctcctcttcaactgccttccccgctagaagtcaagacaggcctgtggttgctgtccctgcccctgtgataagcgcaccggtgagatac

SEQ ID NO: 98203 - DNA, 373 bp, Glycine max
  Clone ID: PAT_MRT3847_59691C.1
aaacaaaaaggcggggatattaaaattacctcatagtcaaacccggggaaaaataaaaacccccccagttttcgacggaataatttattggggccaaaattatacccaaaacggggcttattttaaccttccccacaaatcctttttaaagttttccctatatcccccgggaaacccccctaccctttttttgaaattgatttgctttataggcaaaaaacatgagggggcccccccggttttccattaaaaactttagggcccttggcaagtaaaacatcctttgactttgggttaaacaaattaagcccatattttttgcaaattaacccctttatacaggaaagcgtttttggcaaggattcgggggctc

SEQ ID NO: 98204 - DNA, 621 bp, Glycine max
  Clone ID: PAT_MRT3847_59692C.1
ccaataaacaaaatattgaaaaaaagagaggacaatactttatgattacgggttacagctatcttacttgagaatgagacagtcaaaataggcatgtacttccatagcttaagttatttgtcccttgagactcatttgcaattttagtgcaaacttagaaagtaaccattaaatgatagagctatttattggtgcaaataaaatgcctccacacatggcacatacaaatatcttcagtgtgatttccaccttagaatgctgtaactttgtcctccacgccgttcatgtacaaaatccagctgagggaaggtgtgataaagaatgccatcaacaaatttccagtaccttgtcctccacggcatatagaataaaagaggcaaaacaataattccaatcccaaaaatgaatcctacttcaactgatataaaattccaataaatggaattctttgtatcaacattggaatttgatgctggagatggtgtctctttcattccatcaccactacaattctgggacaatggaggtccacacagcccatcattgcctttgaatgagtctgctggaaatgactgaatttgggtacctgttggaattctccccacaagatgattacctgaa

SEQ ID NO: 98205 - DNA, 540 bp, Glycine max
  Clone ID: PAT_MRT3847_59693C.1
tctattaatccggtcttccaattctgcctcttagacgtcatcatcaagatatgaaaagaaaatattaaaagcaaaaaagatgtcgaaaatataaaaaatatgaagaaggaagattttggcatcagactcaacccaagacacgttcagcgctcaacgcgcgcttagagcgaaaacacgcactagcgctaagcaagaagaagtgcgctaagcgcaaatacaagcacccgcgctaagcgagcaacgcagacttaacgcaaatacaggaattatgcgctaagagagcagtgcaggcttagcgcgagtacgcagacccaagtctactccagcaactataaaaaaggagtcaaaccaaggaaaaaagacacactgagtctcagagcactctaatatactcataaagcttgagaacttttccttagaaaattctttcttctcttccattattttttattccctttttccatcccttatcctccatcagtttctataacccttttccagtgtaagaccctttatgaccatgagaaactaaaccattag

SEQ ID NO: 98206 - DNA, 193 bp, Glycine max
  unsure (1)..(193): unsure at all n locations
  Clone ID: PAT_MRT3847_59694C.1
gggcatntccattgggaatganntattgggaggaggagatatggagctttgggaagttntggtgcctgcagctanaaatgtgtatgctgcccttcaaaggcttaacttgggancatnaaattcaggtgttcaactccacattcagaggnctgtgtctgccanactccatnccctncccatccttgcangcaac

SEQ ID NO: 98207 - DNA, 277 bp, Glycine max
  Clone ID: PAT_MRT3847_59695C.1
ctcgaattcggctcgagccaggtgcggcctcaagctcccaatcttctggaccgtgggagcccgcccaggcccggcccaggcccaaccccagcccgcgggccttcgcttatgcgtggtggcctacgcgaacggcgacgtgtacgagggggagctgaagggagggaagtgttgtgggagtgtggtttactattacagtatgagtggaaggtatgagggggattgggtggatgggaagtacgatgggttcggggtggagacgtgggcccgggggagccgt

SEQ ID NO: 98208 - DNA, 499 bp, Glycine max
  Clone ID: PAT_MRT3847_59696C.1
acgctggccatggaccaggagggacagccgcagagtttttaacatttatgcatccaacgtttttaaccagaaagtaaaaaatgtacatcctcttgcccctttccccttattaaatcacacaacttaaaaacaggggggcagtttggccacagacattgaccgtcgttcatctcacagttggcaacattaaaatgggaggaaggaataacctggtccattttcatatccaaaaaatggaaaattttgtggtttggcattgccaagagttcctaaattatttaatttagcaattacaaaaaaaaaggggattaaaaggagaacagggctgtgggtgattaagacgctggacattccttagcaattttcttggccttggcaatgaccttcttaataccgccaaccatggtaaacgactgctctggaaggtaactggatttttcatccaacacaacctggaggcttggtacgtgtttcttcaactcaacatattttcctgggg

SEQ ID NO: 98209 - DNA, 257 bp, Glycine max
  Clone ID: PAT_MRT3847_59697C.1
gcacgagataccagcgaatataataaaaataaaataaaaaattatgtaccggttaatttacaatagggatgttccatctattgtttttcctcagagcttgtgttgttacccctaaatccctattcgagagggaggtctttaattaattattgagtggaatgtttaattttggttacagaattgagttaagaatagtgttatttattatgaaacagttatcgcaagaatcaatccaaaagtcttgcatttgtttttgg

SEQ ID NO: 98210 - DNA, 353 bp, Glycine max
  Clone ID: PAT_MRT3847_59698C.1
attttgacaaaaggaaatttcaaattttaatgtccccgaattttaggggctgatctaatactcaccattagttcatttatcatgcaccaaattcgaagctggtctatggagtgatggtatttcttgtaaattttgcacaattcaaacctcgctaaaacataattataacgctatcacattccaaacttgcgctctttatcatttacatgtgcgaagtgacacctttccctaaaagtgcttgaacctctagcaaagttgtcacacagactgagtcttgaagttgctttgatggccataattcttctcagttaagctttttatttgaggccctgagtcataactaacatttagaa

SEQ ID NO: 98211 - DNA, 205 bp, Glycine max
  Clone ID: PAT_MRT3847_59699C.1
ccctctggttcaaccgcgcgttgaggatgctgggactagtgatggttccatgttggagattaaaatcattcagtctataacagacacttatacatacacagttggaggcaccatcctgcgaagggaggtactatcatattctttgtctgacgacacatgcacaaggcgtgaggacattgagaggactcatcttatgaaaggaatg

SEQ ID NO: 98212 - DNA, 743 bp, Glycine max
  Clone ID: PAT_MRT3847_5969C.1
tgcagtagcattgaaagactaaagatgttgatgggcttatgataatgggtgttgggtttaaacagagaaaattttgaaatgggcttacccatttgtgagtttatttcgcaaggccttgctgcttccctccaagaaattttataggtctcaatcaatcctttgctataacataaagagcctgtttggttgcagcctggaagaacttctaagagcttctctactggttctccaattctcaacttttcggcaagcagtgctacattttttgttggacaaaaatgtcctcataaaaaatttgaaaatgaccagtatgtcctacactctcaattgcacaaagccacgaagcctagctcctctcttctctctcgtttcgtaacataaggaaccctaactctgattctctctcttgggtgtgattcctctgttcaatcccactgttcggttgcaatcgctgctcttgagaaatccttgagactagtcaagccatcaaatgtcagaggacaggggaattggatccacttgatgaaaactacgaacaaaatatatagtgatgaagaagaaaatgaagttggccctagtacaaccacatgggatgctcaaagtgctttactaatggaacaagtcaaagagtcgattaaaaatatttttccagcacgaatttaatttctgtttttttttaattaactacaatacttatatatcttttagttttattggaagacaaggttacatgttcctgtgag

SEQ ID NO: 98213 - DNA, 211 bp, Glycine max
  Clone ID: PAT_MRT3847_596C.1
ttcatggcttttcaaggtccgccaatggacccgggatgctcacacacacatttttcagggccatcgccgcagtcaaatcacgcgccgcctccattttctcctcggggcgaccacgacaaccacctgacgttgcgtcggcgacacgttggcccaacgccccggattcctccctttcccatccttcatttcgaacccgcaaagggacttgcgg

SEQ ID NO: 98214 - DNA, 465 bp, Glycine max
  unsure (1)..(465): unsure at all n locations
  Clone ID: PAT_MRT3847_59700C.1
acatatcttagattatgtctcctnnntatttgatatacataggtgaacgtcatgncnccatacatatgtatatatcctgatgaacatccatatatactatatgttggtctatatatagatgaatatctatatgtatttgtatgccaagagtactttatcacatcaaattgaataaacttttcaatacgcacttatcaagaagaaataaggagatacnannncacatttatcctttaagttaaaaccaagttatgcatctcagcttttgcaaaagctaaatgaacaatcttcctaagaatttgacatgcataaggggattttactctatctgagaagtttgactcatttaattttttttgtatctcttctataggtgctattggactacnnnntccnaattgaaatcatagtccatataaggtgctatcatccaatnngagtgacttcgttacctatcttgattng

SEQ ID NO: 98215 - DNA, 338 bp, Glycine max
  Clone ID: PAT_MRT3847_59701C.1
tactgctgcgagaagacgacagaaggggaggaagcatgattccaacgtttgccgaaaatatataaagggtatggaatagggttgggagggatcaaaacccacaacaccacacggccctgagttattagtcatcgcgctgcgccctgccgagcccagacaaccatcaccaaccgataccaagaacgagggacccgcctcacggcctccggcccggccccccgtccgcgccatccccgtctcccccccaaccgggccatctgcctctgccccccttgccccccctccgcccccaaacccccccccctcccccctccccaaaccactccctccctcctccc

SEQ ID NO: 98216 - DNA, 127 bp, Glycine max
  Clone ID: PAT_MRT3847_59702C.1
ccttacacggattctcaatgttcacgccgttaaatctgttgctaccgacgaagatgattgtttctaatgtctttaagtagtagatcttctgttacatcagttctatctggtattcttttgattttat

SEQ ID NO: 98217 - DNA, 963 bp, Glycine max
  Clone ID: PAT_MRT3847_59703C.1
gtcgacccatttccccagaagcactcaaaagtaaacactcaaaacacttggtattaatttgttcttcttattcttcaatttgttgtgcctctagttcttgtttctaagctaagaatatgtctggggtttgggttttcaagaacggtgtggtgaggctggtggagaaccctggctcagagcgcaaggtgttggttcacactgcaagcaacgaaatcatcacttcctatgcagtgttggagcacaagcttagctcactggggtgggagcgttactatgatgaccctgatttgcttcagttccacaaacgctccaccgtgcacctaatttctctcccaagggatttcaacaagttcaggtccatgcacatgtatgacatagttgtcaagaacaagaactacttcgaagttagggatatgtaataaggatttgtggaaaaaactatgcatggcccaaattgggcagggtatgtataaccttcttgatgtgtctcactcgatttgtgtcaaccctacaaaatttaattcttgggagagcaattttctttcttaattttttcttctgatttttatatctacatgtaatgttggtttgattttgtatttgtggccgtggggggtgggtgtctgtgtctaaatgatggggacattaatttgtgtaatttgtatatgagtttgtggcatgattaatatgtatgcatagagttacggtctgatcggtcggagaatattggtgatcaagcctgaggagtggatgtgatcatttgtgtgtcgtgattgtaaattaatctttgtaatcattctaatcaaagttgtgtttttttagggtgttgactcgttattactatgtcaggcctgggtggcatttacgtgtgttatccgttgtaaaattttggtcattttgcaatcaaaaaaaatttttaaaaaagaagaaaaaaagaaagtacgctccccaggaataaagcaa

SEQ ID NO: 98218 - DNA, 285 bp, Glycine max
  Clone ID: PAT_MRT3847_59704C.1
gttccgatatatagaattatctttgttatggatcaattaaatttttaccgtagttcattgtcgggcgaagtggtggttaacgtgggtgtctgcataattagtgtattcagtctgttctgcacgttctgaagcaatttcgaagcaaaatgatggttaatgtaaattccatgtcgtgattcaattatgggtctttcccagttgattactaagaatagatctacatcatatttgcgacagagccaataaaaagaagactaaactaaaaaaaaaaaaaaaaaaaaaaaa

SEQ ID NO: 98219 - DNA, 640 bp, Glycine max
  Clone ID: PAT_MRT3847_59705C.1
aattcggctcgagctcgagccgctcgagccggaagttggagacactgttggatccaaatttgcttggaaatcgttatatagaggaagtagaggagttaatccaagtggccttaatatgcacacaaaaatctccttatgagagaccaaagatgtctgaggtggtgagaatgctggagggtgaaggtttggaagaaaagtgggatgaatggttgaatatgacagaggatatacaaaatttcaccttcaacctctgcactcctactcctaatgactcaaatccaaatattcaaccagatgttctgtcaggtcctagatgatctttgaacactaactttttaaatactgagacgtttagcaaaggaagagagacgctttgttgaaactaatcgcttctctcacagctgaaaaatgttggtttggtgcaccttataagttagtgagccattattcagtggtgaataagtcttgtgtcttaacatttccaagtctttgatcactgttgcttcagtgcatgttcaacaagtgtttgtcctacattttgaataggtttttcatgaactgtagattctgggttatagtagtctcatatttttttacgtgtaacctggcacaggtaaatggtaattaagggttgtggaat

SEQ ID NO: 98220 - DNA, 605 bp, Glycine max
  Clone ID: PAT_MRT3847_59706C.1
ggctcgagaaacatttgcctctttctctcctctttgatcatcagcatcaacttctcaaggctcaatcaacttcaccagttctagtgaaactgtgaaagtgccagtgttgttttttttttttaagaagctgacatcatcatggacttcgacttcagggctagttttcattctgtcaaacacctctctgctgtgcaagctgctagacttcactctgttcctgtgctctgcagcaatttggaagaggagcattgctctgccctaaaaaatgtggtttgtcccgtttgtgaagaaaatatagggaaggatgcaatcatgcaatttacacattcaagctctcgaaggtgggcgtggaagcctgagaaatctagcatctggcctggtaactccgcaatgcttggcaagaagctggccaccaggggaaacaaacaagaatcaataactgatccactattgtcaccatttatctgcaacgtgcctattccaaactctaacaatttccatccagatgaaaactccaagtccagcaataaggatatagacattcctgatgcaaataggactagcacatttgcacctgatatggtgatgagagggataacaagaga

SEQ ID NO: 98221 - DNA, 250 bp, Glycine max
  Clone ID: PAT_MRT3847_59707C.1
ttcatcattcaatactatattggactataagctttgattcttctaaattcatacgctactcacgctcattcatagcagagagtatggattgctgcatggaatggagtacatgctgaggtgaccaagatatgggtgcctaccccaggatatacatgatactttgtaaccgctcaagactggtcttgcgagagcatgtggccgaaacattagagggtatatggccggcaaccttggtcatgggggaagggaa

SEQ ID NO: 98222 - DNA, 419 bp, Glycine max
  Clone ID: PAT_MRT3847_59708C.1
cttggaaccttggctgatttagtgcttgtcggatgtcacgactcgaaggtaggatccgcagaatgttccggaaaagaccacccggaaagaaccacgaaggacggtcctaccgacgcgacgtagctaggaagccccgaccattgcgcgatcccagaaagcccgacggactgaccagacataaatacgtacgaagtacgttcctagaccgacaaagaacgtagggcctctatagcctacggcctcctagatttagccactttcgccggagacgtactccgagcccgttaagaccacattaaattataagtcaaccactacagaaggagtcgactacctacatatcaactactaagacgaaccagttctcggcgccgcgaattgtacaaaagaaattccggcttaccccctcaacgacgcgc

SEQ ID NO: 98223 - DNA, 1042 bp, Glycine max
  unsure (1)..(1042): unsure at all n locations
  Clone ID: PAT_MRT3847_59709C.1
aaagcatccagtgtcaaaagccaaacatgactcagcaagacttcgcaacttcacaaagccggtggtgataacactgatgggaaagcaaagtccttttttttctcctttgagttgagacctgaacacattttcctttcaccagttctagtgaaagtgctctcagtgtttgtttgaagaagctgactgacatcatcatggacttcgacttcaggactagttttcattctgtcaagcacctctctgctgtgcaagcggctagacttcactctgatgtagataatgatggccgatgtgatttccgatgtccattttgtgattttgaaattgaagttcctgtgctctgcagcaatttcgaagaggagcattgctctgccctaaaaaatgtggtttgtcccgtatgtgaagaaaatatagggaaggatgcaatcatgcaatttacacattcaagctctcgaaggtgggcgtggaagcctgagaaatctagcatctggcctggtaactcagcaatgcttggcaagaagctggccaccaggggaaacaaacaagaatcaataactgatccacttttgtcaccatttatctgcaacgtgccttttccaaagtctaacaatttccatccagatgaaaactccaggtccaacaataaggatatagacattcctaatgcaaaaaggactagcacagatgcacctgataaaggtgatgagaaggatcaacaagagagaaggctgaaggcagcttttgttcaacagttggtattgtcaaccatattcgagtaaatgtgttcctagaatttaaagtcacacagggtatggattagttgcagctccttttcagatagcctctgatgctgattcaacaagcactgagttttattgtgctgtatgtgtttaggggatgtgtagtagtctaaggctaagcaatagttatatgtatttaactatattttatatctttcaattaaatttgtctttggtcccctatataaaagttcgtcaatctgctttcccatttttcctttnaaaaaaaaattcaataaaaa

SEQ ID NO: 98224 - DNA, 1048 bp, Glycine max
  Clone ID: PAT_MRT3847_5970C.1
ccacgcgtccgagaaaattgatgctcgttttgaaaatctgaagattgttctaagactgttaatcaattattttttattacctgcaattactactaactgttaatgccatttgtaaaagtccattattctgactgttactttcttaccattgacttccttattggaatatttccagtctttcagccattgcaattgacaggcctgcattctatggccgcatcttgccagttttgctgagtttggaaccttccagctctgttgttaatggggtctctgtatcagctacacattttgctttgaagaatgcctttcttacttgctcgaaatgtacacatccaagtgctgctccgtggagagatcgtttggcaggggccttgaaggaattgcagtcagaaggaaaggcagatcaggtgttccacctaatctctgctagcaatggaaccatagagagagagaaagatgttcaacctgttatcaaggtaaccaccctctcttcctgggatggttatttatttaatttaattattttcatttgttttggttcttacatacatatttgcactctttaagctggatgaaatattagctgtatgtagggatggaaatgagccgcttgtcaagggcctttggctcggcctatctacagctcggtttgtttactataaaagctaagctcaagctttttaaaaagcttttttagataaaaagaccaaaatcaaactataaagaaacttgttaagcttgacaagccgacttgtttaagtaataataataataataataataatagtaactattatctatatcatttttatagcattatgaatgacaggatgaagcgacataaagtgcttagagagttcacttgcatgtggaaaattttcaaaaagaaaaagactaagttaaaaggataatgcaaccagattaatacttccaaagaaaggatattttgtaaagacattttcagacaatttaaatatttttatttggctatattagtataaatcatctctaatccatatattttttaatattatgctcttttttt

SEQ ID NO: 98225 - DNA, 639 bp, Glycine max
  Clone ID: PAT_MRT3847_59710C.1
gtaaagcaaagtctttttttttttcctttgagttaagacttgagaccccaaaacatttgcctctttctctcctctttgatcatcagcatcaacttctcaaggctcaatcaacttcaccagttctagtgaaaagtgctctcagtgtttttttgaagaagctgactgacatcatcatggacttcgacttcagggctagttttcattctgtcaagcacctctctgctgtgcaagcggctagacttcactctgataataattcagtgatccattacacagatgtagataatgatggccgatgtgatttccgatgtccattttgtgattttgaaattgaagttcctgtgctctgcagcaatttcgaagaggagcattgctctgccctaaaaaatgtggtttgtcccgtatgtgaagaaaatatagggaaggatgcaatcatgcaatttacacattcaagctctcgaaggtgggcgtggaagcctgagaaatctagcatctggcctggtaactcatcaatgcttggcaagaagctggccaccaggggaaacaaacaagaatcaataactgatccacttttgtcaccatttatctgcaacgtgccttttccaaagtctaacaatttccatccagatgaaaactccc

SEQ ID NO: 98226 - DNA, 417 bp, Glycine max
  Clone ID: PAT_MRT3847_59711C.1
gatgctgatgatcaaagaggagagaaagaggcatcaacttctcaaggctcaatcaacttcaccagttctagtgaaactgtgaaagtgccagtgttgttttttttttaagaagctgacatcatcatggacttcgacttcagggctagttttcattctgtcaagcacctctctgctgtgcaagctgctagacttcactctgatgtagataatgatggccggtttgatttccgatgtcctttttgtgattttgaaattgaagttcctgtgctctgcagcaatttggaagaggagcattgctctgccctaaaaaatgtggtttgtcccgtttgtgaagaaaatatagggaaggatgcaatcatgcaatttacacattcaagctctcgaaggtgggcgtggaagcctgagaaatctagcatc

SEQ ID NO: 98227 - DNA, 511 bp, Glycine max
  Clone ID: PAT_MRT3847_59712C.1
aaagaagctttgggaggcaatctctctctggaacccttgggtattggactcgacatggagtctttccctgatgaaggtttgctgccactttctcttacatctctatgcatctataatagtctaaatcttaaaaggctggattacaagggtatctgcaacctttcctctctcaaggaattgattctttttgactgcccaagcctccaatgcttaccagaggagggtctgcccaaatccatttcaactcttaaaatcttgggcaactgtccgttgctcaaagagcgctgccaaaaaccagaaggcgaagactggggaaagattgctcacattaggtttatttatgtgggtagtcatttagtattgtagggttctcttgtgcttcttcgaggatctaggaaatccctgattaattattttccaaacttatttctttgtggttgtagcagccagagttattatatattatgtgcaacgtatttcaaaaatgaattttattccaattttttgcaag

SEQ ID NO: 98228 - DNA, 533 bp, Glycine max
  unsure (1)..(533): unsure at all n locations
  Clone ID: PAT_MRT3847_59713C.1
tatctaanattaactaaattcctttttttctcactatatatccctctccttccttttctttcttttttatccaaataatacttaaattactaaactattaccattacccaaaatctattatccatattttaaaactttccctcttataaatcaaacctaaaattctaaaatctacaacaatttcatacaataacaaattaaaaaattcttaatactaaataaatcttactactaaattaaaaaaataatcaatnattattttaatacatactnatataaataaccttnatananatananctctanattatatanattttancaccctcatattcatatanattcctactttaataatcaactccaaaaatctttaanaaaaatccatatacccttttcattattcctttttttatccatataatttacattacaaacncattttactcatccaattaatttatatccctaaatcttttctcttttctttctatcattntctttaacctcttttcactctcactcatctcctt

SEQ ID NO: 98229 - DNA, 747 bp, Glycine max
  Clone ID: PAT_MRT3847_59714C.1
gtccgtaagctcggtttttggctcgagcaagagattgttctctgccaaagttcaaaccgaagcttttgtttcagaagattagagggaagaggcttatgtttgttggagattcactgaataggaaccagtgggaatcaatggtttgtatggtcaattctgcggttccttcacataacaagacctggtacaagactggttcacttgctatcttcaaaatccaggagccggagcacgttaccacggtggaattctattgggcaccattccttgtagagtcaaattcagatgatccaaacatgcacagcatattaaaccgtataatcatgcctgaatcaatagaaaaacatggagtgaattggaaggatgtggactacttgatctttaacacctacatatggtggatgaacactttctctatgaaagtcctacgagggtcatttgatgaaggatccacggaatatgatgaagttcctcggccaatagcatatgggagagtcattaacacatggtcaaaatggatagatgacaacattgacccaaatcgaaccaaagttttcttcagcagcacgtcccctcttcatatcaagagtgagaattggaacaacccaaatggtataaaatgtgccaaggagatcactccggttctcaacatgtcaaccccattggatgtagggacagatcgtcgcctttttacaattgccaacaatgtgactcagtcaatgaaggtgccagtgtacttcattaaca

SEQ ID NO: 98230 - DNA, 1050 bp, Glycine max
  Clone ID: PAT_MRT3847_59715C.1
acggctgcgagaagacgacagaagggcatgctcaaacagagaatcccagtatggtggaggtggtacagttgggcaaatccaatttcttggagtttgtatggattggtggcttcacaatatggagatataaagcaaagcattgaatccactgatgggagtagtacgacagtggaggactttgtaagaagttactttggtttcaggcacgattttctgtgggtggttgcagctgtgattgtggccttccccgtagtctttgcattgatgtttgctatatcagtaaagatgcttaatttccagcggcgttaataacacattcaagtaatttatataggattgttcatgtaacattttgaaagaaaatatccacatagctttctgtattattttatttatcaattaaatgtatcatttttttatcagaaaaaaccaaatatattaatttggagtgcaagggtacctcaacccatatacagaaggcatatttcctacataactttcacaaatacattcgatttcttgatcattcaaagaaagaaaatgaatatcccttcaccttggcattttacctaaggccaaagatttgaattttagtgtattttaacaggtacagttggtcaaatccaattgcttggagcatgtatggattggtggcttcacaatatggagatataaaggaaaacatcgaatccaccgacgggacaacaacagtggaagactttgtaagaagttactttggttacaagcatgattttctgggagtggttgcaactgtgattgctgcatttgcagtagtttttgcattggtctttgccatatcaatgaagatgtttaatttccaaaggcgttaataacgcagtcacgtattttgtataggatgttccacgtatcattttgtaagaaaatatccacaaagctctgtactcgtttatttttcaataatgtgtatggtagtccgacaatagatagtctatgtaacactagatattattaatgaatgcacatgtcaaggtttatttacttctaaaaaaaaaaaaaaagggcggcaaa

SEQ ID NO: 98231 - DNA, 418 bp, Glycine max
  Clone ID: PAT_MRT3847_59717C.1
atattacataatttttagaatataggaaaatatctcatcatatcttagcttatcctcttggaatagttttcttatgtctccattatatcttagaattagttaccatgtttccttatcatgatttgcttccctaattagttaggattattatttgtataaacaatggtttgtactctaggtttttgaacttatcaatacattgtaatccatctcagttaatacttaatatcaattcagtattttattctcttttatctctcttcctccttctataccttaaaaccataatttcaacaataatgatatgttttctattgacacactgaaagaatacatgtaattttcatgttcaggccaaggaactcactctcctaatgattgatgtcaatccatactacaatcaactaaggattctttt

SEQ ID NO: 98232 - DNA, 279 bp, Glycine max
  Clone ID: PAT_MRT3847_59718C.1
cgggaaaagaggttccattccactgtgagagcatgtcacaagcctcaatgagggttcacagtgttcctaataaatgacctaccaatgaacgataacctgtagggattaaaaatacctttttgctgacgctagtacattttactagttgagccaaccatcgttgacaatgatgttatccctttgattgttatgtcttgactgcattatcccttttgttgaagaaatataatcagaattgtctttttcataactgacgtactgattgcccctcttctccat

SEQ ID NO: 98233 - DNA, 1492 bp, Glycine max
  unsure (1)..(1492): unsure at all n locations
  Clone ID: PAT_MRT3847_59719C.1
cagtaaatcaataaaaaaggatgcgcgcagtgtccagaggagtttggacatttttaaagattcagaaaatcttcttacttgtggaagtggtggacttcttcctattacacatgaattgatgaagtacattagtgataatgccatagaaacaaaaagtcgccttaaccaagcttcacagggaatgctttcaccttctgtgcaagtagccagaatagcaaggctgttcgagaggagtttgaaagctaactcaaaaaattacaataacccttctttgggttatgttttcatcctgaacaatcggagctacatagaccgacatgtggatccgtacggattgggacctattggctatgattggctccaaaaaaacaaaagaaaaatagaaaaaaactataaactctatctgacaaagtcatggactaagattttcaactttttgaagttggacatcaatgaggcagaggctaatgttgcggtcaagttaatgacagacaagctccgttccttcaaccaacactttgatgatatatgcaacgatcagtctacgtggcttgtctttgataagcagttaagggaacaaataataaaatccatagaaaacatcttgttgctagcatatggaaacttcattgggaggttgcaggatcttcttggtaatcatgctaacgagtacatcaagtatggaatgattgacgttcaagatcgactcaacaatttgtttcttgtaagggagtagatgaatcctaccctggaagaaagggaaagaacacagagtttgcatagattctgaataaaaaatatataatctcacagttccaacttccaaagtatgtatactcctgcaatataccaatgtatgttttgacacaatcacgaatggatgtttcctctttatatttttgcatgttttaatatttcnnngatgaaaaaacaaaataacactgctcgtataaaaaagtacaaacatccaaaattcaccaactgcgaaagtaattagctcagtcaaccagaagtttaccatggatgagaatgcaacccattttgggttcaagttacttttttatattcctttaccaatctaggcaagtgttccacggaaataccaggtaatgagaagtactttcttggaatggagagtgaatttgagatgactgatttgggtcaaatgaagtactttcttggaatgtagattttccaatcagaagatggaatcttcatttcacaaaagaaatatgcttgggagatcttgagaaaattccacatggaaagatgcaagcctattgctactgtattggttgtgaatgaaaaattctccaaggatgaagaggacaaccaaggggatgcatctgtttatagaagtctgattggaagtttgttgtatttgtctgctaccagaccaaacttaatgtttgctgcaacattattgtctagattcacgaaatctccaagtcaagttcatcttggttcatcaaagtattctagttataaataa

SEQ ID NO: 98234 - DNA, 334 bp, Glycine max
  Clone ID: PAT_MRT3847_5971C.1
gcggcgcgtgcgcactgctgaaagaagaccacagagggggaacaagcgcactctcctcaggggaggaggctcagcactcgctccgcattatttcaaggccgtcacttagcagacatcgcataaatcaaaaaaaagcccagagagagagagagaatactagagagaagaaactgaaggaagaagacagcgcttgtttgtgtgaaacaaagagaaatatagcatgctgagtgagaaccacaccaaccagttgggggtgcataattcggtgagccttgacttgacatccatctgtcgacgaagacgaaaagatgtcaaggtctgctctgtcaacctt

SEQ ID NO: 98235 - DNA, 429 bp, Glycine max
  unsure (1)..(429): unsure at all n locations
  Clone ID: PAT_MRT3847_59720C.1
gccttgtgttgggttgggagtatttgtgttttttgtgtggtggatggtcttggttggtgggggtgtaggctgtaggatgttggataagggtgttggggaaatgatgcttgtattgatgtttaatgtgtgagtaaaattgaggtatttatttgtcgggacagtggctgttgagcggggggtggtaattacttatgtgctagatggataattgntgtgtttgaacggttcttggttctcttggattgggctccgactgtagcatcttgtttggtgggtttgttaatgatgcatgagatgagatattagtttgagagtttcattttaggattgatgtgtgatcttatgaggtggtgctgatacgttgaggtttttgatgagacggattatgttatatggtgggtggtatagatgttttgagacttcaaggaa

SEQ ID NO: 98236 - DNA, 513 bp, Glycine max
  Clone ID: PAT_MRT3847_59721C.1
ctcgagcctaaacaacaacagtaccaccgtactttcttacaaatcatgccaacgccactccaatttgggaggaggcctctatgtggatcttatgatcagcatattgagaatctttagacgaggataggagttttcattagggtctatctgaacgtaccttatgatgacaaccttaacatgaccgatgacactaaaatacgccctgctgtttcaaccatctagtactgacatgtgtattgtgacaaaggcacctgtatggacactcggtacttgctatatgttcagagacatatagcaggagaaacacgatactatgttggttgtaacacaatgatggcaaaaaatgtacacactgattatattgatattgggtcaggacataagatctgttccttcagagctcttgataatttcttatctgaagaaaatgcatgtacaacatcacctaaggctgcagtgaaatcacgcactggagagcaaagagctttttgtgtgagaaatggccaaaaaggt

SEQ ID NO: 98237 - DNA, 902 bp, Glycine max
  Clone ID: PAT_MRT3847_59722C.1
acgagccgcaatcttgtaaagcttcttggatgttgccttgaaggagaggaaaaaatgttggtttatgagtacatgcttaatggtagctaggactcatttatttttgatgagcaaagaactggatcgctgcactggtcaaagcgcttcaacattatatgtggaattgccaagggccttctctatcttcatcaggattctagactaaggattatccacagagatctcactgcgcgggttgtcttgcttgtctctgagttgaaccccaaaatttctgattttggcatggctagaatttttggtgtagatcagcaagaaggaaacacaaagagaatagttgggacatacggttacatggcaccagaatatcccccggatgggctattttcagtgaaatctgatgttttcagctttggagttttactgctggagattatatcaggaaaaagaagtagaggatattacaatcagaaccacagccagaatctcattggccatgcatggaaactatggaaagaaggaagaccactagaactgatagataaaagcatagaagactcgagttctctatcgcaaatgttgcattgcattcatgttagtctcttgtgtgttcaacagaatccagaggataggcctggaatgtctagtgtgctcctaatgttagtgagtgagcttgaattgcctgagccaaaacagccaggattctttggaaaatattcaggtgaagcagactcctccacaagtaagcagcaactaagttccacaaatgaaataaccattaccttattagaagcgcgttgatacattctttgctagtcacattcatcatctactttgtatagacgcattatattgtgttagactcaaggtcaaggactatattctctcactcaaaaaaaaaaaaa

SEQ ID NO: 98238 - DNA, 490 bp, Glycine max
  Clone ID: PAT_MRT3847_59723C.1
gtcattactatgtgcatgtgtctctcgtaggtacggctagacgagccggtatgtgcaatgtctaaggaatgtgtgtgtactgtatgtatgtatcggtacggctcttaaccgatcaccgtgtctgccccaaaaggctttcgccatctcaccctctattcatctattctgctcccaccaacacctattgcgcaaccagctcggcaatctcgccattcctatccgcacgagccatcgcgtcgagggcctgtcccgactggatgcgcgagatgaccccgggtcgaatctcgggctccgtcttgacgatcctgtacacctcggaaggcgggagggcaagcgtgaacgggttggcctgaatggcatcgggctggaacttgggcacggcaggcttgattcgtgcgcggatcgaagcttccgtggcgcgagacgaagaagatccgaccgaatcggcgagcgaggccaggtcgtccgaagacgaggcggccgacatggc

SEQ ID NO: 98239 - DNA, 376 bp, Glycine max
  Clone ID: PAT_MRT3847_59724C.1
cccacgcgtccgctccctgttctatttttccggccatagcctacccccctgggggtgtccttggccctccacgtaaaacccacgctagctcctacctttattttccctatcaacatgcaccacaggccctcagtcacaggtcattgtgcgcacccatacaggcctgagcaacaccggacgcaccccatacactatgatcatcatcagctaccatgaatctcctcattatcccatatgcgccaattcctaataccacacttgcacacagacctcaatgtaatctcaaactctaccaaccctgcgtactctctctgcttgcatagacctcttcggcgacattgatgacccaccatccaagccatgaactctacccttt

SEQ ID NO: 98240 - DNA, 221 bp, Glycine max
  unsure (1)..(221): unsure at all n locations
  Clone ID: PAT_MRT3847_59725C.1
acaaaaaagtactcgcatgaaacaaatttgcgtacctataaaattcaatggagncactaattgcatcgcacgtttacacacttgaaaaccaacccatatggaaaaagaaccctggcaggtgggacagaatgcctggacaccagctcttacctatgaccggcatttggcacatgacatgcatcaatagtgacatggcttctgaacaaaacccctagcgttgt

SEQ ID NO: 98241 - DNA, 442 bp, Glycine max
  Clone ID: PAT_MRT3847_59726C.1
ggggcccaatgactcgatcccctcgttgcagctataattcgcggaatcttaacccaattgggtaatagaatattcatttccatttatcttccaagttccaacaataaatagatactacactacaaaattaggttttatcacttttacttttatcttttccatagtatttgttttttttttctcaggggacccaatactttagattcaaattctaattttagtaaaatctaagagctaataagggaataatatattccattaataattttaatagggtgttagggcaaaatatttgtattgccaactaattataataattcacgattaaaatattatacgaccatgtaaacaaatattaattattagtttattctaataaaatgcaaaataattttaaaaaatgttatatctcacttcgaaatctatgtctctttataaatac

SEQ ID NO: 98242 - DNA, 659 bp, Glycine max
  Clone ID: PAT_MRT3847_59727C.1
ttcctctgaaatctgaatgctaaacggtgaattgcgcctcttcttccattgcgtcatgcgctgtcgtcgccgctgcccctctccaccacttccctttcactgttccacgactttgttgaggatgaagaaattttttcctgtactttctagagacaaagctacttctttagtaaatctagaagcatcagaaactcaacatccaagtgagagtattaaagttgttgattatgaattgttggaaacatatccaggaattaggcctccaatttcaagctaccatcctgacatccaaaatgagatgtgccggaagtgatggtgcgacatcagcttcagaattatgttagaaatgttcgatgtgattccaaatttgcaaaattaaaagtgcaaagcttgtggaaacaaaaaagtgcaacacatttgatatagtttataggcttctgaagttggctttagtcttgccggtagcagctgcaagcgtggaatatgttttttcagctatgaagtttgtgaagagtagctatgtaacaaaataaatgattaatggttaaatgattctcttgtaacctttatagaaagagatgttctttgaacaatcaacaatgatgttattttagctcattttcaaaaaatgggtaataaacgatttatattgtaaataa

SEQ ID NO: 98243 - DNA, 431 bp, Glycine max
  Clone ID: PAT_MRT3847_59728C.1
cgaaaacggccacacgatgcagtctcaggctgacctcttgctggaccaagtgctacaacgcactcgtctgcactcataggcaaggtcacgatcggaatcaacggattcggaagaattgcccgtttggctgaccacaggtcggtctgcgaagagacgatgttgaactcgtagacgttgacgaccctttcattaccaccgattacatgacatacatgtttaaatacgacagtggacagggacactggaagcgtcacgatggcacggttagcgacgagaagacccttcacttcggtgacaaggcagtcactgctcttggacacagagaccctgagagagatgccatggaggtcaactggagctgacatcattgttgagtccaccggagctttcaccggtaaggacaaggctgacgcacatttgaagggtggggc

SEQ ID NO: 98244 - DNA, 546 bp, Glycine max
  Clone ID: PAT_MRT3847_59729C.1
atgcacgcaatacttcttatcactgtcattacattcaggttgagggctagtgcatggtaactatcttataaacacgcaatatgtacagggtggctctctgctatgagaaaccaaaaatgaaacttggctcataatcccaactttctacacagacgcatgaggcacaccaatgacccaggagggcgccctgctatttctgattaggaattcatacgctaaattagtgcctatttatcttaaaaatgctccgaccctggttgcgctctcatgaccgtcaggcctataaagaaaactaccccagcctcactgactttcattacctcctacaactcttccattactctggaggaactctttggactttttggaaccaaaaaccttactgtgttattgtgtggcaggggcacctgacaggactacacctcctttagtgctgagggccctggcaggtctacatgctcaacattatctactgtctcctcactcatcactaggggatgtgtagaacctgtccgtacccctgccattctgtaatcctttaggggc

SEQ ID NO: 98245 - DNA, 292 bp, Glycine max
  unsure (1)..(292): unsure at all n locations
  Clone ID: PAT_MRT3847_5972C.1
aaaaaaaaaaacaatttaatctattaaaaaatggaggaaaaacataaatacttcatgattatgataatcagtaacgaaagagaggatagatacacatgcgaaagtcaataaattgtgaaaaatcctcgatacacttgtctctcctaggaattcattctaatgtagcactaatcaaaacccatgatcgatgaagaatcacatgctcctctttcttcctttgaatctcatcagggtagcacaaaaaaaaacccataaaaatgaccccgaaaagaggggggggggggnngggggg

SEQ ID NO: 98246 - DNA, 430 bp, Glycine max
  unsure (1)..(430): unsure at all n locations
  Clone ID: PAT_MRT3847_59730C.1
gaagcactccgcccacgcgnccgagggccagcagncactgctctgccncaccgagcnagggcagcnagatcagaaccaaatcgtgttctcttccattggcaaacatggcaactcaaatgagcaagaagagaaagtnaggagcgacaccttcagaaanggggtggtacagaacgaggggnggacacgagaanaggaggacgacggnnactccggcggcgaagccccggatacgccgacgcgcaccgagagcagcagcagagccaccagaacccaagccgggccaggagagaagggaaggagaaccagggaacgcaccgcagaggagcagaagagggccaaacgccccgaaaacagcgncgagccccaagccgagaagggcaacaacagaggcccgagngccacagcccaggccgagncgcggcggcacaag

SEQ ID NO: 98247 - DNA, 1262 bp, Glycine max
  Clone ID: PAT_MRT3847_59731C.1
gtggattagttcaccatccatgcaggagttcttctgagatacgttccattaacggctaagcgcatgacaggaatagtctcaagaggagggtctattcatgcaaagtggtgcttagcttatcacaaagagaattttgcttatgagcactgggatgagatacttgacatctgcaatcagtatgatgtggccctatccattggtgatgggctaagacctggatccatctatgatgcaaatgacacagctcagttcgccgaactcttgacacaaggagaattgacccgtagagcatgggagaaggatgtacaggtgatgaatgaaggacctggacatgtcccaatgcacaagattcctgaaaacatgcagaaacagttagaatggtgtagtgaagcgcctttttacactcttggtcctttgactactgatattgcccctggctatgatcacatcacctctgcaattggtgctgcaaatattggggcacttggtacagctcttctctgttatgtgactccaaaagaacatcttgggttgccaaaccgggatgacgtgaaggctggcgttatagcttacaagattgcggctcatgctgctgatttagccaaaggccatccatatgctcaagcttgggatgatgaattgagcaaggcaagatttgagttccgatggatggaccagtttgctttgtcattggatccgatgacagccacgtccttccatgacgaaaccctaccggcagatggtgcgaaagtggcccatttctgctcaatgtgtggccctaaattctgctctatgaagattacagaggatgtgaggaagtatgctgcggaacatggctatggaactgatgaagctttgcagcgtgggatggatgctatgagtgctgaatttcaagctgccaagaagaccatcagtggggagcaacatggtgaagctggtggagagatttacttgccagaagcttacgttagaaccaagaggactacttaatggagcaaatcagttggaagaacttgtagctagcttcccaactggcttatctgagtgtggagaagcattatcaagccttaggagtaggagaacgagtactgtttgtgatgaatgtctatggtttaagaaatctgtctttagtcaacttgtgtgttttgttattcagttctcagcaataaactgctctggcaatctagtttcatgttccaaaaaaaaaaaaaaaaaaaaaaaaaaacaaaaaaaaaaaaaaaaaaaaaaaaaaaaaaaacaag

SEQ ID NO: 98248 - DNA, 1556 bp, Glycine max
  Clone ID: PAT_MRT3847_59732C.1
gcccgggcacaaaacgtagcaacagcagttacaaacgttcagtgttgttttttcaattcagattcagaaggagacgatggaagaacccgtgaaggaacagcccctctctgctgggaactctgcgcgacccaagcttcagagatacgcgcttcgttcgtcctctaaatccaaggaaaacaagcaagacaccgcacccgatctctccatttcttctgaatctaagagggggttaagtactccacacgtaagcagaagtgtaggtggtcttgatttctctggcaacaaggataagtctactagtgctaaaccaccaagaaggctctccaatcctgtgaaagcagcatctcccactccaaaccctaagttggttggcaacattaccccaatctcagagagcagaacaatgaggtctggtaaaggtcaagtgtctcaaagcagaagccagacaccggcctctgacatttccagaacatcgagcagaatgaagttcaatctcttatcttcctcttcatattggctaaaccagatcaagctctctgagtctgctgataagcacacagtttcacttggattcttcaaacttgcctcggaggcaagatgtgagccgttccagaagatgaaagatgagctaaagtcttatgtgcaacgacatcagcttgctgaacttggagaagtgaaagagctgcttcaaacctatgacattgctgaaaatatagagcagccacaagtgtctgagagcatttcacaggtgccagaagagggaactcgatcctctgatgatgaagaagttcactgcagttctgcatccaccatggagactgtaaaactgaaacccgaacccttggacactgaatccactgaacctgctcctgttataatagagtcaaccaagaaggaaactagccaaaagaaaaatcccttggacactgaatcaactcaacctactcctgttaaaatagagtcaatcaagaaggaaagtagccaaaagaataaccctggatccaggttgagagaaaatctcaagaagaactctgcaaattcaagacctgcttctgacaatgggagttctaggttgtttaaaaaaccagaaaaaccaactaagcaactaaccaataagggaaaaagcgaggtcaagaaagaaggaaagaaatctgatgttattaaagctccaatcagccctacgcatgctgaaaataataatgcacagggaaacaaagaaaatatggatgttcagaccactgatgagatgagtttgacagaaatcgcgtaaacaagctgaatttttacattctcaaactttttctatgttttatgtgtgtgcagttgtgcctctctacaggaaaacagatgaaaattgttttctcaccgtttgctttccaaggccgcattacatttcatttaatcagctggaaataggcatgttttgtgcttgtaatgtgtaattgttaatcaaaccaaactaaattgaatattctggtttgtcttgtctatgcgcttttataatagtatatgcaaagacttagatttatgacataatttgcgagtttcgttaaaaa

SEQ ID NO: 98249 - DNA, 691 bp, Glycine max
  Clone ID: PAT_MRT3847_59733C.1
cgaggagattcagcaattgaatgaagttcagacagaagctatggacgcagattctgaatatcgtgaaaatagtgattcttcatttgtttgggatgagaattcacaactttacttccacgccagtagtggattctaccatgaccctaatgctggctggtactatagcaacaaagatggtgcttattacaaatttgaggatgggaattatgtgcttttaggtaccaaagaggatgataatgtagaaatgtatcagtgcaaggaaactacaaaagaaaatcctcaacaaatatatgatggtaacaacaatgaggatcacccttccttccttgaaagtaaatttgaaactaaccaacagataggaaccctggctgatgaagcgcctgctgataccccaaattccgtgagtagtctaacttcttaagatcctcctctaccaccatcagaatggttagaggacacgcttatcgatctttacttatctggctacaagaacatagatgggagtgaagccgatgcagtgacagtgccatttgaaacagatgatagatataactcgttagcagctgatgcttacagcaaaacttacgaaggggaaggcgagtggatcctagaaccaggagatgaaaatggcttagctgataatagaagtactgtggatgaaagtataccttatagcaacacttatgaactg

SEQ ID NO: 98250 - DNA, 382 bp, Glycine max
  Clone ID: PAT_MRT3847_59734C.1
acctcgcgtccggttttagagagagagagagagagagattcagaggaagagaaaaacgtgtggttatgtgattgaggaagagagaactgagaaggcattgccaactctcccagctaatatgaggccaccttcggtagagattgtttcattttcataacatagaaaactgagctctaaccttatgagtgcatggcgtggctgatacattactgtattcttgcaatctatctattccgcttgattacttcggttcatgttaacatacccttttgagtgcctaccctgttggctgaagttatggacgcaataaaattatgatccacaacatatgaatgactggactgttacctcacacatgaggagggcatgcactctactcata

SEQ ID NO: 98251 - DNA, 513 bp, Glycine max
  Clone ID: PAT_MRT3847_59735C.1
agtactgtagtctgacttcattgcggagcggccactcatcaagaaatgcacctgatcatacgagtctccggcagcatgattgctgcaaaaattaaaaacaggaaacgtacacttgggacctctctttaattaaaaccactgaaagatattaacctacatttacatgatctgcatatatattctatacattatggtagggtccagttttcctttgagaagtctttatacgtacgttacactaaactcaagaaaatgaaagttatatccccccccccccaaaacaaaaaggaaagttatagtgtacttgagtggcacttgattttatatggtaccatttgcgcaacatattcaggtagatgtaatagcttttagctcctcttaagtgtttctttttttttttcattaattagatttgtcaaaaatttagaacataaaaaaatattttatattacagcaattgtgtagaaactatgcttatttgagtcgaaactaatattaataagaggtgatcat

SEQ ID NO: 98252 - DNA, 1723 bp, Glycine max
  unsure (1)..(1723): unsure at all n locations
  Clone ID: PAT_MRT3847_59736C.1
ggaaacatggctgcttcttcttcttcttcaatctcaaacatgctcattattcccttttccaaaacacacgaacccatcagcttcagcttccaattaccacactccaaattcccaacatcatcacctctcacacgaacgcaacaaaagtcaatgaaactcgtcacacgtgacaactcctcacccaccatcggtgagctcgtgcgagaacaagaacaaacaacaacgcaccacctcggctacgccgtcacgcgctacctctacgccaccgccaacatcaacctccccaacttcttcaagcactcccgctggtccaagatgtggagcaagcacgccaactgggccggatacgtcgccgtttccgacgacgccaccaccaaactcctcggccgcagagacatcaccatcgcgttccgcggcaccgtcacgcgcctcgagtgggttgcggatctcatggatttcctcaaaccaatctcatccaacggcatcccctgccccgatcacaccgtcaaggtcgaatcagggttcttagatctctacacggacaaagaggcagggtgcgggtatgctaaatactccgcaagagaacaggttttatcagaggtgaagcggttgatggagaagtatgcggacgaggaggttagcgttacgataaccgggcatagccttgggagtgcgatggcgatattgagtgcctttgatattgttgaaactggggtgaatgtggggaaggatgggagaaaagcgcatgtttcggtgttttcgttttcggggccgagggtggggaatgttaggtttaaggagaggttggagggggagcttgggattaaggtgctgagggtgcataatgctcatgacatggtgccacagtcgccggggttgattttcaacgaggattcgccgcagtggttgctgaagctggtggaggggtggtttccgtggtgttacttgcacgttggagaggagttgcagttggaccataagaaatccccgtttctcaaccctgacggggatgcttcctgcgcccataacttggaggctcacttgcacttgctagatgggtgagttatagtacattaatagttagaaaaaattatatttttggtctatccctttatctctaattttaaatttaattcccactaatttaattcataaatttcatctttctattttgtgaaattgtgcaatattaacacaattaaatattgattattaataagtgatgttgataatcacatgtcacctttttattgaatcatgactgtcacgtgtcatattctaattggtcaatgaaaataacaatgtatttcatcttttatggagttgacatctaatcagaacatgacacgtgaccgtcattatccaataaaaatatgacatgtaacagnttaacatcactcactaacaatcaacatttagttataacctagagttacatgattttataaaataaaaaaactaaatttataaaacatttagttataacctaaagttacacgattttataaaataaaaaaactaaatttataaattaaattagtggagaccaaatttaaaattagagataaatttagaaatgaaaaatataattttatgtaatagttactattcattattcctttttttccttattcaattcannngtcacacacgcactgaatataatgagtaatgcaataaaattatacataaaataaangcaaagtgaaagaaaaagtactga

SEQ ID NO: 98253 - DNA, 469 bp, Glycine max
  Clone ID: PAT_MRT3847_59737C.1
ctcactgggatggggtgcagtgctagcctcatttccttggacatcataaggaacattttcaagtcacaaaagaacaagattgctcttttggtgacttccgagtctctaagtccaaactggtacaatggcaacgacagatcaatgattctcgccaactgtttgttcaggacgggtggatgtgtcattctcttgacaaacaaaaggtccttgaagcaaagggccatgttcaagttgaagtgcttggtgaggactcatcatggtgctaaagaagatgcctatagttgctgcaatcagaaggaagatgagcaaggcaatcttgggttttaccttgccaagaatctccccaaggcagcaacaagggcatttgttgagaacctaaggatgttgtcacccaaggttttgccaactagggagcttctaaggttcatgattgtgtccctcataaagaaactgagccaaactagttccc

SEQ ID NO: 98254 - DNA, 371 bp, Glycine max
  unsure (1)..(371): unsure at all n locations
  Clone ID: PAT_MRT3847_59738C.1
nntnttgttttttttaaaatttttttggtttaacaaaaaaaaatttatttttatttctaaaaataagtatacctacaacaatattttttacaaaggtcaatgttttatcacaaatacttgccccccacaagcatttatccatcacacaacatttaaagactttgattttggagccataaaagtccacccccaaaaaaatattaactaccggacaaaacccctttcgaacttgggataattccaccgggacctggatcatactctgttgcttttccaaaagccccagcaaaaactttgaaaggtgcctcaataatattatgagaatttttcccaacaagcttcttaattttaagtttcataccaaacctttt

SEQ ID NO: 98255 - DNA, 289 bp, Glycine max
  Clone ID: PAT_MRT3847_59739C.1
aaaaaaaaaaaaaaaaaaaaaaaaaaaaaaaaataaaaaaaaaaaaaaaaaaaaaaaaaaaaaggaaaaaaataaaaagaaatcctatataaaaaaatacaaagcttaattacacttacatacctcaacataaactcattctataatataacctaatttaaattatctaatcctcatttaaaaacattttaactatcaaaacatagacataacagagctaaatgccatcgcaataaattatcgttatgtcagttatcctaatactcaacaggcccatacgcaatattct

SEQ ID NO: 98256 - DNA, 377 bp, Glycine max
  Clone ID: PAT_MRT3847_5973C.1
tggggttcgagaccacatccagaagatcgtccctgctgtggaccgtaacgccaacccttacatgttcgttggaaagaatctcctcgcaggtggtatagccggaagcattacttcttgtattgtttaccccctggactttgctagaactagactcggagtcgatgtcggtagacaagccggcgagagacaattcaacggagtcaaggactgcttggtaaaaacgtatcaatctgatggcattaagggtctatacagaggtgctggtgcctctataataggaattttcatgtacagaggcctttacttcggtgtatatgacagcggaaagcccgtggtgataaaggagggcgactctatcgtcaagaagttcttcttcg

SEQ ID NO: 98257 - DNA, 327 bp, Glycine max
  unsure (1)..(327): unsure at all n locations
  Clone ID: PAT_MRT3847_59740C.1
cccacgcgaaccgcaacgacggaaaccaccgaacnngnncacgagaacaggaagggcaccaaacagaaggaaagacaaacccaaancngacaaagacgagagcaaaaccaacaaccaagagccgaaagcaggggaaaggcgggggggcaggggaggaaacaacggaaaaacccaaaccggnggngnnagggcgaaccgagagggcacagcaggggccacaaaggacaagagacaacaagccaagnacaagcggcacccgcacccaagccgcagaaagccgaggaggggcccggcagggagaggaaagccacccggagggaagagcca

SEQ ID NO: 98258 - DNA, 388 bp, Glycine max
  Clone ID: PAT_MRT3847_59741C.1
aaatacgctttatggtttttatttattgttttttgggattcgggcgttcatatttttctttactaagctattaatttgatgaaatctgtacaataacaagggccaccagccaagtagtgataccatagtactacactatcagcagagatattgttcaatctcagtaatgagtctgaaagaaacggtataatgcatcccaaggtatatagtggttccgtaaactaaaatgtggtgcccgagaatctaagctaggctacttaaagtcattttatttaaaatagtctgttatcatctgagcactgactccattacagggaagctcatcttcaatagaactgcatatgcataacctatgagcagacgggacacgctaggatggtgggggcat

SEQ ID NO: 98259 - DNA, 259 bp, Glycine max
  Clone ID: PAT_MRT3847_59742C.1
ggctcgagcaacacccttcttcactcccttttgattttaaccaaaacaccaacaaacaggctgtgcaaattaaaaacgttacatgcaccacacacaactatctttaccaatttctttcttgttaacaatccacactagaagtcaatcactattcatataacatacatacaacatattcataccatctttccaaattattgcaaccacctaactaaatcacacattactaacccaacattattactaaaaaaactacttt

SEQ ID NO: 98260 - DNA, 125 bp, Glycine max
  Clone ID: PAT_MRT3847_59743C.1
ggaaatcgttcctattatcacttctcaaatctaccaccctatcgttcgagccgtgcactgcgtcacacttcatcaatggcgattcagtggcaaaaccctcatgatccaccgcccataagaaggcc

SEQ ID NO: 98261 - DNA, 275 bp, Glycine max
  Clone ID: PAT_MRT3847_59744C.1
taaaattactcagtctaacattgctcttccctagaacacagtttgatgagctatcctgcgcagtgatccgattggcagatttgctgacatggggccattttacagctcgtgttgcattgcagcgcactcatcgtgattaacggaatgattacaatggtggccacagttggtattcctgagaatacacgtatatcattggcctgtgctatgcatggtgcttccagggggcgttccagttctgatattgacaccatctgctcttcagactgtgagtt

SEQ ID NO: 98262 - DNA, 481 bp, Glycine max
  Clone ID: PAT_MRT3847_59745C.1
attttctgacacctccgtaaggtccggtccacctcaattcctccccaagaaaaacaccgcctcacgtgtgaaactcacccttgacatcaaagtcacttgccgtgacttccacaaagactcctccaccctccgcctccacggtcgcaacctccaacccaactagcacgtccctgccggctccttccacaccctcaccctcaccctcgaacccctcaaagactcctccatcccccgactccaccggcctccaccacgatccacaccagatcgtatggcaccagcatcagtgtgtgcatcacaccggtcaaatgcagcgtctggaacgtgcgaacgtgcgtcggcatcaccgtgatcgccgtcctagggtttttcactccgaatagcgcccctactctttctgcactctctcgatatgcggtgcgccttcatcacctccccgagatccgaatgcggccacggccggattcggataccgtgccgc

SEQ ID NO: 98263 - DNA, 1651 bp, Glycine max
  Clone ID: PAT_MRT3847_59746C.1
ccactttgtgtgcttttcttgcactttttttttttcttcatatgtatttttttggtattttacggttgtttcatatatattctatttcttttttttattctacaatgttcttctgttgtggtatttttttgtatctatcattttcgaagcgacaagtaatcaatacaaaactagaatttatacagatatgtacaatagtacaaggcttcatactgtaatataaagaattatacgtaagtaacaagagtaatatatatcctatacaaactctaaagaatcaaagaatgatctgctgttcattgttttagcctattctgatgaaaatctacattgcctcacataacaacatacagttacgtatatttaaggaacaaggtgaatacacatgtagggataggcatgcttgacattatggctcttaaaagatggtgctcttaagaactgtggtttctgaggaaatgacctttcaagcaaaattcgcaagggatcaaaatcatactcgtagcatcgcttccgtgtttgtttatccattttcgtgtaatcttcacaccaaaagctttggtatcaaatgtgcaatttaggaagaatgatgatgagagtcatcattgcacatgcactcaggaacaggatacttggtgacatccctcccagacttgctagtcctgagttctggctgacctaatgaatcctgatgcaattccttgataatcctattgaactctttttcagggagggaagaatttagaaaataggggagcatctgtcttttgtttggtgttatatggggttatatacgtacttgtgccctgccatatgctcgatgaccctgaattgcatggcccatatttcccccatgagatggcatgaaaacatcactcttctcagagactatgtaatctatggcagccattagagaagctttatttgcaaatggttgtagttctcctggcaaggcaagatcttccttgctataaaaatgtggaaactcatggattaatggaagcaaggctttttttccacccaatggttgtcctccagcccagtaaattcttgcattttttggagctcctagacctttcaaaagcctagtaacctccacagcattcaaggggcatagaccagccattttcctttcatggtaagtcatgtttgattttgcagtcaagagctccggccgttgtatcctctcattgttaacaatctcatcaaattcgggactcaaaccggggaggcatccggtcctcacccacacatccttttccattcttagatgaagagcaaggtaaggtcccttgcttttcattctctcagcaatatcgttaccgagttcctgaacaggctttgcaaaccttaatgcctgaaaagcaaccttgcatcgaagcttctgaagatcgggaggaagatcctttgttagcctcgaatccaatccacgtaaaagcaagacaccttctctgttgaatcttctgagatagtgtgaccgaatccaactgggagtggcatgagggagagggctcccctccactggccttgtcattaggtgtgttgatggtaatgcagaaaccacccgcacatcattgacaagaacactcttgaagtgctccaaatcgaatatatcagcaaattcactttcatctccccaaatgaaaaagtc

SEQ ID NO: 98264 - DNA, 611 bp, Glycine max
  Clone ID: PAT_MRT3847_59747C.1
cccacgcgtacgttggcgttttccacaaaccgacggtgtatctgtctctcacaagtcacaagacttgcttcccactcgcaccctctctctctcggcggccgtcgaatctttttccgcatccgaaacctccgccgtatccgcctgtgattcttcaaccgcatggatcggccggctaccggacctggggtggacatgccaatcatgcacgagagcgaccgctacgaatactttcgcgatatcagatccgggaattacagcgtctcaaggcttatgagggataaccctacgccagagctagctgctgataagtatattgaacgccgtgataagattgatgaaaatgtcataagagaaatcattaatcacaggtctataacacatcctagcattatcaggtgtaaggaggtcattttaacgcctactcatctgcgccttgctatggcatatgcatctggcggagagctataagagaaaatcagcaatgcatggcattgaaatgaggatgacgctcgatacttctatcaacagctcatatctggggtcagctactgtcatgcaaggagagtgtgtcaccgggacctgaagatggaaaacactatggtggatggaag

SEQ ID NO: 98265 - DNA, 1130 bp, Glycine max
  unsure (1)..(1130): unsure at all n locations
  Clone ID: PAT_MRT3847_59748C.1
caanacaaagagcagaagctttggctgccttaaataatgcattcaattcatctcctgagacaacgtccagtgcggataagttgaatgggttaaatcgaggtggaccgagacaaagggcagaagccttagcagcctccccctccgttttaattcatcatctggaaccaaagtttatactccaaggccatctggaagaggtcaaggatcacaaagagcagcagcagtagctgctctctcttcagttcttactgctgaaaagaagaaaacttcacctgaaacttctcctgtggctagcactagtcctgtngtggaaagtggcacctttgacactgaaagtgaaagtgccccttctgaatcgggngttgttgaagangttgcctgtggcggggagacagaagttgttgcccttgaaactggtgccaatggggattcagaacaaccaaaacaagaaaatgtggaggatggaggaaatgacagtgaaaataataatcaaaatttcttcagttatgagcagttaaagaccaaatctggtagtgttgtgtctggaattgatcttaaacggagagaggcctatctgtcagacaaagagttccaagctgtatttggaatggccaaagatgcattctccaagttgccaagatggaagcaagacatgctgaaaagaaaagtggatttgttctagactcagacacaacaagcaacatatatgttgcttttgcatcctaatatatcttgagatgcacttatctgttgggtagtgtggctttttttgctatatataccctacttggattcctatgcatagcactttgcttttggcccataatggacttagctatatatggttagtgtccaagtttgaatgtgacgctgccttggagagtgagttttagttttcttctttttaaattgagcatgcctcttcttcctcatgtaatgttcacatattattgtagcaataaacacagtggacaggttcaattctttcattttgtcaagtttgtattttaaaaatgtggctttttttgtttttatcccttgttgctattggttagggaggtgggtgtatatgtattgcatgttatactgaatctcaatataaagaatgaaacttcgtttgtttgttaaaa

SEQ ID NO: 98266 - DNA, 631 bp, Glycine max
  Clone ID: PAT_MRT3847_59749C.1
aattcggctcgaggttacaaattaggaaaaaaaaaagccacaatcaagtgtcatttttctcccttctcattctatttattcaagggtgggagtagtggttttttgtgtgttttctttcctttgtgcaacaacaacaactgaagatgaataagcatcaagcgtcagagaagaagaacgataacatggagaagccactaactccattgatgcctcctcctcctcccacacttgaaaggacaacttccattgatgatgagcctaaaactttgcttgaggaggagatgaaagttgcaagggaggcagctctcaaaatcatcaattctcactcaaaagaagatgccctgaaaatattcctggcgggtttggtgccagtgggaacaagctcaaagcaggtgaaagaggatggtgtcgtgtctgactacgatgacgacgacgaatgaagcattattcggttggaatatgatggtcctgtggaaagctgaagctttaattaggagttcttatgtgtctgttgttttctttgttttaattagaatgtgttgcatgtggattaaataattactcctaagtcctatcaaacagtttattaccttcaattgggaatgttattgtcttgtgttgatctgaaaaa

SEQ ID NO: 98267 - DNA, 333 bp, Glycine max
  Clone ID: PAT_MRT3847_5974C.1
cacccgtacgatggaacttgcaaaacaactgctactgggggcgattaggatgctatgtgcattgggaggagcatgaatctgcggatgctttagtccatatgaagcatcgacatcatttctacgtgcagatcgcagtgtgaggaggctatcgtaaccacatgcagctgagtggaccaaacacggtgccgactgcaacatatttggtgcaaggctttggggagagactactactgatacctaatgctggaaatgtaagcctgatgatcagatgtggcgcctgcagaggacaccgccttgttaggcagcaacataaaattatgccgactgaggtat

SEQ ID NO: 98268 - DNA, 364 bp, Glycine max
  Clone ID: PAT_MRT3847_59750C.1
ataaaatagtggtgtcaactttacacactaaactcatcacccgaatctcttcaacaatgtccaattccttccctctctaccaaaaattggccatcaaaaaacccatacaaagatctgttgaacttctcattttgattctcgccatttcccttcttctttaccgtctcctttacctccaatcccatgccctcctttcgcttctcgccttcttctccgaactctgtttcaccttcgactggtttctctaccttcttttaaattggaatcccgtcgactacaaaacataccctcaacacttcaaacaagttcatgaggttcctgcggtggacgtgttggtgacgactgcggattggaagcttgagcc

SEQ ID NO: 98269 - DNA, 576 bp, Glycine max
  Clone ID: PAT_MRT3847_59751C.1
gtatgatgcacgcgtacctcagcccgaagggctggagagcgtacacccttcgcccttttttttacttgcatttttcacctcaacccaagttcattgaaacacaaaccacaagggcggtacataggacactttgacaaagccacttaacaaaatacccaatccacatggcccaatagcaaccaataaacccctccttataacacggagatgcgtaccagacaaacaacatcatagatgaaatcagcaccgaattgctaaccattcaaatagaccacaccattacctgccatgaaacctaactaatacaactgatatgtcaaataacctacaaacactaagctaaaatacctacacaagaaacctactacatcaaaatggcctccacacatcacaaccaattttaccaagagcctactacagacacacttctcactctacgacataaaacaacccgccctaaaaagtataacaaacgtaattcatcccaaaaaacaaatcacccaacgaaaagataatcaaacacctcctcaaagtcatgaaagaagaacattccgcagccctccacacaaccatgtt

SEQ ID NO: 98270 - DNA, 656 bp, Glycine max
  Clone ID: PAT_MRT3847_59752C.1
aaagctgaagctattaattgggcatctctggaatatggcaaggatatgcttcccccaataataaataggccgatagttcaatctgaaaggtctgcatatccatcatcaaaaccgaggacaagagattgggataagttggaagctcaagtgaaaaaagaggagaaagaagaaaagcttgatggtgatgctgctttgagtaaattgttccgtgatatttaccaaaatgcagatgaggacatgaggagagcaatgagcaagtctttcttggagtcaaatggaacagtgctatcaactgattggaaagaagtgggatcaaagaaggtggaaggcagtgctccagaaggtatggagttgaaaaaatgggagtattgattcggtacttaaatatgcatttaagcttatgcttgtgagagttcaagttcgtctcctcccaactcctgccaacaaataaatgcaaaaagaaaaagaaattctgtaaactcgttattattttgtgttggagaaagtaattagctgggagaatgacctaatttgcttttgctgtggaagtggattttattttgttggtgtatgttgataatgctaaacatgaggaaaatcgggtttttattttttgtgaatcacatattggaaatattaagtatgaagatcagctt

SEQ ID NO: 98271 - DNA, 325 bp, Glycine max
  Clone ID: PAT_MRT3847_59753C.1
gcggcattatattcaaattaatatgggattaatacacaatcttagtccatataaaataagaagatcacatatttcagtatgaaaattcgtcggtagaagtgtttgaatagaataggattgcttggtacagtatgaaaaattgtgttataaaaaatatatgggaacaaattctcatacttcttcttcagagagatgggtattaaaatactctttgtaaattatgtaagagagcaccattatgtccttacccattttccatttcaagtatattcatacaatgtccagtccacagagttccttgaccacaggcatgggtgcagggacc

SEQ ID NO: 98272 - DNA, 1674 bp, Glycine max
  Clone ID: PAT_MRT3847_59754C.1
ggaaacaaaacacagtgaaaatcaaggtaaatccgacgagatgtgagtcctctgtggctcgaggcgtttcttggtgcttggtataaagcgcaagcgtttttgggttcgggaaaagaaggaatgaagagaagggtctagaacaacacaacactacggattgaatattgaattaaacgacgctcatggctacggcgctggagaagaaagcgaaggaggcattcttcgacgacgaattcggtctggccgtcgatctctactctgaagccatacgattggatccgaacgacgccaatctcttcgcggacagagcccaagcccatatcaaactcaacgctttcactgaagccgtttccgatgccaacaaatccatccaattaaacccttccttgcccaaggcctatcttcgtaaagccaccgcttgtatcaaactccaagaatatcacaccgccaaggtagcgcttcaaaacggtgccgcttttgcccaagacgattcaagattcgccaacttgattcaacaatgtgatcgctgcattgcagagcgaatcaagtgagcgcttactagcaccttgtcttccccatttgagcaataagaaatcatgggatgaatataaaagaagctgaaggagacagtttgctttcccaaaagaatggaaccacactataccaacccatgtgaaggttcgaataccacgaaaaacatagaaacttggaccaggatggagctccgttcatgatgttccacaaactacttcagttaatgcatcaactgctccaagtagtggttgcgagacaaagccaaagagaaggacgaacactcgcaacatgtttttccttgtttatttggatatatgatcattcccaacaactgcagagttgaggtgttgtcaaccaaaattgaaatccgtcttgcaaaagctgaagctattaattggacatctctggaatatggcaagaatacacttcccccaataataaataggccgatagttcaatctgaaagggcttcatacccatcaccaaaaccaaggacaaaagattgggataagttggaagctcaagtgaaaaaagaggagaaagaagaaaagcttgatggtgatgctgctttgaataaattgttccgtgatatttaccaaaatgcagatgaggacatgaggagagcaatgagcaagtctttcttggagtcaaatggaacagtgctatcaactgattggaaagaagtgggatcaaagaaggtggaaggcagtcccccagaaggtatggagttgaaaaaatgggagtattgattcggtacttaaatattcatttgagctgatgcttgtgagagttcaagtttgtctcctcccaacctcctgccaaaaaagaaattctgtaatttcttgttattattttgtgttaagagaaattaattagctgggataatgacctaatttgcttttgctgtggaagtggattttattttatttgtatatgttgataatggtaaacatgatgaaaatccggtttttagtttttatttattatatctcaaatatatataggaagaatctcgtcctgaacaataacttgcgcgtccaagaacaagagaatgtcaagagagtccaattggctgacaagtacttgaacgaggctgctcttggaaatgctaacgaagatgctattcagaggggaactttc

SEQ ID NO: 98273 - DNA, 250 bp, Glycine max
  Clone ID: PAT_MRT3847_59755C.1
gttgctgtcattagttttattttacttttttaattaatgggtaaaacggagtttttcaattgagagaggatgccatttacttgatgccatgtggcaaacgctaaaactgcggaacagagagacaccaatttaaaaaagtttttttgggatgaacacaaaaggtgcctcggtatatggggacaacacctactgtgtcgtttgagagggggactcgtcaaaacatttaaacatccactgatttctggggaca

SEQ ID NO: 98274 - DNA, 290 bp, Glycine max
  Clone ID: PAT_MRT3847_59756C.1
acggacggacaaaccccgtacagtgggtggagcgtgaatttcttactagccacttactctttttaggcctttaaccagggatgcgtgcatgaccacactctccaccctttgcccccatgtacttaaggttgtgaaacagatcccggtcattacacaatgtatctccctgcgcacttcgaaaaagaacagtattggcctgtgactgatgcacatggcgttgtggtggaccaatctccccggaccggtgcatgcttgggctaacagaatatacttggataatttaatgacgc

SEQ ID NO: 98275 - DNA, 453 bp, Glycine max
  Clone ID: PAT_MRT3847_59757C.1
gtggattttccttagtttttcatggactaatgtgacagggtgttacacttcccgggaccaaaatggtggttaacactattttttttttaataagtctcattactgttattcctctatttgttttttcagtgactagtttgaatgccagttttgtgtaatgccttgcatgtgtgtaaacccaaaaggacagtatgttattctgtatggtataggaatggtcgatttgaaagccccatgtttttgtttagcaaagcccctcagtttttgtttggagatagaaagttcatgttgaattacaacaaaaaggaatatagatgtttgctggaataatagatcaggatttaaggcaattaatgaattggtttgaattttgaaagattctgggtttatgacttatgagagactttaaaggggattttgataaagattttgcttcttaatcttgctatatgg

SEQ ID NO: 98276 - DNA, 490 bp, Glycine max
  Clone ID: PAT_MRT3847_59758C.1
aattgaaaattaggcacttgatatttgaactttatccatgaagatctcattttttttcaattcaacgttacttccaaattggaattaaaacattagtttacatgaaagtgtcaagctaacatatttgggaaaacaagaaaagtcaaatgaatatgctatgaatcacaatacaactgactaggaaaagagtcatgttttggtccaacatctaaggcatggcactgtggtcagagtagacacttccttgaagaaccaattctaatcagaaattcagcagcatcacagcttcttggtcaacctaaccatgaaagaattcacagctgaagcatccagaacaatccacgatgattcaaataactcatgaaagaactcagttccaatctcctctgccgcagtcctaaatgcaatcccaaatgcatttgcttgagccccacccaaacgcggcctcccacaaacccccacaatcagcacctttccggccaagcggtcg

SEQ ID NO: 98277 - DNA, 692 bp, Glycine max
  Clone ID: PAT_MRT3847_59759C.1
attatattaactcaggcacttgatattcaaactttatccatgatctcattttttcaattcaacgttacttccaaattggaattaaaacattagtttacatgaaagtgtcaagctaacatatttgggaaaacaagaaaagtcaaatgaatatgctatgaaccataatacaactgactaggaaaagagtcatgttttggtgcaacatcaaccactgcacataacttattagcaatctcaatctcaggcatggcactgtggtcagagaaaacacttccttggagaaccaattctaatcagaaattcagcagtatcacagcttcttggtcaacctaaccatgaatgaatttacagctgaagcatccagaacaatccatgaggattcaaataactcatgaaagaactcagttccaatctcctctgccgcagtcctaaacgcaatcccaaacgcatttgcttgagccccacccaaacgcggcctcccacaaacccccacaatcagcaccttcccgtgcctcctgagacacacaagcacaaatcaaaggcttcattttggcccccttctctcgcaaagcatccatgataaaataacagaacttagtcaaagcctgcgggtaccccaacagcgtagcatcatttgaatcctctagcttaagccaccggaaactcctcccactccttatacacccattctt

SEQ ID NO: 98278 - DNA, 224 bp, Glycine max
  Clone ID: PAT_MRT3847_5975C.1
tcggggtaaaagaggattcatcaccaccatgttgcaggatgttgtccacccctcaacaccggctgagcaactccccattgtaatcacctcaagcttgttacatttcatatctcgatcatgtatatttagtgttaatgcatgtattggaactaagctatatatgtatgtgtgtatgtatctttgtgtcatgcaatatttatgaccacagctaaatggtttcctcc

SEQ ID NO: 98279 - DNA, 237 bp, Glycine max
  Clone ID: PAT_MRT3847_59760C.1
ctacccactcatccacccacgcgtccttctatcattccttaccatctctttctcatcttccttcgctctttatatacctgtcctacgtcaacaatatccgttacaaaaacatattctttccaatccaacatcaactaacttcttagcctcaacaataactaccacttatctgcaactttgcatactttactacagtgaactcatcatcatcatctacaatgctttccactagattac

SEQ ID NO: 98280 - DNA, 2119 bp, Glycine max
  Clone ID: PAT_MRT3847_59761C.1
ggctcgaggaatcaaccccaattgcagggacaacaaaagcacgagctagacgctggacagaagaagaggacaaacttttgagtgagaaggtcaagaagcacaatggaaggaactggaagaaaatagctgcatacctccctgggcgaactgacgtccaatgtttgcatcgctggcaaaaggttttaaatcctgatcttgtaaagggttcatggacaaagaaggaagatgatcgcctcattgaactggtcagaaagtatggtatcaagagatggttttttattgcaaaatacttgccaggtcgtattggaaagcaattcggctcgaggtggcacaatcatcttgatccaaccgtaaagaaggatgcatggacagaggaggaggaactaatacttgcttactattaccaaatatacggcagtaagtgggcagaaattgcaaggattcttcccggaaggtactttgtttgaatgttaatatgcaggcttcaaaacattcatcaatacgtatgtataaaatatgattttaatcatgttaatatgatttgattttggttataatttttcaaaaaaaaaaatctgtttattttgagccaattatactattcaataatgttgaacttgaatctttttcaacatgctttggttttgtgatgtcataaatatttaattccaactttacgaaatatcattcacctcacttctttttcacgagatttcccactgacattaaggactaaaatgttcacttcataaaatcttcactttgttttctgactcttcaaatactattttctgctaatgacatggactaaagtaacctgcacatttaatttcaaggtctaaaatagaaattagaagtatattcaatgtttatgcatcttctctcttgtgattgtgacatgaccgtacttgtccatgttagttcgcctctcctttgagaaacaatgtaggctagcaaaagtagaacaatcatattgaagacattgataaatgtacatgcatttctggtttaagtgctacaagtctttctatatctaatgacccatgataattatttgtatcttttgggggagccaggactgacaatgctataaaaaatcattggaactgctcaatgaagaagaaattggatgcatcacccttagggtgtgacataaaagttgccccttccggtttctgtgcttctggaataaggcctgaacatgttgtggctaaagtggagggtcaaagtttcaatggaatggtttctcccaagcagagtcactggttgaatcgcagtgttgataacattctaacaaaattgattcttcaaaatgattcaggagaggaatcttgctctgcttcatccagggggactcctactcctagggcctcaagacagtttttggataattctctggattgtttacctctttccagtactgttacagatgaggcctatgagtcactgaaacggcaaaaggtttatttttcagatacagagcttaaagtgggtgatgaatctgacagtccccttttgaatttgagctactcaaaatctgccaaccgtgagaagaaaggtcaagctggaaatggaggcaattacaactcaaacaacactatgccacatagtgtagatgaattcagtgaatgtctaagtccaaaaacacacatggcattggcatgtgcatacaataacggttgtactcccccaacgtctatactcaagaatgacacaggcgacatcaacccagaaactttgctaagaaacttagcaatgacctatgagaatgttccttctattataaggaaaaggacacccaagaaggcaagctgttgtgaccgtgaccaagcaccttcgagaatgatcgtaaattctcctgaagcagaatgtgttattggcttagataatttaaaactgaacagggggtttattccattccttcgtagaccaaatactcagccatagctagatctatggaaggatgcataaaatgacagacatgatatgctagtcaattgtaatgctcctttgacatagcagaattgtttaatacagtttttacactagctcaactttattcaaactcgaattgaacttctttattcttaataatatattttttattgtaacacaaaaa

SEQ ID NO: 98281 - DNA, 327 bp, Glycine max
  Clone ID: PAT_MRT3847_59762C.1
ctctctctttttttttttttttttttttttttggttgttttttttttttttttgttacggaaaaaaaaatttttgggttttttaaataaattcatgggaggagggtggatgtcacccacgggcatcataccatgtgttttaaaggggggttcaaaattcctcttatttttcactaacacccacaaaaaaggggtcattattttaaggggggaagagccccctctgtctcgccctgggttaaacagagataaactcaaaaaaatcataatgatgataaatccaaaatgctcccccggcacggtttataaaagccggaacaattggtgt

SEQ ID NO: 98282 - DNA, 392 bp, Glycine max
  Clone ID: PAT_MRT3847_59763C.1
ggttgattgggagtagcacgtatggttttaggggcatgctgtgaataccaaatatttagtgaatcatccagcctttgatcatttctctattgtatttagtgggcagctaatagctagctacttaaatgttatgttcacttctggttgacaatttcactaagaatttaaggtaggaatataatgtgttcactctatatcatagcactcaatcttgaaaccagtgctgaacagctgaccctaagaaacctatagcagccacaataccaaagaaagtacatagaatgcaaataatttatactacacatgtataaatgctcaaaaatataaaatacttcagcattaataatcataaatcatataaaaagccgataataattaatctaactaacaaa

SEQ ID NO: 98283 - DNA, 218 bp, Glycine max
  Clone ID: PAT_MRT3847_59764C.1
aaaaaaaagtgaactgaataatcccctattgagtaattttgaaacctctctaaaaccatcgtgttttagttaaaattaacatgcttaatttcaatctgctgggtacagtatataaatacatggaaggctggttgcaactctcacggctttaatttacagacttagtaggtaagacttattgtgttaggggcattttggccctgccgtttaggtattcc

SEQ ID NO: 98284 - DNA, 459 bp, Glycine max
  Clone ID: PAT_MRT3847_59765C.1
tttcttttttttttttttacttaaaagcatggctagtttctagaggaagatatctagaaggaacatatataaatatatgtacatgtcatcgtcttttgcatgattgggtgatctattacaattttatatatatccttttcttgtggaggaaaccagcaaaaagaccccagaataaaatctcaactattacaaaggccagtgtaccccaccttttggaatgaaatatgatctgcattaaagcttcactggcgtcaaccaaattattttcaggagaatgccaatagaaaccctggataactgctgggaaaatgtcacaagctgccaatgcatatacaacaagagcattcattcccatccattgcagtaaaactgtaggctttctgagatgttctatgtcaacattgtaatagatagcagtcaagactaagcctgatgcccctgcagtgatacacgtgtagc

SEQ ID NO: 98285 - DNA, 466 bp, Glycine max
  unsure (1)..(466): unsure at all n locations
  Clone ID: PAT_MRT3847_59766C.1
aacctttgggctgatgtatgtgcttgcatggtcgtgagaagatcatagaaggggaccttatcgagcgcagcaactaactactcccggcccgcctcctagcgtcccagcgcgcgacccaaccttaagaccccgagaacgctcagtcgcgggcgcggaagcagtcgtaatcgcggtagtaatcgtggccgtaataagcatctccccgatccgagtcacgccgagaagataattatagacatctccgccccgggcgccgggctcgcgaaggtttaaccggagggcgtcgaaacgggcgccgtagtcgacaatggcggtcgtaatcgcggactaagtcgtattcgtgatttacgtaatcgtaagccaagctaaaacccacaattccgaagtagacacaatcgcaacacacgcactaataaacaacaagnaccatgcgccgcgcccaacaaaacgactaccgtctgcaccc

SEQ ID NO: 98286 - DNA, 227 bp, Glycine max
  Clone ID: PAT_MRT3847_59767C.1
aaaaaagcaccaacccggacaattccaggttttaacctaagggcgggatggggaaatcccctccccttttgtggaaaaagggtgcctttacaggtggggaaaacacatcccaggattttcctgtggggtctgggttaaaaaaaataaaagttagttctgaccatttcctttttataaagactattttttcggggagacacccaatgtttgtgtacaaaaaccaaggg

SEQ ID NO: 98287 - DNA, 265 bp, Glycine max
  Clone ID: PAT_MRT3847_59768C.1
atgattcattgcattatttgtgcaattttcgttgctttttccgccaccactcctgcggtcattcttcggggtagggtagagaaattgggggcaattactgacggtgtctgaagggtactagcgttaattctgtgagcaatcgtagaatctttcgcggtaatgcactgtggtatctgctcttgatggagaaaaaatgaagcaaaacctttctgatataaagctggattagatgattgctacacattgattcgaaaaatggaccttg

SEQ ID NO: 98288 - DNA, 282 bp, Glycine max
  Clone ID: PAT_MRT3847_59769C.1
agatagatgattctccagtctcttatgcactttattcttaacaggtagggtggactccacacggtggtcgttaagcgctttgactcattgaacagccgtttggatgccatggacgcacggattacaggatgggatactcgcatgactcagcttgaggagcatatgagttatatgcgggaatgctttgaccttccaccaccatactcatagatttagattcttactattatgttttaatactaagcctgtgattggggtatgtaacatgacattattctgtga

SEQ ID NO: 98289 - DNA, 456 bp, Glycine max
  Clone ID: PAT_MRT3847_5976C.1
gtacggttgctccaaaagcccaatgacttttatgtccactttggcatatgggacactgtgcatgctcctggcaatgagattagccaacactggagattctggtgtttttacatcacctaaccacaaaatacaggttggcaaaatggattattaccaaagacactgtaattgcaacctctttcagtctcatgggaggcataattcaaaattagaatgttttgaatgattctaattgtaattgctattattttatgcatgtggtctttgatgggtgcataaaatgggattcaatatggtccttttgccattccacagaatggattgcccataacactatatcccaaataaaaagtggaggcacactaatcaaggcatggaagcaacttgctaaatatggaaaaataactctttcaaaaatatttgaatatgttaaccagagaaagtgatgaaagtgac

SEQ ID NO: 98290 - DNA, 350 bp, Glycine max
  Clone ID: PAT_MRT3847_59770C.1
cttcctttttttttgggagggtttaataaagattttcttccattaccccccccaaaaatactcaacaaaaaacttaactatcttaacacctcgacaggccgccccagagacaatctaagggaagtccaacagaaaagaaagccccggttgcaccaacaccaggaaaagaaaaagcgaccctccagacaacaaaaaaacaccctcagggatacccccaacacgggcggaggtaaaaaataaaaggcccaatagggaggcccatttgccggaaaagaggcaagggatgagggaccggaggcccgctagaattggccaagaatttgcggggccgggacaaatccaacggcggc

SEQ ID NO: 98291 - DNA, 287 bp, Glycine max
  Clone ID: PAT_MRT3847_59771C.1
acagaaccattgcgtagaccatccgagcataatcggatcacagagattgcgcgtgcacggggtctgttctttgcacacctaatcaaagccgtaatgtcgacttgatcggataatggcacgttgccacgaatactattaaaggagctatgtcgccgtcactacccaactaggaggggtctcctgcaaatagtcacaccacattgagaagtctcccaccctttgccatgaccgttgaagggaggattttatccatggggccacacttacgggggcctgaatcctggatc

SEQ ID NO: 98292 - DNA, 495 bp, Glycine max
  Clone ID: PAT_MRT3847_59772C.1
cccatacctctgacgttaactctcacccctattcctctctctctttctctaatggagtccctaactgaacttcatggtgctatggcatgggacttgggtttgctgatctggaaactgatcgatcagagaagggaccaagagaggtacatattgagctaccaactgtactagccacgcgatgagcgaaggcttggaactgagctctgtgcgaagatcatagggaggaacatgcagtggggcctgaacgagtacaagatcctgctcaaggccattgtcaactctggcattggcgaggacacttatgccccaacaaacgtcatcgagggccgagagacgaatccaacgtcggatgatagtgtcacagaaatggaggcgtattttgcatgacagcattgccaaactccttgaaaggctagggattatggccctgacatgatcgatgttcttatcgtgaatgtggccatgtacgctgtaatgttcttatttaacttcatg

SEQ ID NO: 98293 - DNA, 253 bp, Glycine max
  Clone ID: PAT_MRT3847_59773C.1
gctgcgagaagacgacagaagggggggtttatttccatcacaggtgaaacatgccagaacaatcatactgttctttttgccttttgtgcaggtgaatagacaagtgatactccccaatccatactctagtgtctacatgctcctgtcacctgtaactgcaatttttctgcaaaggatgatgtcaagactccaaaatgcccctggattgaatcatgctggctgagctactggatgaatagtaatccttatataa

SEQ ID NO: 98294 - DNA, 1121 bp, Glycine max
  Clone ID: PAT_MRT3847_59774C.1
atgcacgcgtacgtaagttactttgctgtagagcggccgacattcctttttttttttttttttttttttttttttttttttttagatgcatcatttcttccataaaagatagggcttcaccgtatttcgacatcttacaacaaccacttatcaacacagggtatgtaacagaatcagttttgatttttttcttcctcatatttatacaagcttgggttgggtgtcatattcccctacattcatacagctttctagggggggattatatgcccccccccttaatttaattcctcgcatatcagctgctgttagcactgtgtcaatcttaaacttacgactgcatcgtccacaggcagccaagagtgtgcatattgagacaacatttggctgaattctttcttgttccatttctcgcaagattttaattgcatctgccagcaaaccattagatccataggcatcaatcagtgcattgtaactgacaagatttggcttcaacaggtttctcttcatcctatcaaatatttctcttgctttttggggattttgtgaccttccatcagcattaaggagagatgtataagatacaatatcagggcagaagccattttattttatctcattgaaaaccaaatgtgcctcattgtccataccatgagcagcataagcacctattagtgcatcatatgagactatattaggtttcagcccttctgcaagcatcatatacaattttcaactcgcccacacacagaatacaagtgaatgatactagtgaatgtaacaacatcaaggatacaatccgacttcttctccctcatggaattaaaaatatcaatagctttgtcatattgtctaagttttactagacaatggataacaatattaagtgtagttgtgccaggacgaatatgagttcccttcattagttcaaaataagacaaagcttttgaatactgagccccacttttaatcgcagatagaataatattgtgagtaacaagatcaggcccaacaccattctatgccatttttttgcaaacattaagtgcttctttccaatttccactagatccacaagcatttatcaagttgttataagttgaccgacatggtggaat

SEQ ID NO: 98295 - DNA, 412 bp, Glycine max
  unsure (1)..(412): unsure at all n locations
  Clone ID: PAT_MRT3847_59775C.1
gctactttataatgagatatctgagctaaggaaatcaataaagggctcatggaaatgcagatagaattacaacaatccatgaaacaagaggttcaaacagttaaaaaagaagaaaagaagtccaataacaggactccaaagaaaggcaactgctgcatttgctatgagatgaaagttgactcagttttgtacaggtgtggacacatgtgtacatgtctcaagtgtgccaacgagttgcaatggaacagtggaaaatgttctatatgtngtgctaaaatagaggatgttgttcgcgtatatgttgacggttagcctgtcacagcggacagaatctcactccagaggactatgcttagtcctgaaacttagtaaactgctacaattaacaccatacaccacaaatgactttctc

SEQ ID NO: 98296 - DNA, 386 bp, Glycine max
  Clone ID: PAT_MRT3847_59776C.1
ggggggcccatcccaaaggtgtggtttttccttaaaacattaaccgtgggaaacaaaaaaaaaacatgtccccagaaaactcaaacgctgaagaaaagagctcaacacgtacacaaaaacgacacaaagaaaattgtggcccccttcaaaacataaaaaaaactcgggataaagggagagggagaaaaaaaaaaaaaaagtgacacgcgcacacaagtgtgaaaaacaagggtttgggggggaaaaatttctcttgagttcacacacgcaaaagaacattcaaaagccgcagttttgtctgtaaaaagaaaaagtagtctcaaaacacacaaaaccttatgttgcgccaagtccccagacgcggggggagacgcgggggcacacac

SEQ ID NO: 98297 - DNA, 313 bp, Glycine max
  unsure (1)..(313): unsure at all n locations
  Clone ID: PAT_MRT3847_59777C.1
gcctaaacttgatttatttgggggattacaagacggcagatcgcctgagtatacacgttgaccaaactacacaggtggttatttggggtgactagccttaattgaataagacctgatgcatacaagaaccatggctttcgcgggggggggggcacccttgactaaaagccgcngcaagattcctatggggatgaacagagacacctattgcttccttctcgcggacctccgttggaggctacaatttaccagagggattgctggagccgtgtatattcctatcttcgccgccccggcgaggccctcctccttt

SEQ ID NO: 98298 - DNA, 264 bp, Glycine max
  unsure (1)..(264): unsure at all n locations
  Clone ID: PAT_MRT3847_59778C.1
agggaatcaagaaaatnattataccctttaagatgaaaccgtacctacgttcaatattcctattattccttatccttctcgaccaatccatggcggcgagtgctttttttaatggattgcnaaacattgaaaagtggccctttagcgagaaaagtttgaagtggggaaaggnagggaaggagacgatagatantancaangactatttaaaaaaagagcngagcccccnccggactacggagcaccccatnanggagtgggggc

SEQ ID NO: 98299 - DNA, 1398 bp, Glycine max
  Clone ID: PAT_MRT3847_59779C.1
cttcgcgttcgcgcatacgctcttctctctctttcttcatatggctgcgagaagacgacagaagggggcgcattcttcatttattacagtctgttgtaaaacccactaaaaccaaccccccctctctctctggtttcattaattttcttcttctgtgatgcccttttgatcaatccatcattccagggcagccagtagttgcttttactagcatggcatcaagcaatctattctttgatgatatacggagcaaagtcgatgttgatcctcctcaaaatgaagagtcaacagatgttggtgaattattaaatgatcctgcccaaactgctcttaaacctaatgggactgtttcaagcagtgttcgtgagcttttagagtgccctgtatgcctgaatgccatgtaccctccaatccatcagtgttcaaatggtcacactatatgctcaggttgcaaacccagggtccataaccggtgccctacatgtaggcacgagcttggcaatatcagatgcctggcactggagaaagtggctgcgtctttggaacttccctgtaaatatcaaggttttgggtgcatcggtatatatccatattacagcaagctaaaacatgaatcgcaatgtgcacatagaccttacaactgtccatatgctggttcggaatgctctattatgggtgacataccctacctggtggcccatctgaaagatgaccataaagtggacatgcacaatggtagcacttttaatcatcgctacgtcaaatcaaatccacaagaagttgaaaatgccacatggatgttgacggtcttcagctgctttggtcagtatttttgtctacattttgaagcttttcaactaggaatggctcctgtctacatagcctttttgcggtttatgggtgatgatgatgaggcaaagaattatagctacagtttagaggtaggtggaaatgggaggaagatgatttggcagggggtgcctagaagcatcagggacagccaccgcaaggttcgtgacagttttgatggtctcatcattcagaggaatatggccctctttttttccggtggtgaccggaaggaattgaagctaagggttactggtaggatctggaaagaacagtgaagggagagagatgtccttccactagcaattatatataggctgatagtttgtagtgaaactcgtttgtagtgatatatgtaccttctggtcttctaattgtgttttgtaatttaggaggcaaactctctttgcttatccttacatcaaatacacgaacaggaagttgtacctctaatcattatgatgattacgcgatagagatttagaaccttaacgtgttctatatatattatttttgttctatgaatgtcaatgattgcgagcacttgag

SEQ ID NO: 98300 - DNA, 512 bp, Glycine max
  Clone ID: PAT_MRT3847_5977C.1
ggcaaggcattagcacatgcagcaccctctgctgatctattatatgtttcccttctcgggctcatcttacgctaatgcccaagcccatttgcagcccggcccggccctcagagcccaacaagcgccaccacaacagccaccaccaccgcaagaaatcgttctccagaggcggcggcggcggcggaggacaagccagtcctctgttatggcccaaaacgaagtcaatgggctccgaaattagcgaaccaacctccccgaaagtgacgtgcgcgggtcagatgaaggtccggcccaaaacgactgcgtgcaggagctggcaatcggtgatggaggagatagagaaaatccacactgacaagaatcagaagatgcgtctgagctgggcggagacgcgtcggtgcaagaaagagataatgcagaacttgacgtgttggcgaagcataatgtacgacctgagatgcgttcggggattcgtctgaaccgacgttgcccccgaaaaaaacgaagatgat

SEQ ID NO: 98301 - DNA, 454 bp, Glycine max
  Clone ID: PAT_MRT3847_59780C.1
taattttaatacattttttttgttttttttttttttttttataaaaaagaaatagggggataaaatttttcaaatttatcctttatgtaaaaaccaagttatacatctgagttttggcaaaagttaaacgaaaaaacttctaaagaatttgaaatccgtaaggggatttttttttattggagaagttcgatccatttacttcttttttttgaactctaccaagggggctaagggaaaagggtatccaacgtgaaccaaaagccatatatggtgctctcatccaatggaagggtgttctttacccatcttgatttctcgagagtcctacgctaccccctagggctttccgcttgcttaggaaaacttggctcaactatttaagggcccttataaagtaaacggctcatctcctttggaaaatccatcttggctctggtgggcctcactccaaaga

SEQ ID NO: 98302 - DNA, 542 bp, Glycine max
  unsure (1)..(542): unsure at all n locations
  Clone ID: PAT_MRT3847_59781C.1
accagggggttagtaacagtttattaatttcttttttcttttttttttcttttgggttgtcgatttcagttttttttttttttttaaatatacgattaggttcatatttcatatatacatatatgatggattaacctttagtaactttttgagaaggggacaagaattgagagtggtggtatatgcagtttttttattttatttttttttcggatagttttgttaaaaatattagttgaagggattgaataacacaaaaaaaaaaaaaaaaaaaaaaaaaaaaaaaaaaaaaaaaaaatacttcttggtggttttacaaaccagggataacaaaatttgtggccccttttttgttgttctacatcactgttttaaccgccatggaaggcgccgggggtaaatctaaatagagtacccccgggattaaagagaatacttgggccccctgggggagtgatattcccctcccttactgcccccgctggcgtttagggggggaaataaacccggggggngatttggggctgttttgngcgaggaga

SEQ ID NO: 98303 - DNA, 152 bp, Glycine max
  unsure (1)..(152): unsure at all n locations
  Clone ID: PAT_MRT3847_59782C.1
cctcgagcganatcggctcgaggcgagcggacgtctcgagagttatcggtcgagacggtacgttagggcccttgacattggtcaacacattcaaatctacggtgcagctggggagatctatggtggggataggagaatggcaagtcttgcga

SEQ ID NO: 98304 - DNA, 641 bp, Glycine max
  Clone ID: PAT_MRT3847_59783C.1
ccacgcgtccgcccacgcgtccggccatggcaggacaactccatcgcattcaacaaggggtggaattgattgtaggaaccccgggaaggctggttgatcttttaatgaagcatgagattgacttagatgatgtgatgacttttgttgtggatgaggtggactgtatgctgcaaaggggctttagagatcaggtcatgcagatatatagggctctgtcacaacctcaggtcttgatgtattctgcaacaatgtctaacgatttagagaaaatgattaacactctagcaaaaggtatggtggttatgtctattggagaacctaatacgccgaataaggctgtgaagcagctagctatttgggttgagtcaaagcaaaagaagcagaagctgtttgaaattttggcaagtaagaagcattttaagccacctgttgtagtatatgttggctccagacttggggcagatctcctggctaatgcaattacaggtgccacaggaattaaagcagtttccattcatggggagaagtctatgaaggaaaagaaagaaacaatgcagtcctttttggtgggtgaggtccccgtggttgtggctactggaagtttgggtaagggggttgatctacttggtgtaagacaagtg

SEQ ID NO: 98305 - DNA, 362 bp, Glycine max
  Clone ID: PAT_MRT3847_59784C.1
gggaaattggggtaaaaagcccccaaacacgttttttttttttaatttaaacgggcccaaacaaactttaaaggggtttttttttttttggggggttgtgggggttacaaacccccagcaattttgaaaagggggccacaattatgaaacaatttttgggggctttcaaaggggccccctttggaaaacaaccgtttaaaggggaaggtcggggtcaaaaccgaacaacacaccccaattaaggccttaccctgggggtttttgtccattttgaaaaaatttcctcctcatcttatccaagagggaaagagcacaagcccttgacatggtcccattttcactaaggccatttttggggggct

SEQ ID NO: 98306 - DNA, 231 bp, Glycine max
  Clone ID: PAT_MRT3847_59785C.1
ccaacccgtccgtgggtttttgggattaaatttagtcaaggggggggaaaaagaggggggggagttggaagaataagggggattgcctttttggtggaggttcctgtttggggggctgaaaggttatccttatttaatgccctcttaaaggttgcttgtgatgaatctaaaccaaaccaatttttttaaaatttgaaaataggggatacaaagttttttatatgttcttgt

SEQ ID NO: 98307 - DNA, 144 bp, Glycine max
  Clone ID: PAT_MRT3847_59786C.1
cgactagggaacacattcctacccccacctaaaggtgagaacattgagaagagtgctagtgagtttttggttgagcaagtctcggaataatccggtggaagtatctgtgctagcacttggaccactaccaaatgttgctttggc

SEQ ID NO: 98308 - DNA, 449 bp, Glycine max
  unsure (1)..(449): unsure at all n locations
  Clone ID: PAT_MRT3847_59787C.1
ccctttnnttttttttgtttttttaagaatgttaaaaaccatgccanntgattgcatattatgtattttctggtgttccatttatttactaacanncaactctcttttattatatgacagaatacaagataccattcaggccacttccacaatatcatgagccttaagcataccacacatctgatataaggaatactggttccttcaatattcacaatttatttaagagaccaggaacacgtaccttaagacataccatatgggtcccttatgatagaagatacctgtttgggaaattcccttcgtgaaagtcaaatcctctctcttcactaagaaaaggatagaagcacgagctgctaaggcatttttatgcnntggcccatagacggtgttcctcacatgtgctcatcgttgtgttcttcttctataaagctctcttttcagatctc

SEQ ID NO: 98309 - DNA, 270 bp, Glycine max
  Clone ID: PAT_MRT3847_59788C.1
gggtggaaaaggacgccacaaggtgctcatgtaagaaatctacaccacaggaggcctatgctacacgataaaagcttgtttcttcttccattaaacgtcatacggcgtcgggcgtgacacctagattcaattcattggccgtctttttactacttcccgattgggaattcccagacattcaccagcttaatcgccatgcaccatatccccctttcgcatccttgcttacctacgactgggcccgctctcatgactctccacaagagttgc

SEQ ID NO: 98310 - DNA, 339 bp, Glycine max
  unsure (1)..(339): unsure at all n locations
  Clone ID: PAT_MRT3847_59789C.1
cagggtcatgtgcccagtttgtgcttacctcagccaaactctgtgtctacgaatctcggaagcacagtcaaactgtcttgcaagcgcagcactggtaacattggaagcaattatgtgaactggtaccagcagcatgagggaagatctcccaccactatgatttatagggatgataagagaccagatggagttcctgacaggttctctggctccattgacagatcttccaactcanccctcctnacaatcaatantgggcagactgaaaatgaanctgactacttctgtcantcttaccntanntggattactgtattcggtggaggaaccaagctcact

SEQ ID NO: 98311 - DNA, 218 bp, Glycine max
  unsure (1)..(218): unsure at all n locations
  Clone ID: PAT_MRT3847_5978C.1
gttagacggattacactctactagaggttcttaggacagaatgttttggttgacttcggagaggaacaaacgcgccgaatatttttataaaatactctcgggggggggcgggcggaaaatgtgccaaacaccccccccccggnctaaacttggtggaagagaataaccagccagggggggggggcggccaccctcaaaaacaaactcgcccccccgaa

SEQ ID NO: 98312 - DNA, 142 bp, Glycine max
  Clone ID: PAT_MRT3847_59790C.1
acgctgtcatcacggtttcatttgttcacccagtcgagcggaggaaggcaaccagatcatcgtggatccaggactcctccacagtataacagtggccgcgactggccataactacgccaattgtgcggtcacgagctcatct

SEQ ID NO: 98313 - DNA, 221 bp, Glycine max
  Clone ID: PAT_MRT3847_59791C.1
attcgacccaacgacgctttaaatacttattatctctggttcaattacaaactgcaccaattggggtggcatttgaccatgagaaccaataataatattgaacttttctttactactaagttaatcttttctattcattatacaaaaaagacatctatggtcaactaattcgttatactaaaaaactattcatttctgctttaaacatttaatattacctt

SEQ ID NO: 98314 - DNA, 889 bp, Glycine max
  unsure (1)..(889): unsure at all n locations
  Clone ID: PAT_MRT3847_59792C.1
aatatanngcagatatttaatcatccaaaagcactagcagattcataaagattaatcggctatgcaatcatctatttcataatcccagtatggtaaagaagtaatattgttgactaagtaaacaaaatagaacgcagatattcacacatccaaaagcactagcagagccttaaagatcatcggctatgcaatctgcgcaccatctttgaactctcaattgatgagaagtcctgaatttcagtctggcccacttcaatggacacttccttcaatgcagcaggagatgttccaccatgatctttaatttgcctcttacaaatctgagataattcttgaacaatttcgcacatcgaaggtcggcttttggagacttcattaacacatttgaatgcaagtgaagccatgtcatgaagattatgcacatcatattttccatttaattgtgggtccacaatttcttcccatccaaccttaccctcgctttccatgactgctagttttacatattccatgagcccttgctgtggattcctgccagtgataagttcaaacagtagcacaccaaaactataaacatcgcttttcttagtgaaggttcttgtagacaaatactcgggatcaacatatccaaaagttcctctgacatttgatgtgcgaggtttgatcatctctggtctggaaagcccaaaatcagtgaccttggctctcatagactggtccaacagtatattgcaagatttgatgtcacggtgcacaacaggtggagaagccccatgatgtagatattccagtcctcttgcaacatctagcgctatgctaagcctcaaatcccagctcaatggcttgtgattttttcccaaatcagcatataaatgggaatcaagactgc

SEQ ID NO: 98315 - DNA, 336 bp, Glycine max
  unsure (1)..(336): unsure at all n locations
  Clone ID: PAT_MRT3847_59793C.1
ctaccgggcaaactgtgttcnttatttttatctaaacatatatcatgactctggcaagcctgaaggttatcaccctatataaagattgtcaatatatatgcacatgtttctcagtgtatcgcctccctttaagttctcccttggctcgagctttataataggagcttaggcagcggataaaatgccagactcacattccaccctatgcatagcacttaagattcgatgactgctaagctaggactggaacaaaagcttgattaaaaaacccgtggctcacctaagttgcttcacggagttgagccagaatgccagcctaaacacagacggccttca

SEQ ID NO: 98316 - DNA, 648 bp, Glycine max
  unsure (1)..(648): unsure at all n locations
  Clone ID: PAT_MRT3847_59794C.1
aattgctctaaccatcccaactaatttcactgctaggaattaagttcccatctaacaagtataattgatccagaatgttgggttggctacatagtaggatttctctgaatgactctttaatcattgtcttcaatacattctatacctttcagcaaatttctccatttattatcctttctttcctttccatcttctaattttggccatttgacctcgttcatctcacattcaatactcctttctattttgtagcatagaatattgtgtaatgaaatctatagcaggaatcccccaaacccttctcatgccccccctttacttccttcgtacaaaattcccattgcaatctgctagtttctagacacaacctgctagtcaatgcacggtgtaggagccacaatctgttagtctatgtgttcctcaatctgcatataatacttcttgcttcttgcttttatatgaagctaagaataagattttaagggaatgagtattacatgactccccggcataaaatgtagcatgcatttctaatgctttgtgagaatactggattggctttggcatcttcagtgtttacctacgttgcagaaattttgcttggggttctttaagtaggtttctgcagntcatttgtctttgcatttt

SEQ ID NO: 98317 - DNA, 439 bp, Glycine max
  Clone ID: PAT_MRT3847_59795C.1
acgagcaactttatagcagatctaataacaactatggagtcttgtataatcaggtaacccttggatttgttctcactttactatcttccgataattgttctcacctgatctctcgaaatcataaagaacatataatcttgttctggaaaggaaaaggttatgcaaactacattttattggtttctttctattagtaagcatctctgttcagatgtaccaatgcatggttaggcgttaagctggttaaattgacatgaatagaatttaatcatagtgcattataaaggtttttattcattcaatggtgaattgtcagattccctagcatgcaagggctagttaaatagttgcaatcggtaaaaaatgcgtgtgatttaggcctctataataatttcctaggtgagtctctggtggcaactccaacgtgccaattctgtca

SEQ ID NO: 98318 - DNA, 462 bp, Glycine max
  unsure (1)..(462): unsure at all n locations
  Clone ID: PAT_MRT3847_59796C.1
atcagaccttccattgaaaggagtcagtaagaaaactctggattcttattgtcctaagcctgagattagtttttccaatcatcgtaggagagataagctagagccatccaaaaatttatccaagcaagattcagatatcgagcttgacaatactcgggtgagctcagatgaaaacagggtgcctgaatgtgtcaatgattcagatctggattctgaggtggataagaaagctagcgagtttatagccaagttcaaagctcaaatcaggcttcagaaaatgggatctattgaaagatcaaaagagcaaaagatcacttaaaacaagattaggtgatttgtaaactattgtgctacaattgtttctaacccgatgaacacagagttcatcagagatcttataatattatatttcattgagtttccttcattntaggagatttgattntcttcttatgtttttgg

SEQ ID NO: 98319 - DNA, 264 bp, Glycine max
  Clone ID: PAT_MRT3847_59797C.1
gattggggagcttcagtctcaattttatagccatcaaagtagtgaagtaattggggttccaggtctatcatgtacaggataaaatgccaaggagtttgtctagaggtgatgcggaaactacaaaaattgagatacaagactttttccttttcagatttgaaggatgaaggatgggttgagttttggctttggtcactgactcaggtggtagtttaggtatcctctgaaataaaacgaacaagaaatagtttttgcgaactactg

SEQ ID NO: 98320 - DNA, 224 bp, Glycine max
  unsure (1)..(224): unsure at all n locations
  Clone ID: PAT_MRT3847_59798C.1
cagactcntnctcnaatattattcttcatcaaccctaattctctaactgaaccttctttataagctagtcagtgggtgcctacttacctttcatttttataaatcaatcacatcataactaattctatattctacctctcaatttccttaaacccaataaccttatttatatataatgtctattcaataatcacataaaaccttttcaacaatccattccaatt

SEQ ID NO: 98321 - DNA, 460 bp, Glycine max
  Clone ID: PAT_MRT3847_59799C.1
gaaacattaaccttctctgctcaattttaaatccgagtaaacataattccatttttgcgacctttcactttgctcgcccaaaactcaacacttgaccgatgggcggtagactgacgagtcgagactctgggtcggggcctcaacatctggtttgaacgcattttggctgtaccattcctgcaccgcggcctggacatactcgcggaacttctccagttcgcccggcggcgcataagcttcaacgataatgcgaatgagctggtccgcatccaccaagcgtatgccgctgtcgcggatgtcttgtagctcttccggagttgggaatgtgtagtaggcactggtttcagtgtcctggggggttttagacagctgctggccccgggagatcttgtcgacggggtctcgggccatctggacccctataccgtacacatcggccatgtagccaagcatggacttg

SEQ ID NO: 98322 - DNA, 204 bp, Glycine max
  Clone ID: PAT_MRT3847_5979C.1
gggggaaaaaactctaatgccagcagaatattgttccacaattggacaaagatttctctacaaaagcacaattagttagcgggggggccgatttggaggatccaagtttcgctccgccgccctgctcagtaaaagctactctgaagggccacctaagataacctcacgggccggtggtaacaacgacacacctggaaaaaccct

SEQ ID NO: 98323 - DNA, 1454 bp, Glycine max
  Clone ID: PAT_MRT3847_597C.1
aattcggctccgtccaacatcaacctctgttccttcaatcctacgatcaccatcaagcggctccactttaccctcctcctcccaatccaccacgtttacggagagagagtgcttgcctactatggcgggaaggtggaaccgtacggggccatcggtggtggtggtgctcctccccctgcgacggcgacgaacaaggttgttaaagcggtgccgaaggtggacgccgagggagacgcgaagagcggagtgcagaagtttcgggtgaagctgttggcggaaagtggtggtcaaagcattattgatgttctctgtcagatcggtttggatggaattcgtatgttggatccaaatactagtcgaacattgagaatatatccacttgagaacataacaagatgtgattggatgttgagccaggacgaataagattgctgtccaatagatatactaccaacacacttttggatacagttaatgctgctaccatacagtactggcaaatagtatttgtgtcccaatcccaaatccacagcagtaccagattaccattcaaggaaatgggtggaagcaggaggccttccgaatcattgagaacaaacgaacagcctacagaaaaaaagagaggatttggtgattggatgaatttgattaaacctgccgatgaagagaaggatcattggcatcactgtaggaactgtggggatattttttgtgacaaatgcacacgtggtagaattgctcttacttctgatgaggatgctctgcaagtacgagtttgtgatcgatgcatggctgaagtgactctaaggctgagtaatgctaaagagtcatcaagtaaacctgtattgcagagtcatgaggatcttgcaaagaaacttcaggctctaagtctgatggatctggaagacgaatgaaagaagttgcatgtcctatttgcactgtccatcttcaggtgcaggtaccaacctccggttcagagaccatcgagtgtggattttgtcagcacccttttcttgtgactgctcgttgagttgagatgacactgatacagatgaaggtgtctatccaagggtttcatgttcgattattttactgttctatctcttgcacgtgaataatagatgcacttatttatcttgctttctttttggggtcttagtttggggtgtacatgattaccttttctagtcctcttgaaaagctgtttcaatttgtataaagtagttgccgaacatatatgtatagccgtgtcaatttcactgtaatttgtaagttcactggtttgaaacgatatagtagctctgtcaatattttcgaggatcagtaattttatactgtttgaaaggtctcaaccgattccaactatagtgcgtgcaatcacatgtcttgtatgatggattagccgaatttaaatagtcgtactatcaatgcccaatattagcacagtattttcg

SEQ ID NO: 98324 - DNA, 410 bp, Glycine max
  Clone ID: PAT_MRT3847_59800C.1
tcttaacctacctaaaccccatgtttgtaaaccgtgctattcatctgttgatttataagtgttggggaatcttaacgggggggttccaacgatttgagcgaaccacagtaaataagaaactgtgtatcgcgtatgcgtttcgttctaccaaatgggggtttccgacagtcccagcggcggattcacgccacctcattaggatcatcaagccaacagcaagtacggttttaccaaggccatttttgttgggggttccaacggcgctgatctccagcttaacaacgatttggacaagttcttgcttgattcgggtctctactagagccataaagaatcctgtgcgatgaaagagggtcttcactgccttgatcagaatgtgaaaagttaggtgaagcatttgacgtcccaac

SEQ ID NO: 98325 - DNA, 844 bp, Glycine max
  unsure (1)..(844): unsure at all n locations
  Clone ID: PAT_MRT3847_59801C.1
natacacgaacctgttcggttccggattcctctgcccccagccccccggggtcgacgggatcgggtctgagaggcctcccatcaccggcttctgcgacgtcgacagcgccaccgtcaaccccggccccacctctgccttgttaggtttgaacaacaccacctcctcctccaccccttctccgccaccaccacgcgaattttgctttgcttgggttctgcgccgcacacgccttgtcaccgcctcaagctctccgacctcgtccgcgacgattgcattccttatcctccgccaacgccgatcgcaagccacatatctcctccaaggtcgatctccaaccaccaatagtttcgaggtcctagatctgtgatacaatctctgagatttgagcttatagattccagatctgcgcttcgaggtcgtaaacggtgtcgttccaattctggttcgaggttcaagatcatcttctccgtggcactcgttgtagtcaatcctctggaccctcgtcgccacccctcgccgttgttgccgcgctgcttgtgtgttgtcatctcctttttttttctttttcattgtttgtactgattatttgcactggtcaccttctccgttgaatattaaggaattttgtactattattttttagaaattagaaatatttgaaggaatttcagattgaatatattgatcttgatatggtgctattgaggttgatttgggcttgaatctgaaaatcttgtgtattcctttagataaaagttctgaaattttcggaattctttaaattttattaaaaaaaagtttttttaaaaaaaaaaaaaaagggcggccgctctgaggatcaag

SEQ ID NO: 98326 - DNA, 271 bp, Glycine max
  Clone ID: PAT_MRT3847_59802C.1
gtttctcttgctctcactctgtctgcttcatcactttctctcgtgtcaatcgagaaaaatcatgggcagaaaattcttcgtcggtggcaactggaaatgcaatgggaccactgaagaggtgatgaagattgtgactactttagatgaagctaaagtccctggagaagatgtagtagaagttgttgtgagccctccttttgtgttccttccttcagtaaaaagtttgctgcgccctgatttccatgtctcggcccaaaattgttgggttcgc

SEQ ID NO: 98327 - DNA, 494 bp, Glycine max
  Clone ID: PAT_MRT3847_59803C.1
ggctcgaggcaacagacatcttaactccctctatcgacggctcaccacaacttttctttcacctacctactgacaccacttcaaccactcaacacaatgggacttttcggatcttcagaccccgccgtccagcaggagaagctgatcaacaaggaggcgaagaacgaggagaagtcgctcaagcaggcgatcaaggacgtctcgtccgccgagaaggaggaggccaaggccgccaaggccgaatcccactcgcatgcgtcgtttgagaaagcccacaaggtcgaggcgaagctcgccaacaagctcaaccaggcgacggctaagcacgaccaggccgtgagcaaggaggtcgcggcgcagaacgaggccaaggcgaaggaggacgcccaccagcgtgccgcggctgccttgcaggagaagaaggccaagcttgaccagctgcagcacgcccatcacgaaaacgacgctgttcgggctgagaagctcgacaagct

SEQ ID NO: 98328 - DNA, 320 bp, Glycine max
  Clone ID: PAT_MRT3847_59804C.1
ttttttaaagaaacagtgaaactttaataataaataaattcgaagagaaatacaaccggctaggaagataaaggatacatatcaatatttttcgcaacaagctaataatacggtaaagaacataaaggctatattttcacataagattagaaacttggaacaacactcacaattcaatttgtatcatacacaacctcaatgttatataaggttctcacacataaataaaggcacttgagtctggccacgtgggtatataaactgtcataaaaagaacactctgatatggttacctaaagtttcaactagatcgcaattgg

SEQ ID NO: 98329 - DNA, 1198 bp, Glycine max
  Clone ID: PAT_MRT3847_59805C.1
ctcctcgtgcctggtttggccgttttagttctgaattacttcaattttgtatgactcgttatgaggctgaccattctgtgttttcactccattctccatctggcttgtgcatttatctagttgtctatcttgacgacattgtcattactggtgatgactttgacggtattcatcggctcaaatcccatctgcacaacaagtttcagacaaaagacttggggccgcccaactatttcttaggcattgaggttgctcaatcctcttctggatttctatttcccagccgctcgaggttttggatatacttattgagaccagcatgcttgattttcgccatagtgacactccaatggatcccaatatcaagcttcttccgggtcaaggagagccattggaaaacccgtgaagatattgacgacttgtgggtagacttaattacctcactgtcaccaaaccagatatcatgtatgcagttagtgtgttaagtcaatttctgaatgctccttgtgattgccattggaatgctgtcatgcgcattcttcgatacatcaaggatgcaataggccatggattactaaatgcagacaaaggtaatgccaagattgtttgctactccaatgctgattgggaaggctcaccatcaaacagcaggtctacgtctggttattgtgttcttattggagaaaatttgatctcatggagaagcaagaaacaaaatacatttgctagatccagtgctgaagctgtactgtgccatgacagcagctgcaattgaaattacatggccaaggcaacttctccaacaactccgatttggagatactcaagcaactaagcttatttgccataatcaagctactctccacattgcatctactccggtcttccatgaacagactacacatagaggtagacagtaattttgaaacagaaagtgctctcaatagaaatcaccactgagtttgtcaattccagtgaccaactgacagacatgttcactaaatctctcaaggggcctcgcattgattatatttgtaacaagcttggtgcatatatatatatatatatatcaattaggggagtgctagatttatacgttatcttgtatttattagttgatagaaatcagtgattgtatttcctaataatcaataattgattgatcatgtaatcaattactgattctatttctctatta

SEQ ID NO: 98330 - DNA, 201 bp, Glycine max
  Clone ID: PAT_MRT3847_59806C.1
tgcctgcccccgggatcgcggcaaccggagggggggaccaaaacaataggggaggcaggcacccacgaagccaccccacacaatggagcgcgcaccacaaacagaggaacagaaccaggagccatgaagaacgagcggcccccaaggcatgccgaataaaaggctaaagccggccaagtgcagaaaagacacgaagagcgc

SEQ ID NO: 98331 - DNA, 147 bp, Glycine max
  Clone ID: PAT_MRT3847_59807C.1
atgggctttttctttgagcttaatttaatgttgcgaatctttgttttgggtcatcatttgttggttgtagatcagcgaggtgtggagtgtggtatttttcatagattaattggggatattgtatggcattgcttgtgctggtgttgt

SEQ ID NO: 98332 - DNA, 538 bp, Glycine max
  Clone ID: PAT_MRT3847_59808C.1
ccacgcgtccggaatagaatagaccgggaagtgcggaaaccctagtggtagtggagttgggtgagaatgggaatagcaggtaaggttggggattatgctttcaaggcattcaccgccactcttggagtcgccactatttacctcactgcaaccttctctgtcaacgtttacagaggcctctcttggcacaatgctcaaaccaaacttgacaaacaagatgctgatgagcaagcaccgtgacttgatctcataagcccaccatcttaaatttcaaatcatgttgtgtagaaatataatgtgagtttctttcttacaatttttcacttaattagccaataattaaatggaaaatcacgagtaataacctagtaaattggcaaaagtagattgtggtttttgatagattgtacttatacattattatttgtttacgtgttatatggacttcctggaatcgacttctgatcatatacgacatacgatggtagacaatgaagttatattaagtagggggtgtcaatcaccctagttactggtg

SEQ ID NO: 98333 - DNA, 556 bp, Glycine max
  unsure (1)..(556): unsure at all n locations
  Clone ID: PAT_MRT3847_59809C.1
taataaaaactatataccatttagtatagtgtcatgttaagagtttagcaaattctttcaaagagatttaattatttaagagagaaaatttgtcttatctcttcgaatagattgaaaaaaccttgttattttcttaaaaagcacttatcattcactaaaactaaatatatattaatatattaaataatataacatggaaagttatgttacttctgccatctacattacgcatatgttcactttcatttttataactcagccacaaagttcccttcacttttttgtttaaccatatgttaaaaaaatattatatgaaggtgggggccaagtatccatacttatatatagttggagatttttttgagaaggaggccaccgcctatatatatatatatatatatatatatatatatatataaagaaaatatgatttgcagttcaaaagatttcatattatatatgctaaaaataaatgaagaaagatttggaaaattaacagctcatcagntctaacactaactgcagtatacagaagtctacttagtgcatgtttgga

SEQ ID NO: 98334 - DNA, 311 bp, Glycine max
  Clone ID: PAT_MRT3847_5980C.1
ttctcgaaagatgcggacggaggtgcaagggaggggtaattgaacgaggggggcgggttgccaccctgatctaaagcctgtggcgatatggtatattggcaaactgtgctagactaagaaggagcttggctgatgctaccgcagagtggaaaggtgaaaccaaggactaagactacaggaaacacatgctctatatcaaatacataagagaggggaaaagagactgattcagaggtttaacagacgagagtttaacattgtacgagccagcatccaacaatgatcaggttcaaagcagtaagacttcacac

SEQ ID NO: 98335 - DNA, 342 bp, Glycine max
  Clone ID: PAT_MRT3847_59810C.1
ggtgtgcaactagaaagtttttgctgtggggctgtgttgtgaggttggcctagctgaaacaggagatcctcctatggtgacactgacctaacaggaagttgtgatcgtgttcggtgtgaaaaaaaggttgagaggttgatcttgattgatattggagtctgtgctttttcttgagttaatggaatgagtttgagttataacggtgatggtggaggtgcaagggtgtgaggcaagttggaggaggaccacagtttttggatgtgttgttttacttggcctacatgcaattctagctgggtgaagatggagggttcttctgggtctgcttttcacaattcttgc

SEQ ID NO: 98336 - DNA, 560 bp, Glycine max
  Clone ID: PAT_MRT3847_59811C.1
gtgggtgttttttttttttttttttttttttttttttttttttttttgggtataaaaagaaacaaacttaaaaaaattttaatattaattaatttataccctccaacccacccccaatggtggaaaaataaaaaaagttaccctacaataataaggcaaggttttcaagcccatccattattatttacgttacacttggaaaaaatgatttttaatttattggatgaataccatagtttgaagaacctccaaggagcaaccctccacctgaaggtggtttgacattatgaaaacgatccacccttggagaagaaaaaaaaattccatttttaccaccattactttcacttggaacatttcccccccccccccccctcaaatgtaattcaaataaattaggggacccttttttggcctcaaccccttgatcatagaaaaaccctttgaagaaatgggcaccaatttttacaactggttgatacgcatacttatttttcccacccttatccactggtgttacacaaacacacttgaacactggtggggcacccccttgactt

SEQ ID NO: 98337 - DNA, 526 bp, Glycine max
  unsure (1)..(526): unsure at all n locations
  Clone ID: PAT_MRT3847_59812C.1
ctctggtggtaaatgtttganatagcaaagcaaagggctattagttggatcctgagctacattcttcagattccttctactagaaaatagtttcctatctgcatgcggtaagtttttccatgtgtttatctgccgtagcactcaagtaattattgcaatatgcttacaaaatgtcctgttgggtttgcaaattaatgagttactagtttctagtaatagtcatcgggtagatattggagcctctgatgatgttccttgtgctgtgtcataagattttatcttcatctcattttagttgctatccatcctacttgaattggcattataaggagattgagtgcttcatattgctcttattctttcatccagttttttgctttataatactgttagtttgttggtgtcagaactagtcctcactcactgaatcatctcttcagtcagcattttccgcatattgcttcatatttcatacatatttactaccataccgcctcagtaatggggtatcaatgtacttttctcc

SEQ ID NO: 98338 - DNA, 434 bp, Glycine max
  Clone ID: PAT_MRT3847_59813C.1
cttcgtttttttttttttttttttttttttttttttgttttttcttttttttttttttttttttggtctttcttttttaggataaagggacgaaccacaaatcctggtgggggaccacccatccacagattccaccctcctttaatgccccaatagcccaatcaagggaaaaaaaaaaggaaaagggaaaaaagcttaaaacgcactttccttaaatggcggaggacggaagggccactaccaagagggggaaattggctcaaactaccccccaaaggccctcccaaaaaaaaaccccggagaacctggtccggaccttaacaggttggggccgagggggcccctttgctccaccccttgggggcatcggaggaacccgggggggggcgccctccctccaggggagggtcccatccggggggaaggaaaggggg

SEQ ID NO: 98339 - DNA, 962 bp, Glycine max
  Clone ID: PAT_MRT3847_59814C.1
ggtaccaatcaaagggaccaggttcgttggagttgatgacacactatagggtcctcaaggataaaggagtttatgtcctggtgacctacggcgcccctctttagcccctccgcttgcttcaggtatcatgctcttgcgcttcaattcttcatctgatgggtgagtgcggctgtctctcgcgatggcatcgcgggccctgggctacggtgaaccatggtactgggacaaccgctactccaacgaacctggtccctttgattggtaccaaaagtacctcactttggctccaatcaccaacctttatgtccctcctgcccaacccgttctcgttgttggttgtggcaactcagcgttcagcgaaggcatggtggttgatggcggttacacggatgttgtcaacattgatatatcttcggtggtcattaaagctatgaaaaccaaacaccaagattgccccaaattgaaatttatgaaaatggatgccagagatatgagtgattttgaatcagggtcttttggtgctgttattgacaaagggactcttgactctatcttgtgtggaaataattcaaggcagaatgctacaaaaatgcttgaggagatttggagggtcctcaaggataaaggagtttatgttctggtgacatacggagctccactatatcgcctgcgtttgctacgggaatcatgctcttggacaataaaacttcatgtgatagagaaacttgcctcagaagagaaatctgataatccagtttgggagctgacaaaaccggttccactcaacgatgatggaagctctgtggaggaagccctaggacagaatccggatgtccattatatatatatttgcaccaaggaagtttctgctaactcaaacacaaatgcatgactggggctgtttagagagggagacatgcattttcactctacaaattcatgctactatagttgatcctaaa

SEQ ID NO: 98340 - DNA, 384 bp, Glycine max
  unsure (1)..(384): unsure at all n locations
  Clone ID: PAT_MRT3847_59815C.1
acgaggcagattgttccgaatgatctgaaagctcttgctggtagctttatggcaaaagtgaatcaaggactggagcaagctcatgggactggttatggaggcagtggctttaaatttaatgaagaggaagatgaggtgaggaaagcagcaaagaaagcacaagccaaggagtatgggtttgaagaagaaaagtcagattctgaagatgaagatgaaggtattaggaaggcaggaggtgatatctcacagcattctgcttttgcccagattattgctgccactaaagggaatgctcctgcattgcctactcccatactcctaccatccttgcaagtcttgcctggggcagggctacctcttcctgcaaacgatggggcagcntga

SEQ ID NO: 98341 - DNA, 264 bp, Glycine max
  Clone ID: PAT_MRT3847_59816C.1
gcaatctgacacttgtcacactcacacatgatgtctgttccatgtcttatcttcatcttcatcttctacatttctaatttcgttccctctaactatggatcacttttacaatatctcatgtcctcaagttctttcatcaccttgcctgtttctcaagttgtgcttggacctccatcaatgctcgctttacttcttcatcttccggtgtctcttttagtaaaaacccatacccttgtacttgaagccttcccatcctttccaact

SEQ ID NO: 98342 - DNA, 888 bp, Glycine max
  Clone ID: PAT_MRT3847_59817C.1
aatgtctggggtaagagctagtgtttctgctatgcccagagaagtgatgattaagcccatgaaggacttcataatgtctccaaaatttgactcattcttcttgattaaaactgatgcataccaaaggccaagtgcataggaacagaaggccaatagctgtgttatgccatagccaaaacctgatatgtggccacgtagaagtgcttgtttgttgggtttgttcagttcagatgcaaactgggttgagactcgatcttctgcgccaaaagcagcaacggtacgaatgttggcaatagcttcacgagccaaagaagttgctctagagtaagcatggccatagtctcctccaaaccccttgagaaatagttgctcagtgatagaagctcctatgagaaggggaaggcaggctacgaccactgccgttagtttccaactcaatgtgaaaccaataacaaaagctgttacagtgagagctacattttgaacaatggttgagagtctgtcagctagagcacttcttactaatgttgcatccgcagctagcatggccgttagtgagccagtgttgttctcatccttatcaaaccatgcaacttcattgttgagaatagctgagaacattaataaacgcacacgggcagtgagacgctctcccatcagtgtatagaagtagtgtagtaatagataaatacttttagtaataacagctactccaagaaatataaaagcaacccgatcaacttattgcttgattttagaaccctgaggagaataaaatgcagtcaaaatgtgtgtgattccaagagcaaagagaggggcttccatgccagccaatattgcggccattgagtacctgagaacattaataaacgcacacgggcagtgaga

SEQ ID NO: 98343 - DNA, 138 bp, Glycine max
  Clone ID: PAT_MRT3847_59818C.1
acacacttcctagcaaaatcagattaaccgcgcttggtgtgacacttaattacatttacgcgttcggggactaaggtggcgagaaataatatctccaatgcctgaatgtcgaaaaatgcatggactatacaccaccta

SEQ ID NO: 98344 - DNA, 252 bp, Glycine max
  Clone ID: PAT_MRT3847_59819C.1
tctcgagccggagatatcagaatgtaggtttggtcctaactcaacccatgagctagtgtctggcatgaggattgcctcccacttatatattctattgtggccttatctctatccgatgtgggacttgagtttttctcaacacatgtcgatcactggtttatcagctattctgctcatcatttaacttttatctttcttgtacatttatgttcctatgttctaacattgaactgattttgtagccgctttggc

SEQ ID NO: 98345 - DNA, 187 bp, Glycine max
  Clone ID: PAT_MRT3847_5981C.1
actttatcaaaataggatatcgaattgaacaccactgtgcttaaggagttctcatactagtctttgcgattggaactgaacttgatcaccttcgataatcgttaaccgcatgttgcatgtgactgacggtagtctggattgagacaagggtgggtccggaaatgggacaacccggagtaattgtaat

SEQ ID NO: 98346 - DNA, 225 bp, Glycine max
  Clone ID: PAT_MRT3847_59820C.1
ctagtgctggttaagacactgtagcaccgatgacttcgtgtggttactaacggcaatacggtctacggttcggagctcaataacggtctctagctagctaacctgagagatcttcgggccaacgatgaggagggagtcacaacgcggcggtgggaggggccggaaacctcaggtgacaaagcattggatatgttgggacctcttcccctagaggagggtagctag

SEQ ID NO: 98347 - DNA, 372 bp, Glycine max
  Clone ID: PAT_MRT3847_59821C.1
cccgaaaaatttttttttttatttccccaatttatatttatacccccggggaaaccccacaggggggatgggaacaaacaattgcccattttttttttccccccaaaaaaaaaaatttttgggggggtaaacccaaaaggggggaacccccggaacaaccgggggggatccattacggggaccgggaaccccggttcccgcggacaaaaaccaattaaaattcgaatcccccaaaggggggggggggggggggcccattttccctttccccaaaattttaccaccccggtttttccaaatttacccgcccacaaccctgaagttaaaaaaaggcattttttttcccggccctccccccccaccaaaaaggaa

SEQ ID NO: 98348 - DNA, 542 bp, Glycine max
  Clone ID: PAT_MRT3847_59822C.1
tcgggtaggcatggaagacaagtgatgacatgtgtctggtgtttgtttcattccaactaataattatgctaacgcatagaaatttaattgaggcaaccatttgaaaaggccaatcaagcagttttattagaagtgaaagtttttgcattgatgtggaattggaatttttagtatttacattcacggtggatcaaatttactttaaaatctttctgaggtcatacgggtcttgcaatgccattatatatttttttgatgctcgtaacatagttttaacttcactacttgtatatagttgttcacttggaagataaggttggttgggatcttaagaaaaaaagaaaaggggaaagataaaaagaaatggggaaagatagtgggttcgatccctattgacaaaaattaacaaactaacaattaatgttttcctataaaaaaaaatagttgttcacttcaactggcttcaagatgtatgtgttgatatcatttttgttttcgttcttattctgcagttattattggttggcaatgcaagatccaag

SEQ ID NO: 98349 - DNA, 578 bp, Glycine max
  unsure (1)..(578): unsure at all n locations
  Clone ID: PAT_MRT3847_59823C.1
gcatgattaggtgctgacgcacataattctagcggctggagtagtgtcaatggaggttctatacttggctgagaatggagactccgcaacattatttcttccttctctatcaccaactaaaaccacaatggcatgtttaattttccccacatctccaccattgattcaattttttttgccttccattaatctcacaagctacgtgtcctaatcctacacctctttttttttttattgggaaataaaagaaagttgtgatacgattctttgggcaacaaaagttttaaaactctattattaatgatttgattttacactaattcacccccttttggttttgttagtcccattgtctttttcaatagtggtcaaaggtgagctccgatgaaaaggcataaaaaattctactaaccaattgcaagcagttgtgtggtactattcattgtgaagaagggttgcacaaaaaggaaaaacaaagggcataaaaaagaaataaaggctaatctataagaaaaaatgctntgattgacgtcaaaactgcaagggtggngttcgtgtttggatagcaaccacaatgc

SEQ ID NO: 98350 - DNA, 244 bp, Glycine max
  Clone ID: PAT_MRT3847_59824C.1
gggttcgggtaaaaagccatgacaccgaacaaacaaacaacaattttcgatacggttataaaaaaaggatctaaccagaccgtatgaacaccacgcaaagactccacaccccattcatgctcaataatgtactcccaggatcaaccacaagagcattaggcttgaaaccaatattgctgtggaaaaaaatcctcctttcccatggcaaaggacatccaactgaccatgttcactggaagttcca

SEQ ID NO: 98351 - DNA, 438 bp, Glycine max
  Clone ID: PAT_MRT3847_59825C.1
gttatattttcaggtcaaattataaaatccaaattccaaaataaaagatattttggggaaaatatgggtggcttagtactatttatctgatgttaaaagacttttcttctgattttaacaataataaaccatggtattctcactctttactacaaaaagatgctaatatttaatactatagagagatacaactaaccatagttggcaaaaacggcttgcccacctcatctatctctcggtcgtgcccttttcgctgtcccaatccagatttgggacagcgatacccgcaatgtatccagctgggctacatcctttaaattcaacattttcttacccaacatatcaaacttatctgacggtctttccttcttattatctcctcttaggtcttaactcctattcactatatatttttttaatcttttatatatttccttt

SEQ ID NO: 98352 - DNA, 321 bp, Glycine max
  Clone ID: PAT_MRT3847_59826C.1
acccgtccgtttcatgcatagggggcatattatttgtggaaacattgatgagtcaagaaagcctaaaggctcaaattactgtccatgacacgccgtattctactgaggaggactaattttgcaaggatcattaacctttaacatagtgcagatggtgcaccttaaaattttactgatgggaatctggattaccgctacgcatattgctgtatgtgaaagaaaagacctggcaaatgtatgtagttcaaatacccctaacggctcaggacgaaatattatgttacactgcaagttcattgagggcatctattgtgaggaaaa

SEQ ID NO: 98353 - DNA, 536 bp, Glycine max
  Clone ID: PAT_MRT3847_59827C.1
ccaaggaatgataaacccatctcccattgtttatgctggtttatttgcagcccttgtgataagtagtaggtgtgtatggttataatacttaaatgttgcatatcaaaagatgagttggagaacagctagtagtcagaaatatcagacagttggaaagggccttttaaagattactcaactttttgtagctttcatgaatgtatgactctaggtctttggggacctgatatttaatttggatgcttcatattctcccgcatttatttcccaatgttcattctgaatattgacttaacaggtaaagaggctcttgatcagattcaactatcatactcagtctttcctttgtcaagttcctcatcgcaagaacgccatgtgcaacaatcaatgcatgcaccaccttttgtgtctggcagccattcagttgactccactatcagtcttgctgatcaaccattagattttgcacctaggtttaatcgcgatagtgacttgcaaatgcaatcaacttataatcatcacgattccagctcttc

SEQ ID NO: 98354 - DNA, 577 bp, Glycine max
  Clone ID: PAT_MRT3847_59828C.1
ggaaacttattaaatatttttaaacttgagttatttgggaaatcctagaaatttaagatggcttagttatctaattggcttggtctatttaaggcctgttatttacatccaaattatccaattgccatttatttagaaataagaatttagaattagaattttgagttgacatgagttgagttcagttaactattttttttcctctattctcctgtctatatttttctctccccaactctttttccctttcccttgttgtactgtttgtccaacatctcagagacagatgataagatatcctcccaaaacaaaaacaaaaaaaacaagacagcaaaaggataagagacaaataacatcaaaagtcagctcaagaagactctcttttccttttcatggttgataaggaaaacattacacagaaaagcacgatgatcagctcaaaagagcttctactccccaggcttttcaatgatattactttctctggctcagaattatgtaatactgggggaaaacacaaataatgagtttaaaataacacttttaaaattaattatgaaaagagcactacaattcg

SEQ ID NO: 98355 - DNA, 373 bp, Glycine max
  Clone ID: PAT_MRT3847_59829C.1
acgcgtgcgaacacgacaagacgagcgtttgctgtcactgagcatgctactattactaagacacatttctgggtcatatacgttattacattggacagtagtaatatactaggcggaatttgtttgctactctgcaccgatgcgagaattagcaattgccacatgcaacttagtggcatgcatcatgattggccatgcttgagagttactccgttgtagctgctgtgaggcattcacaggactcttcaactgactctggatcgacttgttatgctataccaagtggatctggcaatccagggtgagcttgtggctctagcgatattggaagaactgcgcatgattgaagtgtgggccgaatgtctacgctatg

SEQ ID NO: 98356 - DNA, 371 bp, Glycine max
  unsure (1)..(371): unsure at all n locations
  Clone ID: PAT_MRT3847_5982C.1
ggggtgtgtgttttttgttgcttggcgggtggggggggtaaggtttataaaccggggccacacggtacgtacgacttggggcccggcggggaggctgtttccggcggacaccgccctgtattgggggcatcaatgctcttctgtggggggggggggctccaatacccacgtggtncctcgcatgcgtcagggcgggtagctgggcacttttctcgcagcggaggccttgctctgggggcggctaccagatgggcgttcggcgtctccggcctgtcctgggcgcggccgggttctttgccgctccgtgcgagcccagggcctngactgtcggtacaccgactactgtccggttccggcggggggaactggct

SEQ ID NO: 98357 - DNA, 361 bp, Glycine max
  Clone ID: PAT_MRT3847_59830C.1
cgtacgcgtgggtgaaggccctttatatataaaaaccgaaactcgtattgttctgagcaacctaggttgtctgttacggatcagcatcaaagcaagttcacaaaattttggtgcgtcctggattgacccttttgcccctcctcctacactaactagccttttttggtttttataaagcacattcccaaagggaccaactacaacacaacccttgaatggcgtccatggccactttcttcacccaaacatccttcccctcccactctgtctccaaaaccttagatacccatttcgccccattcccgaaaagtaacgtatttgcgaacttcccagcgaggaagcacgtgggggttcgagtttt

SEQ ID NO: 98358 - DNA, 1528 bp, Glycine max
  Clone ID: PAT_MRT3847_59831C.1
tacggctgctattcttcccttggagtggatagccttcaagcttgttcttccgatcccctgaaaacaaaaccatgatgagaaggcactcccttgtgactgcatcaccaaaacaagtgtccctcttctttgttggccacaaaagcaacccaacaacaattcatcctcacactcacacccttctgactccatcacccaaacaagacccacaaaaccataatcagtggtggggccaccccaaaaccatcaaacccagtttcaatcacagtaggatcaggttcaacaccttgcacactggttccaccgaagaacaagttgaaacgggtgaggttgaagtcgatgtgtggacgaagatgcaggaagaagctaaactcgatgtcaccgaggaacccattttgtctaattactacaacacttccattctctctcacaagacacttgaaaccgcgttggccaatcaccttgcaatcaacctcagcagcacaagccttccaagcagcacactttctgatctttttgtgacggttttggagaccgaccaagccatcatggatgctgtgaagtgtgacctgagagcggtgaaggagagagaccctgcttgcataagccacgtgcactgcttcttgaatttcaaaggctttctggcgtgccaggctcacagggtggctcacaagctgtggcttcagggaaggaagattcttgctgtgatgattcagaaccgggtttcggagattttcgcggtggatgttcatccaggggctaggattggaagtgggattttgctggatcatgcaactgggattgtggtgggagagactgctgtcatagggaacaatgtgtcaattctgcatagtgtcactttgggagggactggtaaggtttctggggataggcacccaaagattggtgatggggtgctgataggtgctggaacttgtatcttggggaatattaaggttggtgatggggctaagattggtgctggttctgtggttattaaggatgttcctccaaggactactgttgtggggaacccggctaagttggtaggagggaagaacaaccctgttaagttggataagattcctagcttcaccatggaccatacttcacatattgctgacttttatgattattgtgtttagactttagagtgtagtgtaatgtaataatcctcaagcatgctttggaattttgtgtttagcattttaggtgaagtgattttgatttttgattggggctgttttttttcatttgtgcttgtacaattgcaacaatgggatttgaacctaggacttcacgtagactactcaaatcccttaaccactaggccgactttggtggctaaaagggctgtttttgtttgtaagtaagacataattcatgttttcctgctgacaataataaaagccaaaatgaaagtaacggcctaacaggaccccttgattacatgatgatgtatttgtgtatgtatgattgtgttgctgtaaggtgctatgtatgaatttcgcttttagtgctttcattatct

SEQ ID NO: 98359 - DNA, 857 bp, Glycine max
  Clone ID: PAT_MRT3847_59832C.1
gtataatacgaacctcaacaaacacaaataccgtctcccatcattccttacagtttcaaacacttcttgttcttcctaaataccattccttatcttttcggatacttgttcttcaagttcttcttctcttttatacctttctttctctgtggatctacaccgactaagatgctagccgtattctaaaaatggaaaacaatcaaagtgctgcaggaacacaagatagttctatgatgaagtctgttgatcaaagagcacgatcaaaagggcgcaatgacataatgactcaacgtctgaagaatcgagagagacaacgaagatatagggcacgtaagcgtctagaagccgaaacaaagaagtcatttgttgtggaagagacaccagctgtgcaagttgaactacaaccaaacaggaaccccaacaacaacttcgtgacccgtatctattgtaaacgagattggaaaaaggacgcaagacgggcccatattttaaagcatcaacaaatgaatggattcattgatcgtccagccataactagtgtacctgaggtgacatgcttagccattggaaacaagtcagaaacagtgccagagagggaaattcagtctggatcttctggtgttgctagtactgatgctcctagagtggtgctgggtcgaagagattggaaagcagaagctagaagaaagaaaaactagttgactcttcatttcttcttttaaaaaaagtatttatcccagtggactttctgttgtattatagacattatataatgtaaagaatgctggacaatcgctgttccattacctggcaagctttgaaattataaacgcggaagaaaatctgtcccttttact

SEQ ID NO: 98360 - DNA, 497 bp, Glycine max
  Clone ID: PAT_MRT3847_59833C.1
atttaggatggccatgcttgcttatgaggcagcaataattgcagcattcttctgcttcttatacttcttccatcggagacaatgttgcagacaccctctcttcactgactttcccatccttggcatgctgccacaattactcttcaatttgtggcgagcccatgattattcaactcaggtgttgaaacaacgtgggggcaccgctgagttcactggaccttggtttaccaaaatgaactgtttggtcactggtgaccccatcaacgtgcaccatgtcatgagcaagagcttccccaactacgtcaagggacccgtgttccgcgagatttttcaagccttcggagatgggattttcaccgctgattccgaggcttggaaatacaacaggaatctcttccattctctcttcaaacacagaagctttgaggtgtttctggagaaaaccattcacaacaaggtgcagaataccctccttccaatgttggataatctacagc

SEQ ID NO: 98361 - DNA, 106 bp, Glycine max
  Clone ID: PAT_MRT3847_59834C.1
tgttgaaggagactttaacactcggtaccctgttaccgttctatttaacaaagttaactatgccaatgcatcaacaaacaactatgctttttaagacatcctagaa

SEQ ID NO: 98362 - DNA, 124 bp, Glycine max
  Clone ID: PAT_MRT3847_59835C.1
cgggaaactagtgaattgttatggacactagtgtctcgccctctctcctagtttctctccgcgtctttggaagagtcttagggcttgcagtggcagtgcgtgtccgcatatgggcccttgcgtt

SEQ ID NO: 98363 - DNA, 637 bp, Glycine max
  Clone ID: PAT_MRT3847_59836C.1
cccaaattcaattcagaatcagccatggagagcgacgacgacttcgagcttttgcctccttctcccgtccaagaacgaaagctcaagcgtttgaagaaagcagctagggttcccgaaccttctcaccctcctatctctcctcccaatttttccgtatcgggaaacggcgaagaacacttgacggagccaaacggcgaatctgggcccgaatttgaaactttgaccccaagcccaagcccgagcccgagcccgagcccgagcccgaaccctcaatctgacactccgaaaggtgtaaccgtcgacgacgatggtttgggcgcgaagagggttctggattttgattccttcggtgaggaactagggaaggttgtagaggagactgaagaagttagagatctgaagaccaacgaagaaatcagggatttgaatactgatgaagtagagaggaaacgacgaggtttagatgacttgccagagaagaacgagaagaagaagagaatcaaggacgacagtgacagcagcgagaagaagcctaaagtatctggcaccaataagagagaagccgagaaggaacgacgagatactctgaaacagcttcaagcggagtctcagagacttcttcgagaaactagagatg

SEQ ID NO: 98364 - DNA, 167 bp, Glycine max
  unsure (1)..(167): unsure at all n locations
  Clone ID: PAT_MRT3847_59837C.1
ggcaagtnangagtgaggaatgnagagaaatgagaattcgtcattgggctgagtncttgntgaggnaggnggcnctgcnaaacgcagaagatcnggnagaanttgcnaccgnaaacaggtggaagagggtagtaatanacatggcnttcatnctcccngattcnnag

SEQ ID NO: 98365 - DNA, 487 bp, Glycine max
  Clone ID: PAT_MRT3847_59838C.1
aaacaccggcgacgacgatgacaacaacgacgaggaggagaaccagaacccggcctcggaggcgtggataacgaagaacaagaagagcccttgggcggggaagaaggaagggttgcaaggagaattgaccgaagagcagcagaagtacgcggaggagtatgcgaagaagaaaggggaagagaagagtggttttggaggggagaaagttgaggttgttaaagataaaagcacttttcatgggaaagaggagaaggattaccaaggtaggtcttggatcgcgcctcccaaggatgcaaaggcgagtaatgatcattgttatatgcccaagagattgattcatacttggagtggacacaccaaaggggtttctgctattaggtttttccccaagtatggccatttgattctctctgctggcatggataccaagattaagatttgggatgttttcaactcttggcagtgtatgaggacttacatgggacac

SEQ ID NO: 98366 - DNA, 757 bp, Glycine max
  Clone ID: PAT_MRT3847_59839C.1
gcaagaattgggctcccttgtttgcttattatgcgtgcctttatggggattgggtgtttataggcctgctatgaataatatgctttccaagtggattcctgtttcggagagaagcagatcacttgccctagtatatagtggcatgtacctaggttctgtggttggcttggcattctcaccattgctaatccaaaaatttggttggccatcagtgttttactcctttggatctcttggaagtatctggtttgccttgtggttgagaaaggcatatagctccccaaaagatgaccctgatcttggggtagaggagaaaaggctcatactggaaggcaatgtatcaaatgcacctgtttcttccattccttggaaattaattttatcaaaagcacctgtttgggctcttataatctcccacttctgtcacaattgggggacatttattcttttaacctggatgcctacttactataatcaggttctaaagttcaacctcatggaatctgggctcttatgtgttcttccatggttaaccatggcagcttttgcaaatattggtgggtggattgctgacacactagtgagaaaaggcctatccataacagttgttcgaaagatcatgcaatcaatcgggtttctgggtccagccttttttctttacagctgagccatgtcagaacacctgccatggctgtactgtgcatggcctgtagtcagggatctgatgcattctcgcaatctggtctgtattccatca

SEQ ID NO: 98367 - DNA, 299 bp, Glycine max
  unsure (1)..(299): unsure at all n locations
  Clone ID: PAT_MRT3847_5983C.1
antncacgtacgcntacgtaagcncggaattcggcacganagaacgtcaccattnacaagtcccagancnntnccnnaaaaaaagcannngnntggccaantgnaaggagntaatngntgctaacccanntaacaccaaggcanttatcgtgagaaggatttncnccangctattcccnannnaaacattnctnngtgtgacnanattggatnacaatanggcactgtnanaanttncttanagactgaanatncaggtntcngnngaaaagaatttcatnatctggngnnatcantct

SEQ ID NO: 98368 - DNA, 1567 bp, Glycine max
  Clone ID: PAT_MRT3847_59840C.1
aattcggacctacataccctagtagtgtggtgtgaccttcttttatccttttgcttttttggtgtgcaattaacacacacacacacaaaaatgatggcatgccaagattggccagagccagtgattcgagtccaagccttggctgaaagtggcttaaccacaatccctgaacgtttcataaagcccaagtcccaaagacccactaataataacaactatgctccaaaggtcaatttctctcaaattggtcaacaagagaacaccacaacgacccaccacaacaacactaacatcacggtgattgacatgaagcacatctatggcggggatgagaggcggagggcggagacgctccggctcgtgtcggaggcatgccgggaatggggtttttttcaggtggtgaaccatggggtgagccatgagttgatgaagggggcgagggaggtgtggagggagttctttcagcagccacttgaggtgaaagaggtgtatgccaatacacccctcacttatgaagggtatggaagcaggttgggagtgaacaaaggggccattttggattggagtgactacttctttctccatcacatgccttgttcccttagggaccaagccaagtggccggccctcccaacatccttaaggaacattatctctgaatatggtgagcaagttgttatgctaggaggaaggatacttgagatattgtccataaatcttgggcttagagaggattttctcctaaatgcatttggtggggaaaatgaccttggtgcttgcttaagggtgaatttctaccctaaatgcccacaacctgacctcactcttggcttgtcccctcactcagaccctggtggcatgaccattcttctccctgatgaaaatgtgtcaggacttcaagtacgcagaggagaagattggatcactgttaagccagtcccaaatgctttcatcatcaacatgggtgaccaaattcaggtgctaagcaatgcaatttacaagagtatagagcacagggtgatcgtgaactcaaacaaagatcgagtttcattggcctttttctataaccccaggagcgatatacctatccaaccagccaaggagcttgtgactaaggataggccagcactatacccaccaatgacatttgatgagtatagactttacattaggacaagaggacctagtggaaaagctcaagttgaatctttgacttccgaatgagattccaattgagtagttgtttgcagtacagaaaattaatttgcatatgaataacttatcatgatctttgtgtttgtatttatcagactcagtaaataaaaatatcatatcccactctaattctatgtaacactttactctgtatttttcttatctcaaatataatatatggttgagttattgcatatgggtcgattcaagaaagaaaatgaataatggggagtggcagtgttgtcaaagtggccagctttctcctctagttgccatagtgggatgctaactaaatctcactatttatgcttgaggaaaaaagataataataaacatgttttttttcttttct

SEQ ID NO: 98369 - DNA, 1906 bp, Glycine max
  Clone ID: PAT_MRT3847_59841C.1
gtggcgtcctgcctccggcgtgagcttggcggcggcttcattgatgtacagtaggagtctttctgaaaggttccaacaaagcacgatggcccgacactgtgggtgcttgtgcagtatagaatgcacccccagattcgggatttcccttctaggtacttctatcagggacgccttactgatagtgaaagtgtggctaaattgcctgatgagccatactacaaggaccctttacttagaccatatatattctatgacatcagacatgggcgcgagtctcacagaggtggatcagtgtcttatcaaaacatacatgaagcacaattttgtctccgactgtatgagcatgttcagaaaacagtgaagtctttgggtttaggaaagattactgttggcataattactccttataagctgcagttgaaatgcctccagcgtgagtttgacgaagtcttaaattcagaagaagggaaggatctatatatcaacacagtagatgccttccaaggtcaagaacgggatgtcattataatgtcttgtgtgcgtgcatccagtcatggtgttggctttgttgcagatatacgtcgaatgaatgttgcccttacgcgtgcgcgaagggccctttgggtcatgggaaatgcaaatgctctgctgcaatctgaagattgggctgcgttgattaatgatgcaaaatctcggaattgctacatggacatggactctcttcctaaggactttctggtatctaaggcacctgtttacacatcattgcctggtaagccttcctcaaatatgaggggcatgagatcaggtggaccaagatatagatcaatggacatgcatatggagtcaaggttaggaccaccatcagaagatgatgagaatatgggtgctccagttagctccagaaatgggaaccatcgtcaattgcggtattcaatggagaattctttagatgatgttgagcatgggggtgacaaatcaagagatgcctggcagtatggaatacaaaagaagcataactcatctggaaccatgggaaagagagacgtataaccattcgttatctgcagacccttctgcataacagggagattcatggactgtttgatttcttcattcttgtgatctcccactgttgaaagcccttcggccagatattggggctttcagcgaagctgtatgagccccatgagattctcagccttggaagagggggagaggagcatgcaatgttggataagccaaacctactttcttatcttgcacatatgcttgtgttggttcttacaaacttgggacacatagctggatggatgtgttgggggaagactgcagagatttgcaagccctatttttatatggagtgaatggattggagacaacatgctggaaagcggggggaatactcaattttgtatctcagaatgaaaggaaaactacatgataatgatttagggatctaaggaaggcagtttgctgtcaactactgaccttgtacatacaatgggttcacaacattattttagcaaattgtttgtttcatcatttcatgacaagctgatgaagtgtttcacttccaaaggagaagaaaggaaaatataggggttacccattttcttaagttacttccaatacaccgaaaatgtgcttgtatgaaaatttctatcatttatttattaatttatttattttgttgaagttttttgtctgagtaaaattttaagatacatacagccataccaacatcaacatgtatactgtttttatgctgagagggtggctcaagttttagccttcaacagctgataatgccttaattttccgtatatgttcttgtcaaacaatggtctgttttaccttacaaactgagcttacgcacttcaatgcaaaagaagcttcttaacct

SEQ ID NO: 98370 - DNA, 396 bp, Glycine max
  Clone ID: PAT_MRT3847_59842C.1
acatatgcacagactcctggtgtgtttcatccttgggcaattcttgattactttctgcaattaaaaatttttttcaacgtgaaacactgagagtatacactatgctaaacttttgaaaacacacactatacgttctctctatttgaaaataggagggacgcaacgtgagattcttactgcccttgtagacgcgaagcgctccccatgagaaatcactcatccaagcattggggaccatgaagtgctccagggaatggcacatgtcattggggggtgatgaagaacctgcactcctgttaaagactacaccgcacgccttggtggctgttaaccaccaaccctgggattcttaatgcgctatctgaaggccagcaaaattcgatgcgcacattgcca

SEQ ID NO: 98371 - DNA, 463 bp, Glycine max
  unsure (1)..(463): unsure at all n locations
  Clone ID: PAT_MRT3847_59843C.1
gcaatatgttactgggaaagttctattccaaggtcttctttgtgggttatttgggggatccttactacaaggtttctatgttaaatccttggccttgacaactgcagtatatgtcacagccatgttgaacctcatccccgctgtcacctacatcttgtctgttactctaagacttgagaagtcaaatcttggaacagcaggtgggatgaccaagttgctggggactttaacaggaatcggtggtgccatgatcctcactttctacaaaggaagaaggctatgcctctggtcaacaaacattgccttgttgcaccgtgagccatcatcacacgatgcccccataggttctctcttgttgggctgcatactagctnttgcagccgctctgagttactctgtgtggctgataatccagacaaagatgagcgaaaagttnccgtggcactattcaattgcagcttta

SEQ ID NO: 98372 - DNA, 239 bp, Glycine max
  Clone ID: PAT_MRT3847_59844C.1
attacatcttttttctgagcacatcagtgtttattatctttaactacctatctcgattctctcactattagaaccatgaatctcgctaaaaccggggctcaattcatcattccattcaatctaagctttcagttaagcgaatgccaccgacaacggcgaagcgagggtctgtgtcaagcttatgaaagaagggcggcaccggcggctgatgaaccctgaatgccttacaaaaacaacac

SEQ ID NO: 98373 - DNA, 449 bp, Glycine max
  Clone ID: PAT_MRT3847_59845C.1
ctctggccctttgcttcgaaacagttacatccacaattctgcaataatattatagtaccaatccaataataaacctcagaagctcttttgaggactctttttcacactattacaatctatgactctgtcccattaatcaaaatgtcttttttggagttttggcttcattaatccttaatccccgttgaatttcggtactgggtgtctttccttttcccctttctttccttgttccgtgtgggtcctttgaccaatgcaaaatttgtgatcttgatcaatgatcacctttcagtcacaattttgatgtttttttttagttccagtgcatgtaatttttttgtgagttcactggattctccattttctgtactaatttctaccatcccctcttgatatgcctccgttttttctagaagattcaactgttctagctaggaagttgcagtttt

SEQ ID NO: 98374 - DNA, 316 bp, Glycine max
  Clone ID: PAT_MRT3847_59846C.1
cggacaatgggggtggagagaacctaaccggcaaaattatttctttcccccccacaaagttttcaccaggggggggggggaaagcaaaaccctccccccaaaaattcaaaattcttaaaaataaaaaaaagggaaaccagggttgaactttaaaaaaaatttatcccccccagcttgggttcccctcaagcaactttatttagggggcctttttttattttagggccctattaccggggtttctaaggttcggacaaaattgggggtggtcattatgggaaattttatgcctttgctagctcaaaaccaaaaactg

SEQ ID NO: 98375 - DNA, 321 bp, Glycine max
  Clone ID: PAT_MRT3847_59847C.1
gctcctgacctttaaagcacgtgagatggtcagggcaagatcattaggagatattcctgcatgcaagccacggaaatgtgattacttatccgaaaacatgggcgactagcaaattttctctgtcgtcctgctcgttatcggagtcgaagataatgtcaccccatggtcactgcctcagtctaggttatatctagcatcgggagaaaatgatctagctaatggaggcggcttaaggaaaccacggatgtttaatagcatgagtgatgggttcttcagcaatactagcaagtccataacctcttggttattagcgagcaatgt

SEQ ID NO: 98376 - DNA, 1563 bp, Glycine max
  Clone ID: PAT_MRT3847_59848C.1
gcggcacgagagcgcattgagttgtggtcaacagagagaaagtaggagagaaaaaaaaaagcctcaccgacttcggcgaaatggatctgccgccggcaccgatccggtggcgcgcaaccgcaatcccattctttgtggcggttctctttgtatccaccatctccccttcgcgcgcaatctactgcgacgaagatgattgctacgatctacttggggtttctcaaagtgccaatgcttccgaaataaaaagcttactacaagctctccttgaagtatcacccagataaaaaccctgatccggaatcgcgaaagctgtttgtaaaagtcgccaatgcttatgagattttgaaggatgaggccacgcgagaacaatatgattatgcaattgcacatccggaggaggtgttttataatactgcacgctactatcgggcttactatggtcacaagacggatccccgtgctgtgttggttggccttcttcttattctttcaggttttcaatatctaaatcaatcaacaaggtataatcaggctgtagccatggtcaagaagacacctgcatataaaaataaactaagggcattggaacttgaacgcagtggaggggttacaaacaagaagaagagtcagaagaatatggacaagaaaacggaagaagaccttagcaaagaactcgatctgcagataactggagctgaaatgccctctgtatggaaacttcttggcgtccgctttgttctattaccgtataccttaggcaagctgctgttgtggactgcctgttggttttggagatacaaagtgaaaaagtacccttattccttggaagatgcttcttatctgacacaaagatccctcagtattcctctcgatagatggagaaatatagatgaagcaacaaaggaagatcttgtgctcagacgcttatgggagaaatcaaatctggagaactatgtagcagagatgcggaaagaatcgaagcgcagaagatagttgcattagtcggctctgctgcttttaaagtactaaattttgttgcaaattgattttcggggtgggggtgataaaagcagaattattcgtggcaaccacgaaattgtggaatcatatacgtagtttattacgtttacacatgctattgttgctctctaacagtctgtaaacaatgaacaccaaagaatactgctttagatattgcttttattctttcaatgaatcgggtacctgagcctcaatcttgctacaatcgcatgtttggtagtaattttgagtgcctctctagttcaataattttaaggataaagatgtatggataccctaatgttatttgacaccttgataaagtgatagagattggagaggaatgtaggtatgataagtgataagtgatataatttgataggatgaaagagaaagaatgagtattaaataggtgtttgtgacatatgagtgcctatatatcattgcctattaatgagattatatgaaatctcagcatgttacagtagagttatgacttgaatgaatctgtacctgaaatatatatcattcgacttttcc

SEQ ID NO: 98377 - DNA, 594 bp, Glycine max
  Clone ID: PAT_MRT3847_59849C.1
ggctcgagaaatagcagaaatgtaaccactattttcttctaaaagtcactggataacagtttattctcttaagtattactattctttttctaaataataaaattatatcagtagtctttgaagtattaaatatatattcatttatttagctcccaagtcaacatattttactaacataaacagaataatttaaaggatcttttaatactttagagattatatataatatgatttctaatactcaaatgattacttatattatttaaaagagtatgtaatattttaagtatgactgagggtgctcttgttaaatttaaaagtaaatataatttgaagggtaattcattttctcaaatttagagtatggtattaacagaaaaaagagaaaaaggtgagtaaattgattggtaagttgtaaaacgtgactaagggtgcacttttttaatttaaaaggaagcatcgctgtttagaattttaagtattataatctgtagctgattaaagtctataactggttatcaattgtcgaattgtcaccaacttgacatattttctaaacatactatgtgaaccatttaactggcagaagaattt

SEQ ID NO: 98378 - DNA, 121 bp, Glycine max
  unsure (1)..(121): unsure at all n locations
  Clone ID: PAT_MRT3847_5984C.1
gcgaaccgaaccgaaccggcggatctcggntgttccatagnaggctccanggcggcnggctccgccganttcttgtncncgcntctgagtgctggaaattggncggaatacatctaccaag

SEQ ID NO: 98379 - DNA, 872 bp, Glycine max
  Clone ID: PAT_MRT3847_59850C.1
cccgcgccgagtcggacgcgtgggctttccctgtctttcattgttttgttttaactgtttcgaatccctgcgcttgcttagggaggaaccgttgaagtggattgacccagtactgctttcaatttgctgctgaaggaaagggttgggatgggttgtgacttttccaagtacacagtgtgctgcacgggttcggagcaagatggtccggctgctgaggctcaggttgatggtggaaacgaagacaatgttgttgagggtgttgacttgccgtggtttcatgaattcacaattgaacagcttaggaaggctacgtccggatttgccattgaaaatatagtttctgaacatggagaaaaggctccaaatgtggtctataaagggaaacttgataatcagatgcgaattgctgtcaaacggttcaacagaaatgcttggcctgaagcgcaaccatttttggaggaggctagggctgttggtcagctcaggaaccaaagattgataaatctgcttggatgttgttgtgaaggtgaagaaaggttacttgttgcagaatatatgcccaatgatactttggcaaagcatttattccattgggaaactcagcccatgagatgggcaatgcgaatgagagttgctctgtgccttgcccaagctctagagtactgtaccagcaaaggacgtgctctatatcatgatctgaatgcttacagagttctttatgatgatgaatacaatcctagactttcatgcttcggtctgatgaaaaatagtagagatgggaaaagttacagtacaaatttggcattcactccacctgaatatctgaggacaggcagagttactccagagagtgtaacttatagctttggaac

SEQ ID NO: 98380 - DNA, 376 bp, Glycine max
  Clone ID: PAT_MRT3847_59851C.1
ggggccaaaggactaatcaactaccagctttatgaaacattgggcttcaactttgtaacaacccgtcataaaaaacaaacgggagcaaaaacctgacaaaaacataaaaagaagctcttattggaatacatacccggagtctaagtcttaagagggaaaaaaaaccttccttttttttaaaagttttctttccttaaaaggggtccctggggtttggttttcccactgggtaaaaaccctttgttggcgggccccgggctttttttggcccccatataacccctttgggacttttccccttcttttttttcccccttttttcccaccggggggggtttattaaaaattttttttttgccgccccctttaactcctt

SEQ ID NO: 98381 - DNA, 456 bp, Glycine max
  unsure (1)..(456): unsure at all n locations
  Clone ID: PAT_MRT3847_59852C.1
tacgcgtgggattaaatataggcggatttattttaatagtcatatttactgcttctganacgacggcagatataaacactggactaaacacgagaaaaatcttgctgtgacagaagaggagatgatggaagtgattagaaatagaggcattcctgctgatgttgttgctaagcgagctcatgaatttgaaaaacatggcgctcatgaaagcctcacggatcagatcactgctgttgacacgaaggattctactaaggctaataagattgcccaaattatgaaccttagacaaagtgttgatggtgatcctaaacttctgactgatgggaagtagcatgagggtaagcacattcctggatctaatattagtgcaggggaaaatcatgtagtccaaatacccttaatggcacatgaggaaattctgtgttctagtgcaagtgatttcagaactgcaat

SEQ ID NO: 98382 - DNA, 348 bp, Glycine max
  Clone ID: PAT_MRT3847_59853C.1
atagatagacaccgccggcggaacaccaggcacaccgagtgctccaggcaacggaagccctgtaacaagcagagcaaaaggaaagagaagagagagagacagagacggaaaggggcacagcagggaggcactaaccagaaacggaactactaaagatggaaggccagcatcatccagcgctaagggagatagaaaacctaaaacaaagcctaagcagaaagcaactcacaatactgtaacagtgaaaggccccctcgggaagcaaacagagcaaccaaaaccagcaatgccacccgtaccaaagacaaacgaaaagccaacaaaaagcaatgcaaaggaaaaggacga

SEQ ID NO: 98383 - DNA, 701 bp, Glycine max
  Clone ID: PAT_MRT3847_59854C.1
ggcaccatcactagaacatatagaaaaaccaagtaatactagccaaaatatgtctcccaaatacatgtcccttttcctcctagtaatactagggatggcttttctggccactacttcccttgctgatcgtcgttttctttcggtggaagatggtcatgatcaccatcaccaccacccaccaaaaaaacactggcctccaaccacacaaaatgaaccttcaaacgtagaaaacaaggagaacactgaggtggaggatggtcatgatcatcaccatcactacccacctaaaaaacactggcctcctaccacacaaaatgaaccttcgaaagtagaaaacaaggatggtcactataagcctccccacaagaagcatcctccttcgggaaattaattaatctagtgaagctgctacgtactaccatgcatgcactcttgtgaaaatatattagagtatatggtttaatcaattagagtccaatctcttggctcttgaaataaaggcatgcattaatccgatgttattttcttgtattagtgtggttgtttttgctttggtcactttggctttgtatttggttgaaataaagatgcacatgctacatgtatgcaatcatatatgttatcatttccttaattttctttgcagctttgtcaactagggtgacaaactattatttatgaaatgaattattacgtatttc

SEQ ID NO: 98384 - DNA, 362 bp, Glycine max
  Clone ID: PAT_MRT3847_59855C.1
aggacaaaaggaaaagggcccaaatttaatttaaggggccccttttacccaaaaatttaagggaagacatcccaattttaaaaatattgtaaaaacttttcaaacttgggatattctttttgcacctaaaacattgggaattctaaaaatgttccccccaggtccctgaaaaaatttcagcccttggatcaacccaacctttaggaaccaaaatttttactttccaaagatgctttgcccccaaatcaaaattggaaaaaaaatccccggtaaaaagcctccccggtagcattttcaaaggcgacctcttcaaaagccttggaagccaattgggcctttttgaaattctttgggttttggac

SEQ ID NO: 98385 - DNA, 973 bp, Glycine max
  unsure (1)..(973): unsure at all n locations
  Clone ID: PAT_MRT3847_59856C.1
gtttgttattcaaagcaaaagtttgatcttttccacatttccttctaatgttactttatatttcatctgtcaatttctgtcttatatgctatgacagtatgacttaaaatatgctcaaggagaatcattttaaactgttttcatccgtaagttactgattctgcgattttcattggacagtcaatattattagggtttgtctaacttgttattgctaacaatgccgtctaaacctatgacgaatgtaacatttgattttgttatctccagagatgcttaatcttaccactcgtctctggccggtggaaaaaaagatgcaatgtctcatccattatgcttgagatggatcggatactaagacctggcggacgtgtgtacatccgcgattctcttgatatcatggatgaacttcaagagattgccaaggcaataggctggcacgtgatgttgcgagacacagaggaggggcctcatgcaagttatagggtattggtttgtgataagcacttgctactctcttaaagctaaatggggtatattgcatgatattttctacgacccagcaagtggaagtcatcaacagaacatgtcaaaatctgtcactttagaagtgtaggaagatgcaagtgcaagtactactaggcatttgagaagtgcaggaagatgcaagaacacatccttacaaacgtgtaggaagatggtcagcatttattcatcgataccactattcatgagatccctaaagctggatagatcaggtgcatcatctaacctatttgtaaaattcaatttatttgtatattccaaagctctcgtggcttaaatatttnttgttgttcccacgaatacaagtacattcagtgttgatctttagaaattttttgngtcagtttgtatctctcttttcttagaagctccttttggaaccaagctagctggatacaaatcaaccagaacaaaaatatactagccg

SEQ ID NO: 98386 - DNA, 126 bp, Glycine max
  Clone ID: PAT_MRT3847_59857C.1
ggactacatcgttcgcttttggtcaagaagaaccacgcatgcgatctcctgcatgcaacgtagctgctcttctataaggacctcgatactgagatcgaagcccgatattttacaagataattgtcg

SEQ ID NO: 98387 - DNA, 626 bp, Glycine max
  Clone ID: PAT_MRT3847_59858C.1
ccacgcgtccgattctgtgacacacaaagtgattcatgtcaaagatgatgggtttactaggaggaaccaagaagccacatgctgttctgatcccatttccatcacaaggtcacataaacccatttctcaaactagcaaagctcctccacagcaacggcttccacataacctttgtcaacactgacttcaatcaccaacgcctcgtcaagtctagaggccctaatgccctcattggcttcccaaatttccaatttgagaccattcctgatggtctccctccctccaacatggattcaactcaaagcatcccagctctttgtgactctaccagaaagcattgtttgatcccattctgcaaccttatctcaaaacttaatcactctcatgcccctccagttacttgcattttctcagatggtgtcatgtccttcacaatcaaagcttctcagcagtttgggctacccaacatactcttttggactcacagtgcttgtgccttcatgagcttcaaggaatgcaagaatctcatggagagaggcctaataccacttaaagatgcaaactatttgacaaatgggcatttagactctgccatagactggattcctggcttgaagacatcactc

SEQ ID NO: 98388 - DNA, 257 bp, Glycine max
  Clone ID: PAT_MRT3847_59859C.1
gcttccagagctgtacttctcgtgagcttcaatgttcacgtcgtcaccgtggttagctccacatatgtgccattgaaaccacaccccaaaactccaaaacacccacctgtcccaaagccaccttccccaaagcaagcaagttgccccaaagacactattaagtttggtgtgtgtgctgctgtgttaagtttgatcaacgtgcaacttgggcaaccaccaaagaccccattgtgcaacctcattgagggtctcgctga

SEQ ID NO: 98389 - DNA, 259 bp, Glycine max
  unsure (1)..(259): unsure at all n locations
  Clone ID: PAT_MRT3847_5985C.1
gggaagtccatcacaacgacatatttatattcggcatagataacaccgtactctctaatatcccatactatgaaaaacatggatctggggtggaggaatctaatgaagggttgtagggtgaatgggttaccaagggcgacgaacaggaattgacagagactccccaaccctccacacgctctcngcctccggctcccccanngcnttnttgcnncgcccaccctttgnaaaatggnngtaanagacgcaaacntaaaaa

SEQ ID NO: 98390 - DNA, 340 bp, Glycine max
  Clone ID: PAT_MRT3847_59860C.1
ccaatggccgaaccgcgaatccacgagcactgtgtccttgacgtggtccacaccgccaccgctttatacaaagacccgctaggcccgctccttctgtcctgccagtaccctcccggtcctgtgcccgacacaaaagtcccgactgaggagacgaatgcaccgtggaaagcgaaccgtgaacgaggcattcgcaggaacagcatgcaactccagccaccaggagccgctgtccctaacagctatggacatcctgcgtcttgaggcatcgccccactgtctgctagtccctccccgtactctttgtggatcaatctatctttctccactagcaccggcgttc

SEQ ID NO: 98391 - DNA, 733 bp, Glycine max
  Clone ID: PAT_MRT3847_59861C.1
cggctcgaatcggctcgagggaaccttgaactttttatgataattgtgctggattgtattaaattttatgctaattatttgctttttacagttgtacatgacaaatgttgcattctctcttcacacagcagttctttatcattcttttttttaaaatagattctggatccatgttcctgataatggtcttccattctcaggatccagtgttgtgcagtgtgacagttggtgtttcccactttgacagatgtgccctttgggttcaagtattgtattacccattctatggtagtggtgctgtcggagactatgaaggtgactatgccgaagaggatcctcaaatcatgagacagaagagaagcctaaggcccgaattaggtgaacctgtgattttgagatgtcagccatataaaattccattgactgagcttcttttgccacaccaaatatcacctgttgagtttttccgactgtggcccagtttgccagctatcgtagaatatactggcacatatacatatgaaggtagtggctttaaggctactgctgctcagcagtatggtgcatctcctttcttaagtggactgaaatccttgtcttccaagccattccacatagtttgttcacatataatccgcacggtggcagggtttgaggtgtgtatttattatcttctctgcctgtctgaaatagtaaaggataagagcatgtttgtatttgctgtagaactgca

SEQ ID NO: 98392 - DNA, 466 bp, Glycine max
  Clone ID: PAT_MRT3847_59862C.1
ggttcaaaaattttttttttattaataaaaagtctgcccggaaaataaaaaaactacgataaaaaattcttcgtatcgcgatccaaattggaatactcccaaacggggcaattgaaccttaacttaatacaaccattttgtctccccaaaagggggaaactcactacaggcttaaaatcgtaaataaaaaatggcccactgcaacacttataaaggcccttggggactgctaaacttacactagcttacccactggaatagattggggcaacaaagttttttccattttcacaaaagggggaaattcaaccatatgagggattgtttcctttaaaaacctgggggttccccttaataaacttaaagttaaagttcctggatttacgaccagtcaaagctggggtgcatcacaaccagggggacggccgtccattaatcccttgaggtgccccatcacccttggggg

SEQ ID NO: 98393 - DNA, 176 bp, Glycine max
  unsure (1)..(176): unsure at all n locations
  Clone ID: PAT_MRT3847_59863C.1
aagatgttcacccaaggtctggacganagcgcaatccaatggatcaagcagggatcaaaaccaccacttgatgttgccgacangctcaccgatccattcccaccgtctcctcttttcagcactgctaacactcttaattctccccttctgcctcccttcaagttccacacaacata

SEQ ID NO: 98394 - DNA, 464 bp, Glycine max
  Clone ID: PAT_MRT3847_59864C.1
gatcactgtatgacgttgtccttctttgggggggggggggggaaaaatagccaaaggtttaatgaacccccacataaagaggattacgaaagagaccataagcgtgctagaaacggcgatgtaataaagggctgtacaaactcgtagggagttagggttctgcgttaataggaaacagacaccatagtaaatatggattaagcaagaaaaaaatagaatagggcgaacgttaacggttggaatacctgaccagagggtgtaagaacgggggaacttagaaaataatggaaaatggccagggcacttagggacggaggtatcttttgtggcgtgggcacccaggtaccaattggcggttctaaggtaagtgtacgtggtgggcatgtagtggtatgagtatggccagcagaatttagggccggactggttgtaagtagtggaaagagtcgtggggggatgtggta

SEQ ID NO: 98395 - DNA, 160 bp, Glycine max
  Clone ID: PAT_MRT3847_59865C.1
catgaaaggaccgtttgtgcagagtattaacgaatctgttgacaaatatcatggtgtgaacctgtatctcaagaactcggatgatactatcagagatgaaaaacttaatgaattgttcgctgaatatggtacaatcacctaatgccaaggcatgccagac

SEQ ID NO: 98396 - DNA, 365 bp, Glycine max
  Clone ID: PAT_MRT3847_59866C.1
accgcgcgctcgaccatgtgttggtaactgggtagtttactagtggttgtataatccagaggcttgttctcgtgctcgaattgcgactttattagggtcagctgcttgctgaatgagttacagattgagtaaaaattagtgctgaaatgctgtttgataggcagaacaaccaaaataactgcctaaatttctacggacccatctatagtcacacctatggaaaatgaccaggatgaaagcatgcattcaagagcacatgcaggagcatttgaggctgcatttaatgcagacataagtagagacacttgaactgatactctgtcttgttcagacacaggatgcaacacttgattgagccagtcatt

SEQ ID NO: 98397 - DNA, 1132 bp, Glycine max
  Clone ID: PAT_MRT3847_59867C.1
ccgccaccgattacaggatgcttcgaagcgctcgcagctcttccatccgcagcgtgcttgctgctcaggctcagcgtggatatgccacggaagctggcgccatcaagacgctcctcttcctcgagcaccgcgacggcaagatcaatccgggatccttgaacgctctcagcgccgcgacagcgcttggaggggacgtcgtcggcctcgtcacgggagagggagacgctgcgcagaaggtcgcagatgctgcaaagagccttccgttgaagagcgtaatcctgcagaagagcgagaagctcgctcatggactgcccgaacccttggccccgcttctcgtggatttgatcaagtctggcaactttacgcatctcgtcggcgcgcatactgcgcttggaaagaatgccttcccccgtgctgctgccttgctcgatgtagctcccatatccgacgtacagaaggttatctctggtgacaccttcgaacgccccatctatgctggaaacgctgttgcgacagtaaggagcaaggacgctatcaagatcttcacggtgcggacagctgcgttcgatgcagctgccgagagcggctcgggggcgagtgtcgaagatgggtctggcaaggaaggagaattgcagtcggaatggatctccgaagaattgacagtttcttcgagacctgatctgggcagcgcttcgagggtggtatcgggcggacgaggcctcaagaataaggagaactttgacaagatcatggaacctctggcagacgctctaggtgctgctattggtgcgtcgcgcgcggcagtcgattcaggctatgcagacaactcccttcaggttggccagactggcaagatcgtttcacccgacctttacttggctgtcggagtcagcggagctatccaacatctcgccggcatgaaagattcgaagactatcgctgccatcaacaaggatcccgatgcgccaattttccaagtcgcagacgtcggtctcgttggcgacctgtttgagctgacacccgagctcacgcagaaggtcagccagaagtgaggatgctctgcatgatgtgtacatattgcagatgtccagagcgctgttgcgcatgcagatcgataaaacgcattgctcgc

SEQ ID NO: 98398 - DNA, 110 bp, Glycine max
  Clone ID: PAT_MRT3847_59868C.1
cctttttctgtgagtgttccttgtgcttaaatcgcagcataaggcaacatggatctttaggaacactcctattcctgctggccctttatgggtgacataattcagttggc

SEQ ID NO: 98399 - DNA, 810 bp, Glycine max
  Clone ID: PAT_MRT3847_59869C.1
attttattcaactctattttattcttaaactatggaggattagtatagtaactttggcttgtatcggcctaggccaattgagaaaagttggatttcaggtgcagggtgtatggttgctgctatatgtggatcaacccagaaggagcctgttgtggtggggaaaccgtcaacctttatgatggagtttttacttaagaaattcaatgtaagttgctccaagatgtgcatggtgggtgatagactagatactgatgtattgtttggacaaaatgctggttgcaaaacacttctagttctttcaggttgcacaactcaatcagctctacaagatccttcaaataatattcaacctgactattatactagtaaaatttctgacatgcttgacttatcaggagcatgaattggttcttcccaatttagacattctttgatgatccattgagactatacaataatgctctacatacacacacttatatttaattttcacaatctaattatagctgatctcatctggatttctgatacatcactttggtgtgaggttgatgtacaccaaacattattaaaggctataatagttgttctcccctgtgaatcagaatcatataattgcaatgtactcagatttcgttacagaatatcagtcatgaccagggtgaaattacactttctgccatttcaataatatggcaccatgattatattacataaatgaggcattgtaagctgaatgaaaattttaatatttctaaaacaaaaaaaggaaggccagggtgggcgctctagatgaaggagcgtgcgggc

SEQ ID NO: 98400 - DNA, 877 bp, Glycine max
  Clone ID: PAT_MRT3847_5986C.1
aaaacacaaattacttatcgaagaaataatacaaaacaatgaagaccgcatcgttagcatcattggttcttattctcttagccttgagctcacaatcactacttggagaagttgaaacttcacctgagcaagtgcttgacacatcaggcaaagttctccgggaaggtgtcaattacaacattctcatatccatgccctacacaagttgtagaagtccacaaggccttggcctctcaaagattggtaactcatgccctcttgatgtcgtggttgtggatataaaccatcgcttgccacttaggtttatacctgttaaccctaaaaaaggcgttattcgtgtggctactgatctcaacatcatgttccctgatcgtaacgtgacttgtcctcaccattccacagtgtggaaggttgataattttcatgtttctaagggacataggttggtgaccactggaggtgttgttggataccctggtagggaaactattggcaattggttcaagattgagaagtatgatggtgcttataattataaactagtgtattgtcccagcgtatgcccttcatgcaagcacgagtgcaagaatgttgggatggttgtggatcagaatgggaaccagcgtttggcactaagtgatgttccctaccaatttagattcttcaaggcataaccaaagctcctctatcttgttatgcacaaacaactatttatatgtacttcctaataatgatgtgttcgttcaaagtttaatttatctggacatacctatgatgggtttccttgctaagaaataaataataaataagtatttggataaaataaaaaaagtgttttttctaaaaaaaaaaaataacctccctggggaaaacatcc

SEQ ID NO: 98401 - DNA, 518 bp, Glycine max
  unsure (1)..(518): unsure at all n locations
  Clone ID: PAT_MRT3847_59870C.1
aattcggctnnaggtttaagactgtgatttggcattgttgtctctgacaaattctctgatagttgaaacatttgagtttcttggtcatcaactaaaattctgcaacttattntntgagctngcagggatattctgattggatgattaataaatgtttactaacagattagcctttccattttggtgtatgacaggcagagtttcaactttcacataatatgctttcaattcaatgacttcaactttcacacattgaaattatggcatttgttggtatggacttgcagtttcttctgggactctagattgtcatctcagtgttcactatgtggaggcactgctgacctatgtttggncatttnnnctttgcccttaactttcaggaatggnnnnaggaagaatatcccatctatgctaatgggccaggttacatagnctcagctgacatagctcagttcattgtatctgaatttgagaagcgcaaattaaagtatgtttgcaaccatctttttcatcta

SEQ ID NO: 98402 - DNA, 210 bp, Glycine max
  Clone ID: PAT_MRT3847_59871C.1
tatactcaagactctactcctgcaagtgccaacacgaattcaactccacttgcaactacctcactatgcttcatccgccctttcgtcctttcattcctcttccgaagcgcaaaccggtctatcaatccatctcccgcttacaatgccacccactgccaacagcactctccacatctccaccctacaaacgtcacatacccattaccccac

SEQ ID NO: 98403 - DNA, 116 bp, Glycine max
  Clone ID: PAT_MRT3847_59872C.1
tgcgcttgaggttaagcctttttaaaaaccctttccaagaaatatcatgccccttctggtcgcttttcgcacccgaacccttctgtcgttttctcgcacccgtacggacgcgtggg

SEQ ID NO: 98404 - DNA, 476 bp, Glycine max
  unsure (1)..(476): unsure at all n locations
  Clone ID: PAT_MRT3847_59873C.1
catcactgtatgacgtcctccttctttggggggggggggggggggggggggggtaatataacgtacacggtggcgggtattgtagatccgagaggagaagcatggacggataacataaatgagattatagagggttacgttaacaagaacaagagaacagttggaagtggagggacgggtagaaaggggagaagagttaatggagtgaagtgaggtagggaggcgctgaaagaaattatatattaaggtaatgtaaagtggcaacgcggcaaccgtaaacgggttagtacaattgggactggtcaaagatcggatagatgtcgtaatgcgccgggtgtgcgagggcccacaaggcgtggtcggtaagaaggtggggagccagttagccncggggccgcagcagggaacattggcntgcaaaaagtaggtaatacagaggtggccattgagcacagggcttgcgatgtgagcggtga

SEQ ID NO: 98405 - DNA, 120 bp, Glycine max
  Clone ID: PAT_MRT3847_59874C.1
gaataaggtttgcactgaacttaaagtttcaacagggataagaggaccacctattattgaaataatcactgataatacagttttgcacccgaataacatataaaagtggtgggcggaaaa

SEQ ID NO: 98406 - DNA, 575 bp, Glycine max
  Clone ID: PAT_MRT3847_59875C.1
gaaacatcaacatggctgccaaactcactctatcttctcccctttccttcaaaacttcatttcttccaaaatcaccatcattttctccaggtttatgctcccccagaactaatgttactggtgtcaaagtccatgctaaattaggtggtggagatgaacaagccaagaacggaggcaagaagaaattcataacaagagaggaagaaccacaacagtattggcagacagcaggagaaagagaaggagagaatcccatgaagactcctcttccttacataatcatatttggtatgtcaactccttttgtaatcttggccattgcttttgcaaatggttggattaaggtgcctgttcgatgagacaacactttacttctcattctcaaacttcaccagagaaattctttactttttcacatatgttatggctcgttttaatgaacaaagttcacttatgaatgtcggtttgaagaaagcataaatgtggtttcttgttccaagaatagcacgtttctttttcgcatatatgtatggacattatattatggctcgttgtaatgaactagagttctgtcc

SEQ ID NO: 98407 - DNA, 1548 bp, Glycine max
  Clone ID: PAT_MRT3847_59876C.1
gatccgatgcgtccgcatttgcagcacaaaaacatcaacatggctgccaaactcactctatcttctcccttttccttcaaaacttcatttctgccaaaatcaccatcattttctctaggtttatactcccccagaactaatgttaccggtgtcaaagttcatgctaaattaggtggtggagatgaacaagccaagaaaggaggaaagaagaaattcataaccagagaggaagaaccacaacagtattggcagacagcaggagaaagggaaggagagaatcccatgaagacccctcttccttacattatcatatttggtatgtcaactccttttgtaatcttggcaattgcttttgcaaatggttggattaaggtacctgttcgatgagacagcacttcgttgtctactctactcctcgatcttcacatgttaattcacgaattttaagcactttacttctcattctcaaacttcagtagagaacttgtttctttttcacatatatgtatggacattatattatggctcgttgtaatgaactagagttcagtcctaccactataatagtcggattgaaaaagcaacttcagaatggcaaattaatatccttgtttcatgtatagaacgttggtgatccgaaaaccggaactaccagctaatataaaatggttggtaatccgactgttccatggaaaattaacaatggaattttttacaccttaagtttttctttctttctgctccttgcttataaaacaggaaaaagaaaatgggaagaggtttagatcgttggtatactatagaactactgttgttttttatttagcagaaactatggttggcatctctatcttattagcaatattcagacgtaatgatgtataatgaacagttatgcctaataattaaatatgatgtgtcaacactgatcattctgtcgtttttatacggggatttgtgcgagaaaaactagtgctatgaggcatggtctgggaaattttaaccaataagcttgaaaggttagtctcagttatcaaaagtagaaagtggtggaaacaagaagatacttgccacatgacgaaggtgtatacacagattacactagcactatgcatattatgtaatcattgtaatgtacatttaggtatcaagtttagctattgcctggggagcaattgccatttcacttctatatatctgccccttattttaaagcatttaaatggctattagttcttctgttcaaccatcgaattaccatgatagaatcagggcatttgccatttggcaatgggtcgatttcggaagctgatgacattatctgagatcacaacagagaacagggaaagaaagtcatagtacattactgtcagccactatatgctagagtaaccattgaatcttcatcacagcatgtgcagtaaagcattttcaattccaaaacatatgaccttgaaagcaggatagctactatgagtctatgaatatgtattgtatatattgactgccagaataaaataatattcccataaagaccaattttacatg

SEQ ID NO: 98408 - DNA, 266 bp, Glycine max
  Clone ID: PAT_MRT3847_59877C.1
caccctgcggcgcacgtgatacggcgacagggagcctgatgggcggagaagaccatcagccctctcgagaggagcccacgactgccgatgaactggtggcccctctcacggtgctcagtgagcaacagaaccgctgatgtcaagcacccagtgactaaagaagaactagcgctccagggggccgagctgagagaggagctggaccacacgaagtctaagctaggcactggccgaaaatgaacaacggccctgctgggaaaacccta

SEQ ID NO: 98409 - DNA, 264 bp, Glycine max
  Clone ID: PAT_MRT3847_59878C.1
aaggaagaacacaatattgcgatccgtaaataagtacataaggaatgaaaatattgggatcgactcaaaaaggttctttcttttgggaagaccgaaaagattttaaacaaaagttattctaatttaaaaagaaaaaaaaattttttttttagatgacgaaaggatgaaaaagaaagcccacatatacatatatatttatatttatatatatatatatataacattttatttatggggggaggtatagctaaccttgcttgaggt

SEQ ID NO: 98410 - DNA, 168 bp, Glycine max
  Clone ID: PAT_MRT3847_59879C.1
aaaaagccaaacatgtcatctaataaagaagagtaagctacattgggtgactctgttactactacggggtaagccaccgacggtgttgagtacgacacgaattttctctgtagctaatcccgggtaaggtagtacatcattaaaaatgggggcactaaatagcccatt

SEQ ID NO: 98411 - DNA, 924 bp, Glycine max
  Clone ID: PAT_MRT3847_5987C.1
gggaatgcagccccaatcgggcggtaaattccgtccaaggctaaatactggcgagataccccattttttgtcccaaatcaaaaccctagaatcaatcatcttccactacaacaacttctccggcaacctccctccctggctcccttctctccccaacctctacagagtctccttagacggaaaccgcatctccggcaccatcccggactccttcggctccttctcggattcactgaagttgatgaccttctccgacaaccgcctcaccggggagattccggcgacgttggcgaagctggactttgatttcgtggacttgtctcagaacatgctggagggtgatgcgtcggtgctgttcgggtcggagaaacacacgctgcagataaatctggcgaacaactcgtttgcttttgatttcggaaaagtaagggtgtcaaagaccttgttgattttgtatcttagtcacaatcgtttatatggggcgctgcctgagggacttacgtcgcttaagaatctgggcacgtttgatgtgagctacaatgaattgtgtggtaagattccacggggtggtaggttgcaaaaaattgatgtttcttcctattctcataacaagtgcttgtgcggatctccgcttccaaagtgcaagcacttatagagctcaacactacatagttcacttgcccttacgagaaagggtataagaataagagaaattcttacgagaaattctttgtcctcttaagcttaatgttaagctactttgctatcaatttaacgcgtcacgtaattgtgtatgtgacactatgtaattgtatcgcacttttattttatcataaattaatcttgaaagttttttttatacataatacttgtatatcttaaaagttgtagacgttttctttcatttgaaagagacgaaagaat

SEQ ID NO: 98412 - DNA, 402 bp, Glycine max
  unsure (1)..(402): unsure at all n locations
  Clone ID: PAT_MRT3847_59880C.1
tctcacttctcggatgccctaatttatcatgtcagcgcttaacacctgtggttacgtctctacccttttttgggttcctctcattaccgaaaccgaaacagaaaccatttgtggtgaaccagtggatctcgaaggtcaaagatggccagcatcttctcgaagacgagttttaacttctctaggaatatgtgctcttcttcgattcctcgctgtcactccaaaaccctctcttgcccagtctttgctttgtttattttacccctttttttgtttattaaataggaatctgattatgcattttgttcccatcgccttttcgatccaagcctctgttcttctcacggttntgtccctttttcttgggatttttttggggaaacaaaattcttaatcctctctttg

SEQ ID NO: 98413 - DNA, 444 bp, Glycine max
  Clone ID: PAT_MRT3847_59881C.1
caccgggaacctttgggggcccccatcattttttttgacaaaattccttgggggaaaaaacggttttaaaatgaaaaatgtcccccccaaaaacaaaaaaaaaaaaagggccccaattttttaattttggattcccaaccccaggggattaaagtccctgttatttgcccaggaataggtttttttgcccctccaaatcccccatgaaaaaccctgtccttaaaaaaaaaaaaaaaaagtttttttgattcccctaacccccctctcaggggggaaaaactcccccaaattaaattcctttcccatttagcgttaaaggaaaaggggcccctgaaacttaggtttgggccccccaaaaaaaaacccccggggggttttcccactaactagggcccccctacaataaagggtcaactggggccccgggttgtccccccccaaaaa

SEQ ID NO: 98414 - DNA, 470 bp, Glycine max
  Clone ID: PAT_MRT3847_59882C.1
tccggcatttgggctatgatggctgccttggtgaaaagagcccgggatgcttcacaggatcgatgataccctccatgtgaggagcggcacacagtatatatgagcacgaaggtagaacaccatggggagcacaagagtgaacacaggggagaacaccatggtgagcagaaagagcgaacactacgggacatcagcaccatggggagcccatggatcgacttgtgcataggatcaaggacaagagccatggtgatggccatgacgagggggagaaatagaagaggaaggacaagaagaagaaggagcatggcacatgaccatgatggtcatatcagcagcaaggacaagagacttagatcttatatgtgagcgaggtgtacggtacgatggtaccgaggagccagaaggcctcttgctggtttgtgatataatacaatataagttacgattccggaaatatgggtgtagct

SEQ ID NO: 98415 - DNA, 615 bp, Glycine max
  unsure (1)..(615): unsure at all n locations
  Clone ID: PAT_MRT3847_59883C.1
ggcttgaaagttcatctggtcgcgttgcttcacgtgatatagtccagtttgttccattccgtgacgttcaaagtggagaaatttcagtagttcaagcacttttagctgaattacctactcaatttttaagttacatgcggagcagaaatatcctaccgaattcctagtcatggctcgagtgtacattaaaaaaatgttctattcattgatattgtgcaatttccacgccccttccattttcgatatagggaaaaaatggctcaagggctgagaactaatgctttgtactaaatgttaatgttaattaacgggtcaagatgagttcctcagtgccatatagttggaatttccttttcttctcatgttttgggggttttatggtgggtcatccccaatataatccaccctcgtacaagaataactctattctcattttattttgaacatgttaatatatttattttttaatacttattnaaaaaaaaaaataatgcaataattgacttacctgcgaaaaaaattcgccaaataaaaaaaaactgggaaaaaaaggttaattttgtgaaccacacaatttgaaatggtgcatcgacttaccttctggggggggccccc

SEQ ID NO: 98416 - DNA, 616 bp, Glycine max
  unsure (1)..(616): unsure at all n locations
  Clone ID: PAT_MRT3847_59884C.1
attcgnngctcgaggcagtatccatactgcagtcttgcccagagctcctcttggtgaggacagaccgtagcctatactatggaagactagtagacgcctagtgttgttttgcagccctttgctgtgtcccggatcgagcacagaccgtgcctcagtctctacagattgattccgggaacacctgtagtccaatttgcaacacacaccatagccatggagctagcgaagacaatcctcatcgagacgaggacagaaagcccttagatggactacgacgacgatcaatccgatcgctagccatctaccgagcctctgcaccagcttgacaatatgaaggaggatgtctacgagtggcgcggtcaatatcggacgcagacgccggactacgacactgatccgtcgaggacggagccgcggtgatggctgaacatgatgagccaccccgggaagcaggcggcggatccggagcttgacgacgaggacgaggaggggacatgctccggagggggggttcgacgagggggacgctgggaggaagaggaagaaaggtaaggaggggggcagtgggaacaaggacaacaggatgaagggagagaagagttttgggagtggcggt

SEQ ID NO: 98417 - DNA, 183 bp, Glycine max
  Clone ID: PAT_MRT3847_59885C.1
ccttacttttctcattttatgtaacactcttcagaatgaacattgtaacttaccgaattagcacacctaacacacactctaaaaccaacgataatccatttaaaaataatacacaactatatcttccattcattaccacactcaataacctcataacaaattccattcctattccttaaatct

SEQ ID NO: 98418 - DNA, 142 bp, Glycine max
  Clone ID: PAT_MRT3847_59886C.1
atgaccaatacgatgaagattcgattaatgttgaggctcatacagctgagacattggggactcatgaggactagtggactcttcacgagagggagagactgatttatatcatggcctaggagaaggccacccaagtagcacc

SEQ ID NO: 98419 - DNA, 496 bp, Glycine max
  Clone ID: PAT_MRT3847_59887C.1
ctcgagtatgggatagtgagcctgacgtcagagattgggggtctcgcatgggaatgcgcagctagatgccagcgaaatgcgccattgttacatatgcattactgcactgactgagtgagggtatgtctaccgaagcttttaaaggatgtgtcaagcactacttgctggtgctatggaataactttctacaaaagctctgaaggacctgccaaaaggcgctcatgttcagatatctatagttgccaccactgaataagaaaatattgtcgcttgacgtgcgcataaatgctgagctcactctagatcacactagcgtgtgttcagcacctgctgcaagcatatgctgtgacggctcactctaactctctgaagaccccacggaagaaccagagtctattcgatacagatactatttctgaggatgacaatctaacgacctctgaatccgatccagacgattatgacgacaatgctcttattgtcgtggctgatccac

SEQ ID NO: 98420 - DNA, 503 bp, Glycine max
  Clone ID: PAT_MRT3847_59888C.1
tggaaaatgatctattcctgtagctggcctgtttatcagatctataatggcatgcagcccaatttcaccgccattattgagcattgcaatctttggagaaattttgatgatattcaagattcatgggctagcttggaaagtataatagattattacggtaacaaccaagacgtgattgtaccaaacgcaggtccaggtcattggaatgatccagacatgttaatcatcggtaattttgggttgagttatgagcagagcaaagtgcaaatggcgatgtgggcaattttagcggccccccttctcatgtccgttgatttgcgaaccatccggcccgagtacaaagctattttgcaaaaccgcaaaataattgctgtcgatcaggatcctctaggaattcaaggtcgaagaatatacaagcacaaaggaattgagatctgggctagaccaataacgccaatctctcagcatttcttctcttacgccattttattccttaacagacg

SEQ ID NO: 98421 - DNA, 325 bp, Glycine max
  Clone ID: PAT_MRT3847_59889C.1
gccgcactaccaatccacatcactgaaggaaattatgtgagaaagtttagatgtcagcattgattatgatgcatgtacaattccaaatgatcgtggttcatcggtcgacgccaaggtgggacatcacacaggattagttgctctcaaggatgcgggccgaggacgtagtgtggtataagtccacaagatcctctcgggtgaaacaggtggatgggaaaactgtctttcccccagggcactttccgaagtgttaagagaatgcctctctctatagggggaggagctggcccaaaataacgctatctcatgaatatgccaaatgctg

SEQ ID NO: 98422 - DNA, 463 bp, Glycine max
  Clone ID: PAT_MRT3847_5988C.1
acagataataagcaaacacccctctattattaaaaaatggggacaaatgaacgtatctgaaattgcccaacacctaaaataaaaagagcacagctaatttttttcaaactaaagaaaaaccgcaaactttagaaccactttaacgaagagtagattgccagaacaaattgtaacacaaaaataaaacccacttctttgtgtgaccagagatatgccttgttgaatcaacgcccccactctaacttggttaacagcccgagaaggatggacactgtccgcaaacccatactgagaggcggaaaaacataatcctggagagtgggaattacacagccccggatgtgggctctacaaaccaggttccacagcaacctttgagcggggcacaaaaccctattttgaacgggattgaacaaggacataacagggcttgaaaaagagcgaaaatggccctcttaacacc

SEQ ID NO: 98423 - DNA, 466 bp, Glycine max
  unsure (1)..(466): unsure at all n locations
  Clone ID: PAT_MRT3847_59890C.1
ggctcgagcgtgactacattgggcgtttggagaatatatacaggaatggacgcaccatctgcccaatgaagtgatgagcagcccaatgggagctctgatattgcctatgatgcacaatcttgagacaacactgaagtctggtggagtccctaaagaaccacaattgaagcctgcgactgctctgaatgtgtcagctaacacccaaaagaactcatgtgccttcaactcatccaatgagaatggggtgagccgtccggtgaacacggaagggactggcaacgatgaaaactataaggcagtaccttggtgaaacacaacagggcaaccacaaaagacatgactaagtggtgtcacagcagaccctcttggatatgcacgcagcaagggtcacgatgagattctanaagagtctgctgcagcttggcgcgtggacaatgcgtgctagtgaggctgcagctctagccac

SEQ ID NO: 98424 - DNA, 482 bp, Glycine max
  Clone ID: PAT_MRT3847_59891C.1
caactgagttgagaggtccggttaactacaagtatacagatttgaaagctgcaacaaaaaatttcagtgttgaaaataaacttggagaaggaggatttggtgctgtatacaaggggatacacagcacctgagtatgcaatgcaaggccaattgtcagagaaggctgatacctacagttatggtattgtggtcctagaaatcataagtggtcaaaagagtaccaatgttaagattgatgatgagggtcgtgagtaccttcttcaacgagcatggaaactgtacgagagaggcatgcaattggagcttgtggacaaggacatagaccctaatgaatatgatgctgaagaagtgaagaaaatcatagaaattgctttattgtgcactcaagcatctgctgcaacaggccaacaatgtcagaattagtagtgctactcaaaagcaagagcttagtggagcaactgcgaccaactatgcctgtgttt

SEQ ID NO: 98425 - DNA, 2319 bp, Glycine max
  unsure (1)..(2319): unsure at all n locations
  Clone ID: PAT_MRT3847_59892C.1
ggcttgcctgataatcagaccattaatatcagaccctatttaaaagaaggaggttcaagcaagaagtgggccattataggtggtgtcgtaggaggtgttgttctcctccttgtgttgtttgcctgtagattgtttacaaaacaaaagagagttcccaaagctgacatattgggagcaactgagttgagaggtccagttaactacaagtataaagatttgaaagctgcaacaaaaaatttcagtgttgataataaacttggagaaggaggttttggtgctgtatacaagggtactctgaaaaatggaaaagttgttgctgtgaagaaactaatgttggggaaatcaagcaagatggaggatgattttgaaagtgaagtgaagcttataagtaatgttcatcatcggaatctcgttagacttcttggttgttgcagcagaggccccgagagaatcctagtttatgaatatatggcaaatagcagccttgacaaattcttatttggttccaaaaaaggttccctcaattggaaacaacgttatgatataattttgggcacagcaaggggactagcatatctacatgaggagttccatgtgtccatcattcatagagatataaagaccggtaatatccttctagatgattatctccagcccaaaattgcagattttgggttggcaaggcttttgccaagggatcgttcacatctcagcacaaaatttgctggaacactgggatacacagcacctgaatatgcaatgcaaggtcaattatcagagaaagccgatacctacagttatggtattgtggtcctagaaatcttaagtggtcaaaagagtaccaatgtaaaggttgatgacgagggtcgcgagtaccttcttcaacgagcatggaaactgtatgagagaggcatgcagttggagcttgtggacaaggacatagaccccaatgaatatgatgcagaagaagcgaagaaaatcattgaaattgctttattatgcactcaagcatcagctgcagccaggccaacaatgtctgaattaatagttctactcaaaagcaagagcttagtggagcaccttcgaccaactatgccggtgtttgttgaaacgaatatgatgaatcaggaaggtggcagctctcctggtacatctaatgctactatctccatttccgttctatcggccagatgattattggatcaatgtggtaaagggtcttgatgaactgaatcaataagcaacagaataaaatggataaagattgcttttgattccagttgtttaattgtcaactgtttaagaatagctatgttgcaaagtagagactactgtgtggtgttgttgatttattagtagagtataaaattaaggatgttttgtcaatgtgtgatgctacatattttctattttgaacagtgctctgtcactctccgaaatgtgtcgcgtgctttttttcctgcatcccgtatcttatatctctacttactatttttcttttttcttggtcaattaatcatatatacatactattaaacagggtactctgaaaaatggaaaagttgtggccgtcaagaaactagtgtntgggaaaatcaagcaagatggaggatgattttgaaggtgaagtgaagcttataagtaatgttcatcataggaatctcgttagacttcttggttgttgcagcaaaggccaagagagaatcctagtttatgaatacatggcaaatagcagccttgacaaattcttatttggtgacaaaaagggttccctcaattggaaacaacgctatgatataattttgggaaccgcaaggggtctagcgtatctacatgaagaatttcatgtatccatcattcatagagatataaagaccggtaatatccttctagatgatgatctccagcccaaaattgctgattttgggttggcaaggcttttgccaagggatcgttctcaccttagcacaaaatttgctggaacattgggatacacagcacctgagtatgcaatgcaaggccaattgtcagagaaggctgatacctacagttatggtattgtggtcctagaaatcataagtggtcaaaagagtaccaatgttaagattgatgatgagggtcgtgagtaccttcttcaacgagcatggaaactgtacgagagaggcatgcaattggagcttgtggacaaggacatagaccctaatgaatatgatgctgaagaagtgaaagaaatcatagaaattgctttattgtgcactcaagcatctgctgncacaaggnncaacatgtcagaattagtagtgctactcaaaaagcaga

SEQ ID NO: 98426 - DNA, 400 bp, Glycine max
  Clone ID: PAT_MRT3847_59893C.1
tgcaggatgaaccatccagaagctcatgttgagttcggggacagcgatcgacgaccagctaactgaaaggcacgatcttgatgctacagagattggaaaggcacacgggtactactagcacagggcattggatgggatcacccaaaccattctatggacagtgctggagcattgtggtgagcatgatcaacatgatgatgtggtagatgacagactcaagagcgttgcgattcataggacaacttcattataatgtgaggtatgagaggttagaggaagaggcacatatgagagagctagaatgtatgcttcactagacactctgctacaagaggacctactgacggctgatggtgtggacaccatcctgctattaaatgtgtacctaactgagtataga

SEQ ID NO: 98427 - DNA, 2054 bp, Glycine max
  Clone ID: PAT_MRT3847_59894C.1
ccaagcgagaactgaggtgagacacacccttctctcttccaaattcgcgctgctacttaatttttccttcttcgtcatcatacatgcatgatgaagattttcaacccttctgaatgctttcttcggaacgtggtatgtccatcggacaccatcttcctgaaaagcataaatatttctcatcgtctccatcctctcctggcccaattagctacaccacaattcacttaatttactgtaccactactacttgttctccgatggatccggaaaacccgtcgatttctgccacagccgcggcgtcacccaccgcgatctcaagccggagaatctgctcctcgacgagaacgaagaccttaaagtctccgactttggcctgtcggcgctaccggaccagcgcagatccgacgggatgctcctcacgccgtgcggcacgccggcctacgtggcgccggaggttctcaagaagaagggctacgatgggtcgaaggctacagatatttggtcctgcgagtcccactgggtattcttttttactttgcatcttcttcatcatacatgcatgatgaagattttcaacccctctgaatgctttcttcggaacgtggtatgtccatccgataccatcttcctgaaaagcatcaatctttcccatctgggtgtttcccatctctacctattcagaatgtccattctctcctggcccaattagcatctacactacaccccaatacaacactatggtgaaaatgtgatgagaatttacagcaagtctttcaaagccgattatgcattccccgaatggatttcccctgcggccaaaaacttgatctccaatttactcgttgtggacccgcaaaagaggtattccattccagacatcatgaaggacccttggtttcaaattggcttcttgaggcccattgcgttttccatgaaggagtctgcgcttgaagataacattgatttcagcggggatgatgttcctagtcctggtagtgatgatggtaatagcagcagcaacaacgaggatggggagttgacgggggctaagcctgctcgtccgtcttacaacgcttttgagataatctcgtccttgtcgcatgggttcgatctgaggaatttgtttgagacgaggaagcggtcgccgtcaatgttcatttccaagttttcggcttcggcggtgatggcgaagctggagggggtggccaagaagctgaactttagggtgacggggaagaaggagttcatggtgaggatgcagggggcgacggaagggaggaaggggaagctggccatgacggtggaggtattcgaggtggcgccggaggtcgcggtggtcgagttctccaagtccgccggagacacgcttgaataccttaatttctgtgaggaccaagtcagaccttcgctcagggatattgtgtggagttggcaaggggacgctaattgccaccagtaactattcaattcaatttagattattgcagcatgtaataaatatctggagtttgggatgttgattgaacataataagaattaagaatcatcttgattgacccttcttagttcttattatttcctcctcttaagcttatgactttctgttgtatttctttttaagattaagagttaagacagaggacatcccgttaatctgtatgatgtcagaatttgttctatgctagactactcgatctggtatttcagattgttcctgcaaaacggcaaaagagattgctaaattggtattacaagtccaagccaattactattcaaaagagattggtaatttggtgggattataagtccaagcctctctggttattcaaaaatatttatctgtacagcaatatattgattgccttaggtttctagtataaaatagctctctaggtattcaaaaacatttatgttgctatattttttatgttcttttgctcatttgctatgttgctgtattttttacaattattaccatttctatttttcttcacttcacataaaacctcccaactagttctctctctctctaaaggaagatggaataaaaattg

SEQ ID NO: 98428 - DNA, 398 bp, Glycine max
  Clone ID: PAT_MRT3847_59895C.1
tttttttttttttttttttttagactctaaatcagctctttattattaatgccggatctgggtttaggatgctgtggaaagcagtaaagacattcctagatgtacgcacagtggcaaaaattcatgtgttaggtttcaattatctcagtgtcctgcttgaggctattgattcaagtaatttgccaacttttttgtgtgttaattgcacatgttctgattatggaggttgtctgatgagtgatcgagggccctggaaaaatccagaagtgttagaaatgattcaggttgttaatttgagagaagagattgatggtaaaagcgaagatggtgatgtggatatagaagattcctcgatgcccaaaaaggttgatatgcaaaacaaagatggcaattctctc

SEQ ID NO: 98429 - DNA, 757 bp, Glycine max
  Clone ID: PAT_MRT3847_59896C.1
cattgatttcagcggggataatgttcccaatggtagtgatgatggcaatagcagcagcagcaccaacgatgatggggaattgactggggctaagcctgctcgtccgtcttacaacgcttttgagataatctcgtccttgtcgaatgggttcgatctgaggaatttgtttgagacgaggaagcggtcgccgtccatgttcatttccaagttttcggcttcggcggtgatggcgaagctggagggggtggcgaagaagctgaactttagggtgacggggaagaaggagttcgtggtgaggatgcagggggcgacggaagggaggaaggggaagctggccatgacggtcgaggtattcgaggtggcgccggaggttgcggtggttgagttcgccaagtctgctggagacacgcttgaatacattaaattctgtgaggaccaagtcagaccttctctcaaagacattgtgtggagttggcaaggggacgctaattgccaccagtaacgcaatggagttactttccgttatgtcttaatcttttgcttgtttccattatcacaatccgtttgggtttagatttattacccatgtaatgtaatattcttagttcttatttcctcctccaagcttatttatttatgactttcttttgtattccttaagccagagggcatcctgctaatctgtatgatgtcagaatttgttataatactagctagtactggtattttagcccaaaaaaaaaaaaaaaacccaacc

SEQ ID NO: 98430 - DNA, 214 bp, Glycine max
  Clone ID: PAT_MRT3847_59897C.1
ccaatgatagaagtcctgttccagtatgctttaacataaagttttcatcagcaaacttctttccataaattgattctccacccataccatagccatgtgtaaaatcacctccgttgagcataaagcctggaataattcttcggaatgagctacctatgtaatggagaggcttgccctcttacccattatctttctccccagtgtaaagtactct

SEQ ID NO: 98431 - DNA, 406 bp, Glycine max
  Clone ID: PAT_MRT3847_59898C.1
ttttcacgcgtacggccacgcgtacggaccacagagggggacatcacagaacacaaacaaaggagaacaaaacccttagccaacacagccatggtggcacacctgtgctattcagcaatccaggattcactgggcaaactggtctgagagcagttcaatgagttcgtccgcaagacccgaggcaccggcaaaggtcgcactaacatgcaccggaccgacgagagtgctccttacagcatttggtatggacctgaccgatccaagaacttgggtccattatcggagcatgttgcatcatacctgaccggataattgcctggtgactacagatgggacactgttggattattagctgacgcggaaaccttagtcggaacctgtagctggaagtgattcacaatatatg

SEQ ID NO: 98432 - DNA, 756 bp, Glycine max
  unsure (1)..(756): unsure at all n locations
  Clone ID: PAT_MRT3847_59899C.1
tttttttttttttttttttttttttttttttttttttttttttttttttaaaaacaaaaaaaatacccggagctttctaattaaaggaaaacccagttttatttcactttaaaaaaagaggcccaggaagagtttcaaacccccacaagcagaagggagggaacaccaaatcccctccctttatcccaaccccagggggaactatttccatagacatatttttatatccgggaaaaccattagagggaacccaaagggaaacccccttgaaatttaaagcctgggaacaaccccaagcggggggaaggggtccaattaaaaaacccacccggaaaccgcggaattgggcgcgcccagcagcaactttagcagaagggacggggttccaaaccctccccgggatttggccctcttggaaataaaccccctcttggaaagcaagcccgccgagagccccagaaacggcgccaacggggaggccagcgccgaggcccatttgggaaccctggggctgggagccataggggggggagtaatcagggggggcaaagggcccactaaacccagggaaacggccaaaaaagggcctaggagggggaggggaaggcccccccaaaatagaacccgggaaagtccccaaaaaaggagccggggtaggaggggtaagggagaggggggggcaaagggcgcctctcccctcccgcgggcgtcgctgccggcggcggcgccgcgcgcgcngggcgcgcccccgcgcac

SEQ ID NO: 98433 - DNA, 335 bp, Glycine max
  unsure (1)..(335): unsure at all n locations
  Clone ID: PAT_MRT3847_5989C.1
gcgaattttttccatttcagtctcatggtagtgtttgtaagcattcatggtttgcacgtttgagacgcactttcagaagaaaaaaaaagtatgttaccttgtactcttgcattttctctagttcttgttttccgaggtgaattgggcctattgagatgcactgaggagtataggcatcctccttcacctttcggagattcttaggagccttgtagatggtgtgcttagacaaacttggcgcttctaggacttcaatgtggatcacatgtttcaccatcttagtcatttcttcagaaagaggaagatattctcggtagcaaaaaaaanaaaaaaaa

SEQ ID NO: 98434 - DNA, 281 bp, Glycine max
  Clone ID: PAT_MRT3847_598C.1
ggaatactattacattctgaaggggaagggtcctgctttgaatacataaaggacaactgggaagttgttgaatgtggattgatttgtcacatccttatatagacaaaccaaatgcctattataaacatcatacaggtcatcagaaaaaaaaccactctccctgaagtcagaagattagataaacttccattttggcagaggggccccattatactcgccaaggggtcccaaaaggggcataatgatctctcctaggcacaaagcagcgaactctttgtgac

SEQ ID NO: 98435 - DNA, 1111 bp, Glycine max
  Clone ID: PAT_MRT3847_59900C.1
ggttgagttgacgattgaagaagaagggagagagtgtgtgtgtgtgtgtgattcacattctgatcttgaattgaattcatctccaactccatggctccggcgatgaggatcgttttcggtcttctcacttttgtcaccgtcggaatgattataggcgctctctctcaattggccatcatacgaagattggaagactcttacggcaccgattctttgccatttagaagattgcgtggactcgacactgatcgtcaccttcaattgccaagaggtgttcctttttggaataatgacaaggaagcagaaatcttacgccttggatatgtcaaacctgaagtgcttaactggtctccacgaattattttacttcataacttcctgagcatggaggaatgtgattatctcagggctttagctctccctcgcctgcatatttcaactgttgtggatacaaaaactggaaagggaatcaagagtgatgtcaggactagctctggtatgtttttgaattctaaagagagaaaatatcctatggtacaagcaattgaaaaaagaatttctgtctattctcaaataccaattgaaaatggagagcttatgcaagtcctgaggtacgagaagaatcaatattacaaaccacatcatgactatttttctgatactttcaacttgaagcgtggtgggcagcgaatagccacaatgcttatgtatttaagtgaccatattgaagggggagaaacatattttccattgggaaatgcagttctttgctgctgtggggggctgcttggccaggcgcttccggtgaggccgcttggaggatgtgcggtgctctccggggggatggggccggctggccagtcggatccggctggtgtccctgactggatgtgaggtaatctctcggctggtgcggtcacccgccaagtggtcgcggctggcgtctcccccgcgatttttgtgctggcgacatcttgtgcggtgtgtctcagcataaacatttgctcgggttggccttccccccttatacttctgctcatgctgattttggttccgccaggtttggctcttgctagtcctatccttccgtcaattatcgcccgctcattta

SEQ ID NO: 98436 - DNA, 397 bp, Glycine max
  unsure (1)..(397): unsure at all n locations
  Clone ID: PAT_MRT3847_59901C.1
cgaaaagaaagagcaggctaagcgcgttgcggctgaaaacggcgttgtcaacccttcaggtgcgatgatcgctgcttttgcaccaatgtacntcgctgccatacctgttacttcatacctcacaaaaccaaacagcgtgatgcagtccttggtgcacgctctcatcaagttaattcctggagttactacaacagcaataacatccggtcgcgctattcccgcactctcagccatttacctattctggactttcggcgcctcgggtgctctctctgcggcagggcaagccatgggacgagaagagggcctggacattgagcactcgagaaaacatattcacaagctggatgggttgccgttgaggttgagaagtgcgcattatgcactcatggaaaac

SEQ ID NO: 98437 - DNA, 937 bp, Glycine max
  Clone ID: PAT_MRT3847_59902C.1
tacggctgcgagaagacgacagaaggggaggaagaaccaataacagaggaatccaagttcctttctagggaccgcgattcctcattcattcattcatatgcttcttcaactttctcctctcttctccctctaactcagattctttcatctcagggagattatagcacagtgcctgaatcctttttagtgagttggcatcaatcatgttgggtggatttgtaaaaaaattcgcttccacaatgggaggctgcgcttcaaagccgaacaggaagagtaatgttcataaaagagaacacaaaaaatttaggaaacatgcttcacttggtgacataacaaagaaaaggcatagcaatgcttcagccacccgccggaaatctgatgtttctaacatgaagttgcatcttgcccaactccaataccagagccatagtaaaaaagatgcaagtggaaaaacccatgaggatgcctggtttgactcagttagcattatagaatctgaatcagatgatgattttattagtgtacttggagatggttttccctttgtcactaataatgctttgggaagtgtcccaaacacccagttactccaacatgaaaatgcatcatgcttggtagattcagggtgtaaatatgatcggttatgtgatagctacttcaaagcaggtgtacctgagagatttctttgtcgtcctagagctggccttcagattctaaatacaactcaagagaagccatgccccagttcctggtctgcagtttcaccttcagttttcaacctccgcggagaaaaatatttcagagataagcaaaagtgtcctgctccagattttagcccttatataccaataggtgttgatttaattgcgtctccccggaggtaaatcacattgctcagcatctagaacttccttctgcaaagagcatgagaaagtac

SEQ ID NO: 98438 - DNA, 426 bp, Glycine max
  unsure (1)..(426): unsure at all n locations
  Clone ID: PAT_MRT3847_59903C.1
tcccacgcgtccggttgattccttctgattctgagacagaagaaggaagaaccaataacagaggaatccaagttcctttctagggaccgcgattcctcattcattcattcatatgcttcttcaactttctcctctcttctccctctaactcaggcgcattatatctagctagcactcttggtccaaggaaatagagcgaatgttccactgtggaattaacttattttgaggcagattctttcatctcagggangattatagcacagtgcctgaatcctttttagtgagttggcatcaatcatgttgggtgggatttgtaaaaaaattcgcttccacaatgggaggctgcgcttcaaagccgaacggaagagtaatgttataaaagagaacacaaaaatttagaaacatgcttacttggtgacataa

SEQ ID NO: 98439 - DNA, 334 bp, Glycine max
  Clone ID: PAT_MRT3847_59904C.1
gggaaaaagcaaggaacattaagggggattcggacccccaaaaaaattcacattatcggaaggccttccccaaacacaaatcaaaaaaccctcaaattttttttcgttctttgacccccactttccggggacaaaggggggggcaaaggcccaggcgttgttgttgacagggccaacaaggggaacggggaggttctccaagggaccctttccggggacaagggcctgaacaaagaagccaaacatagagaacagggccaaccgcccggtcttgagttccttcaccttaagcccaaaaaaagcctttgggtaataaaaaagcccacccgtccgg

SEQ ID NO: 98440 - DNA, 575 bp, Glycine max
  Clone ID: PAT_MRT3847_59905C.1
atttggtatgttttttatgtttttctttgttcttggcgtaaatagagataacggtagcgtgttctgaattctgcgggctaggcctcccccgttctctacctcaatagcgaacggcttcgccgttcggttggtttgagtatgttgcaatggaagaacggtgcttgacatgtttttctatatgaggcacccactaccgtgacacctgtggttgctctggctaagtacacccttcctgcgtagaaatgctaggttctacttcggtgcgaaatgctatttctatgcgcggcctggctccttctttgatacaggggggcctgcctccctacgatataccctcggaggacccatacccacacgctgggataaaaaagggacacgtggaaccctctttatggcagaaattggggtcgtgaacacaacagcgagtcttggacaccaccctgggatgagacagctcttaacgggggggctgctaccaacgccaggagtgggactcgtcgatggacccaactcctaatcttaagagtgattggccctggactcgcactaacgtctagcagggggccactccttca

SEQ ID NO: 98441 - DNA, 810 bp, Glycine max
  Clone ID: PAT_MRT3847_59906C.1
cggtccggattcccgggtcgacccacgcgtccggcttcgcgtccgggcaaatcagcgagacaggaacagccctagcgcggaccaaagccggtgttcaatttccatcttcttccgaacacgccattttcgtctacgataaacgctctcagaagaaaaggggtttgtgagaggcttgtatccaaaatggctagatccaaacgacggaggtttaccagtggtagcaatgtcagacccgggactatgactttcgagcctattttggaagaaggagtgttccgttttgattgttctgtaaatgttagagatgcagtaccccccagtatttcttttttgaataccaatgatagagacatatctatctatagtgagaaggttccgctctataccccgacgtttgcgtgtcgttcagagaagcaggttgtcaaacttgagctgcctgtaggttcttccctttatggaacgggagaagctagtggtgagctcgagaggacaggcaaaagagttatcacatggaacacggatgcatggggttatggaccgggaactacctccttgtaccaatcacatccatgggtgttagctgttcttccaaacggtgaggcgataggaattcttgccgacactacaaggcgctgtgagattgatctgaggaaagaatcaacaatacagtttgttgctccatccgcatatcctgtcattacatttggtccttttgcttcacccacagcagtgttgatatctctatcaaaagcaattggaactgtatttatgcccccaaaatggtcattaggctatcatcaatgccattcg

SEQ ID NO: 98442 - DNA, 909 bp, Glycine max
  Clone ID: PAT_MRT3847_59907C.1
gaagaaagaatacgcgcagagtggactttgacctcagcgccgtttgggtccgaaccaagacgcacacaggacggtgcgttcaccaaacctaccttggtgggccccacttttcccccgaaccgtagcttcagagtgatccctttcgcaccctctatataatagcgccctcgccactcgcctcgacgcgtgactctcgcgggtggacaacgaaatttctcagccaaagaacaaggatcagaatcgtttaatcaagttgaggaagatggcactagtctccggaggaagatcaacactgaaccctaacgcccctctttacattcccgccgcgttccgccaagtggaggatttttctccagaatggtggcagctggtgacgacactgacatggtaccatgactactggctaagccagcagcacgatgatggagccttctatggcgaggatgggtttgatggcaatgatgtggttgatttgcttcctgattcgtttgattttgatgctggtgaagatctttttgaagagtttattcgatcttctgaatcccaagaagaaactggacccaaaggaactgcatgagcttttagagatgaacccttttaaaagaagctaccaacctaagagactggacccaaggccttagctttaggtcatttagctgatatgtttgtatcatgttgttatccgtagcttcaacttcctgtaacttcttgtataggcaaggtttcaaacttccaatctatccttctctgccttttgccaaaatgtatggtaaatagggaaaggaaaaagatggagaaaaaaatgtgactgttttatgtactgatgttgtaaaagctgctacaacctacaattattcaaattacaaaatgagaaaaaaaaaaagaaggaaaaaagacttctctgtttgg

SEQ ID NO: 98443 - DNA, 409 bp, Glycine max
  Clone ID: PAT_MRT3847_59908C.1
gtgcattggcatcacaactcactatggtttggtttgtggactgttttatctaaaaagaagcaaatgggtaatccagtaaaaccaagtactgccgaccgtcttcacatttccccaatttcctactatctcatcccctaataacttaattttggcttcaaaaccttttgccggcaattccagatataagcattccaaaacacctttacatttaacaacgttttctgggcaatcaaaagtaatcacttatctttccaagcacaaagctgatgttggtgcttctgcaatggattacatggctgcaatacacttttcttcacataaagggcattttgaagttgttctcgcgctactttcaacttgtgcctttctcaaaaccgtcaccctcaaaagcatgacttcattacactat

SEQ ID NO: 98444 - DNA, 347 bp, Glycine max
  Clone ID: PAT_MRT3847_59909C.1
tctcgcattggatatatagatggtgcaggggatctcttgcatactgggcatgttgagattcttaggattgctggggatcatgtagatcttctttttgttggaatacacactgatcagacagtgaatgcatctagaggatcggatcgttctatcatgaatcttcattaaggaagtataaatgttttaacatgattctatactggattatgtaataaatggggccgaatggtatcatttctcaagatttgcttactacatttaacatgtcattaattgttcatggaaccattgctcttagaaatgattgtctcaaagtaaaatgcaatccatgtgctgatactattagc

SEQ ID NO: 98445 - DNA, 243 bp, Glycine max
  Clone ID: PAT_MRT3847_5990C.1
tgaagatgaagaacaggtggaaattgagaatttgaatgctagggtcagtgatgttgatgataaaggagacaatcagactagactgtctgaaacagctgatcgatctgttcaggaagctttagaatccggtgctactcaacatgcaagtgatgatgaccttgtcgagagttcttcagccattgcacctgggtatgtacccagtgaacttgatgaaagaattgttcttgagctaccgtcatcaat

SEQ ID NO: 98446 - DNA, 233 bp, Glycine max
  Clone ID: PAT_MRT3847_59910C.1
gtagcactagcattggcttgcttgtgtttccaaccaaagtctagaccatcaatgcaacaagtggctcaagaactctgtgcttcgaaactacccccacctctgcctttctataaaatttcaattgctcagttgatgactccagatatattattgtctttcatttgagtatgaacccggaattcttgctcccaacaactcaggaaagtaatattttggttaaaatatgttttagg

SEQ ID NO: 98447 - DNA, 427 bp, Glycine max
  Clone ID: PAT_MRT3847_59911C.1
ggaattcccggcggtagctcacgcatcctgagggccaggctgcttccacccatgagcgggccccacaaaatcatacgtacacgtgtcgattctggaggtacattgtagctcctcaacacagtgcgaccttctcaaggtaggtactttttaatttggtacaggtttcagttttcggtgtgaattagttttatcaatggaaactcaaagattaatccttcttcaagtatgattaagaatcaaattcataattataaatttaaggaataaaattatttattaataatcaaaaaaaaaaaaaaaaataccttaaaaaataaaattaaaccgaaagaatggaaaaaaatattaacttaaaaataaaaagaaaggtccgaaatttttacccacttaaaaaagtttttggttaaaaaagaaggggggggggggg

SEQ ID NO: 98448 - DNA, 398 bp, Glycine max
  Clone ID: PAT_MRT3847_59912C.1
ggaccttcgttgcttgccacaattgtgacttgaatcatgcgtttaggttttagagtatattaagagataatgatgctactatctagcactgaagaatggtgattttatgttacactcaggttaatacacactcttgtttgaaggaggggattcctaattagtattatactaattaatcggttgtgcaatctctgcttttatggatgaattacattgtttttgttcacgaacacaccgtagcttgtgtcatttgttgtcttgtatttatcattttccatcgtatcatatcaccatatcttgtatttatcattttccatcggatcaccctttgctatgcaaagaagctgttttccggttcgaactcatgaacccacaggtcaccattacaacttttacca

SEQ ID NO: 98449 - DNA, 462 bp, Glycine max
  unsure (1)..(462): unsure at all n locations
  Clone ID: PAT_MRT3847_59913C.1
cggaatcccagtttcgacttacgcgcccgagcctcccttcccggaaaagaccccgcaacggcaagggccattttaacaagagcagccgccggcacgacaccaagcaacacnccaacaccanaggcggaagcgggaccgcaaaaagacagaggggcaaccgcggagcacccaggaaggacggcccacagagcccaaaacgcnaaacagccccaagagaaagaacaggcggagggaaacccaccccccgaccacaaacccgcgcgccagaccggaaaaaagcacccccacaaaagcacaacnggaaaggggaaaaacccccaaaaacgacagaaccggggccggcccacaccccccaaaagaacacccngaaaaggaagaccaagaaaaacccaaaaagaaagacgccagaccgagacaaaaaaaaaacccccaaacaaagaggaccaggcccagaaggaaaca

SEQ ID NO: 98450 - DNA, 301 bp, Glycine max
  Clone ID: PAT_MRT3847_59914C.1
tttctttagtttctgaacatatatcacctcttcaaacaacatctctttttctaccattatgatatcatgcctatcaaacctcggcggcgatgggctgaaggtaccatctatgtttccaacaccagccataggaaacctcattcgcaccatatcatgacatatcacacatctctttctattgataacagactcttcctccctatcctaggttaaacctctttagttatcggtatttagtttgctcattgatacccctcttcgtttgtttgtaatctttaaccctcacttaggtcattatgtt

SEQ ID NO: 98451 - DNA, 325 bp, Glycine max
  unsure (1)..(325): unsure at all n locations
  Clone ID: PAT_MRT3847_59915C.1
cggccgctcgaggcngncggnncngnatttcgttgagtgagtaacaaacgtcttttctttcttatacattttactttagtttgtgaaattctatccaaagattttgagaatgtctagctgtgggtgtggaagcagctgcaactgtggcagcaactgcagttgcaacaagtgctcttttgactacgtctgagaagatcacaaatgagactctagttttgggtgttgtcccacccagcttacgtcagggagcttaaacagacgacgcagaccacagagagaggccactttcactgtttctctattcaaagacttaaccgccctggaa

SEQ ID NO: 98452 - DNA, 393 bp, Glycine max
  Clone ID: PAT_MRT3847_59916C.1
aagaaaaaataataccctcagggacatgatttttattttataactactgggacatttttatacaacgtcacatgcaaaccaaaactggatgtttattacccccaagttttctttttgacgggagttttttttacattaagttggaagaacacctgcctgaaaaataaaatcaatgggtttgaatagcaaccttggttaattggaccttttaaatcccagacttggcactttttttcatttttttttctgaaagaaagatgcttaattgtttattgggcaaattttttcccatgattaaaggataagtttcctggctttaataaatgggggcggcaaaaccggggggttttttttttaaaaagagaggaaaactgggggtttctttttttttct

SEQ ID NO: 98453 - DNA, 283 bp, Glycine max
  unsure (1)..(283): unsure at all n locations
  Clone ID: PAT_MRT3847_59917C.1
tcccgagctccttaagcagggacacaacaccagggagaggtgaaaacttcaaaccgaagcccgcccagccaccaccgcaaagcagcgcgaaacacgacncccaaacaacgcngaaaacacgacccaagcagcaggagacagagcnacaaccgacccaccgaccaaaccaaacagaaacggcaggaaacacacccgcgcacaccccaaaaagcacacgcccgaagacccagcnccccgagagaagaaaagaaacgcaaaaacacgagccccgaaggaaaaggcc

SEQ ID NO: 98454 - DNA, 260 bp, Glycine max
  Clone ID: PAT_MRT3847_59918C.1
ctgactgccgctttttcgctttttttttttttttttttttttggagactgggcggcacctgctcctttcaaaatgatgttcggtccttgggttgaaccctcctgtaggattgagtcacacgcccaggcccctattaacccttcttgccacctattggggaagcaaggaattgactctttcttgtcagagccccttctaaactaacacatacaagcttttaaaaaaaatattttcattaatattctaatcagggcttttct

SEQ ID NO: 98455 - DNA, 271 bp, Glycine max
  Clone ID: PAT_MRT3847_59919C.1
catgtttcttgctttttggtcaccattcctcattcatttcacatctactgtaaaaaaaccgcacttgcgcgtcattatggcatttaagagggggggggaaatttttaattcggctgagcattctcaccagaggggggatgcctatttttctttattgatgtagacaggctcacactcgaaaaaaatcccccattccgtaacttgcagagagttcctgcttttaaaaaaaactggcaaaagcctgagaaacaaaaaaatgtggctttaaaat

SEQ ID NO: 98456 - DNA, 663 bp, Glycine max
  unsure (1)..(663): unsure at all n locations
  Clone ID: PAT_MRT3847_5991C.1
ggtgttaatatttgatatggaagaaatttcaaattttcacagacaagaaaagtttaaggaatttgttgtcacaaacaatttaaacccccgatcaacaaaaattgacttgtaaattacaaggttataactttgacattctgtataaacctgacaagtctaacatagttgtggatgctctttcccatcagcaagaagaggccttcttgttgtctttcacctcatctcccattccatcgttgatagggcatttgcaatagttttattctactgatagctctcctcactcagtacacttttaacacttctatagttgttgtgtctaagatacaagaccgtctcttatatgttcgggagcaactcttcatcctggatttcaaagatttgtgcaactctttgatcctagaaaatcattgcactcccactttgagccactccagcatcaaacccaccatggcccgcttggctacttcttttttttggcccaacatgtacaaggatactaagtagttccttcacttatgtgttatttgccaacataacaaatacccaccacagaaacaaatggggctattacaacccttacctataccaaagaaagtttgggaagatttgacgatgggatttcaccactcatttacctaccnttttgggtcatactactac

SEQ ID NO: 98457 - DNA, 1260 bp, Glycine max
  unsure (1)..(1260): unsure at all n locations
  Clone ID: PAT_MRT3847_59920C.1
gcatcacagacagcttcaggtgtactctctggttcaggtgttctaaatgctagaccaggtagtgctacttcgtctggactactttcccacatggtttcatcgctgaatgcagaagttgccagagagtatctggagaaagtggcagatcttcttcttgagtttgcacaggcagacaccacagtgaaatcttatatgtgtagccaaagcttgctcagtcgtcttttccagatgtttaatagggtggagcctcctattttgttgaagatactgaggtgtattaatcatctgtcaactgatccaaattgcttagaaaatcttcagcgtgctgaagcaataaaatacttgataccaaatcttggactgaaagaaggatctcttgtatcagagatacatcacgaggtcttgaacgcactattcaatttatgcaagataaataagaggagacaagaacaagcagctgaaaatggaatcattccccatttgatgcaattcatcacatcaaattctcccttgaaacaatatgcattgcctctgctatgtgacatggctcatgcatctcgcaattcaagggagcaattaagggctcatggcggtttggatgtctatttgaatcttcttgaggatgagctttggtctgtgacagcactagactctattgctgtttgtttagcccacgacaatgataataggaaggttgaacaagcactgctgaaaaaggatgcagttcagaagcttgtgaagttcttccaaggctgtccagagcagcattttgtacacatattggagcctttcttgaaaatcatcacaaaatctgcaaggatcaataccacattggctgttaatggattaacaccgctgctcattgcaaggctagatcatcaggatgctatagctcgtcttaatttactcaggctaataaaggccgtttatgagcatcaccctcagcccaagaaattgattgtggagaatgatctacctgaaaaacttcaaaacttgataggggaacggagagatggacaagtcttggttaaacagatggctacttcattacttaaagcactacacataaacaccgttttgtaaatttagatttgaatggtcattttcttttatgtatatttatcgtgtgtacataactttcccctttatttggtttgcttatttttatttccaatttggttgagtggggaaaaaatagcatangctggcgtatgtcgttttgattcttggatattattttggcaggtggctgattttgcc

SEQ ID NO: 98458 - DNA, 273 bp, Glycine max
  Clone ID: PAT_MRT3847_59921C.1
atgatgataacaaaagatgatgacaaaggtgatgacaaaactctcaaagatcaatcaaagaacaactcaagtgaatcaaagatcaatcaaagaacaactcaagtaaatcaagaagaattcaagactcaagaagaaagtttagagtcaagaatcaagattcaaggttcaagatctcaagaatcaagattcaaggttcaagatctcaagaatcaagatcaaggttcaatcaagataagtatgaaaagtttttctcaaaaattgaatagcacatga

SEQ ID NO: 98459 - DNA, 875 bp, Glycine max
  Clone ID: PAT_MRT3847_59922C.1
gacggtcttgaatcttaaatatacttttatttgttcacaagtctaggttggtactctgatgatgcagcagagcacaactaattctttcaagttgattctctgcagtttaggttggcttatgtggctcctgagtcgagggtggttggtgctggggagttagttgaccatcctaagaaaatagcccttcactaccttctgtacatcttttgttattgacttatttgttgtacttccacttcctcagatattcatattgtttgtccaaccgaaacacttggggtcatcaggagcaaactatgcaggtttcttcctaccgaaacacttgcgtatcgtgatcattgttcagtatattcccagattgtgtaggtttcttcctatgctaatttctccaacaggattaatatttgagtcaccatgggcaagtttctttataaatctttttacctttatgctatctggccatgttgttggatcatggtggtacctcttcggtttgcaggggggttatcgccgtccccgtgttgtctgccagtttcttttccagggacatcctgtttccgccaatttctttgtctgtgggcatggtcatgctgctgtcaaattcagtttaaattgaaaaggaaacgagtccgtatgattttttggctaatctcaactctcaagcactcatgagaacaggaaaaagaaaatggttgcataatatagtgcattactgttagcatgggatgtaaattatgtcaaagcaaagtgcattattaatgaaatgaacaaaatccatcacacactcagtctcagacacacacacactttttattactaccaattgataatgaaatgatgatgagattcaattaatattagggaatttcatttag

SEQ ID NO: 98460 - DNA, 296 bp, Glycine max
  unsure (1)..(296): unsure at all n locations
  Clone ID: PAT_MRT3847_59923C.1
tttcttcnttnctacaattttnntagcatggcaatgccatgcgtactatatgttccctctccgaatgaacactggctatttttcccttactccggaaaaaaaatacgcaagttggacgcttgctgtggaagcacacaacatctttggctttgagaccattcctgaagagtccctttaatcaacaaaagaatacatccattgcgaacaatatatatcacactcccaaacagttaaccaacaatcttacttttattcccacaacctccaaattccatcccaaggacacatttttgttc

SEQ ID NO: 98461 - DNA, 169 bp, Glycine max
  Clone ID: PAT_MRT3847_59924C.1
tctcataaacttttttttaaccccgaagaataaccggcgtggtgcgaattatctcatacaacaacttcatcattttagaagctccaacttttttcttctgttgttttcgccgacaacttttatttaacaacaacacttctaactcctttttttttaaaaaggggttttt

SEQ ID NO: 98462 - DNA, 502 bp, Glycine max
  Clone ID: PAT_MRT3847_59925C.1
ctcgagccgaatcggctcgagtacggctgcgagaagacgacagaaggggggtttactgaataatgaaacaaactccaaatattgagacatttttctctgttgttcagatagaatagcagaccacagtaatggggatgttgccattgattcataccaccgctacaaggaagatgtggccatgatgaaggatattggattcaatgcctacaggttctccatctcttggccaaggatactacctcgtggaaacctgcagggaggagttaaccaagaaggcatcacatattacaacaatctcataaatgaactgatagcaaatggacagcagccccttataactctatttcactctgatttccctcaagctcttgaagacgaatatgagaggtctcttagtcccaaaattgagcaagattctgcaaattatgcaaaagtatgcttcaaggaatttggtgacagggttaagcactggattacattaaacgagccagtgctatatagc

SEQ ID NO: 98463 - DNA, 282 bp, Glycine max
  Clone ID: PAT_MRT3847_59926C.1
cgagatagtaaagagagatatctagcctcgttgttttgataaattttagtaaccgtctccaaaggcgtttcattgggttgacttatgttagcgcggtgcgatcccaattgtcactgtcccattgaacaaaaactatcgtgctcatacttcattagataaaatatcactcgaaaaaataagtatagagaaacataacatataagagattgcacacaattacagagaacagagttatgtctattattttttactacgagtgctctctttatagatctaaaagat

SEQ ID NO: 98464 - DNA, 1156 bp, Glycine max
  Clone ID: PAT_MRT3847_59927C.1
ctcgagccgaatcggctcgagtacggctgcgagaagacgacagaaggggggtttactgaataatgaaacaaactccaaatattgagacatttttctctgttgttcgctaaagtttgagaattgaattcgttcagatttgaaaatgtgggttaaggttgttcttcttctccttgcagcactttctctttttcacttagccgcagcttctcttaatcgtagcagtttttcagcagatttcttctttggaacagcttcttcagcttaccagtatgaaggtgcagcacgtgaaggtggcaagggacctagtatatgggacaccttcactcatagccacccagatagaatagcagaccacagtaatggggatgttgccattgattcataccaccgctacaaggaagatgtggccatgatgaaggatattggattcaatgcctacaggttctccatctcttggccaaggatactacctcgtggaaacctgcagggaggagttaaccaagaaggcatcacatattacaacaatctcataaatgaactgatagcaaatggacagcagccctttataactctatttcactctgatttccctcaagctcttgaagacgaatatggtggttttcttagtcccaaaattgagcaagattttgcaaattatgcagaagtatgcttcagggaatttggtgacaggggcaagcactggattacattaaacgagccagtgctatatagcaatggaggttatggaagtgggtggatccccacccaatagatgctccaagtggtttgctaactgcactgctggtgattctactaccgagccctatttagttacacaccacctcattcttgctcatgctgcagcagtaaaggtctacagggagaagttccaggcttctcagaagggtcaaactggggtaacactgaattctgcttgggttgcgccactttctcaatcaaaagaggacagagaagctggatatcgaggtcttgcctctatgtatgactggatcatggaaccactttactttggaacatatcctggtgtcatggctaacagagttggaggatcgcttgtcaaagtttaccaaaagggaatacttgatggctaaagggtcctatgatttctagggggtaactattacacttcaactta

SEQ ID NO: 98465 - DNA, 166 bp, Glycine max
  unsure (1)..(166): unsure at all n locations
  Clone ID: PAT_MRT3847_59928C.1
cccgggccgacccacacgaaacaaaccganaanacaacacaacanagcgatattctttacttatactcctatatcatcggcgcgcctttttattaatatgatcccacaccaaaccttcactctancttcaactttccactcctcttccattataccttcctattta

SEQ ID NO: 98466 - DNA, 272 bp, Glycine max
  Clone ID: PAT_MRT3847_59929C.1
ccggtgatggggcggacgggaggcctgaaggaccttacttatacgcggatgaactgattgaagcttccaaaaaaacgcacgcttatggaacatgtaggtaccgaatttatcatttggaggcaggcgaaattggcagtgtcttttatgggatgttaactgcacactgtaatatttatgcaaccacttgtaccaatggaaaagaaagcaattggggaaacatattgccccggggagtatcctaatcctgccccagaataatacaacctggttgg

SEQ ID NO: 98467 - DNA, 294 bp, Glycine max
  Clone ID: PAT_MRT3847_5992C.1
agcctggaaccttaaacggacggccttttttttttttttttgagtgcaaaagcacaaagaacaaataagatgaatggcgaagacaaaagtatcaacaccagaaagtacaaagggtaaccaaagaggcaggcagacgggccgagagatgataaaaaaaagagagcacagatcagacaaaaacaagaggcagggggatttcggaaccccaaaaaaaacggaaaatcctatagcctccaaagtacaaccagaggaaacatgagtagggaaaaaaaaccaaaagaattagatgaacaa

SEQ ID NO: 98468 - DNA, 657 bp, Glycine max
  Clone ID: PAT_MRT3847_59930C.1
caaccaggagtgatgtaccaatgattactcccaatgatttctctaaggcataattttaaatcgatctgatgaaagcattggatcactagtcaatggtcaaactagtggatcattaattgaatcgcataatcaggaattatagtgttataaataattatatataatttataatatatatatatattacagttgttaatgttgtatcaacaaatagtctctgtgtgtgtgtgtgtgtgtgtgtgtgatcatggcaagggtgtttttccagtattcatgtttaaatgtatgccacatccagcagtgacccgaaacccgcggttcatccggaaactcagcctggtcgcacagattgccccgattatgcagcatgcaccaatgaccaacaacccttagttcagcagttcattcggaaactcggctaggtcacacaggtcgaaccaatttccaccaagtagatcgcatgcccaaccccatagggttttaaaaagctccaaggttgatggatttgtcttcggcttgagtttaaagcctttctagatgcaagcggaggtttatgggaaacacaacaacttgcaggcaaacttgttggaatcttctacagcaccagatcccaggtggtgggcaagagactacagcataagaccctctgtctaaaca

SEQ ID NO: 98469 - DNA, 410 bp, Glycine max
  Clone ID: PAT_MRT3847_59931C.1
ggtaaactttttttttttttttttttttttttttttttttttttttaaaaataaaaaccctctatcccaaggggcccaaagaatttatttttaaattttgaaaagaaaaaaaatcctaaccccttggacataacccaccctgatttgattgggaggggccgtctaaattgaattccccggggagggccctcccttttgccctacaaggggggggaaatcataaattaaaaaagggggggtccccccccggggtaacatataatcattcccctttgggacaaaggccccaatatttaatctcctataaaaaaatctcaacccctccctagaggcccctaattcccttctttaaaacaagggtcatgaccgggccccaataatttttttcttcccagggggcatagcccccg

SEQ ID NO: 98470 - DNA, 972 bp, Glycine max
  Clone ID: PAT_MRT3847_59932C.1
tgctgctgctgcgttgcgcacgggctcgaggaaattcaacgtgggtggcagggtgatggaaacaacatccacaaccctcgccaatgctgggcgcaattcaatgttcggcgcaatgttcgacgacaattggaacctaataccaaacaacgacgacaacaacaacaacgaaagattcatcgatcgcaacccggattgcttcgcgattctcctcgatctgctccgaaccggcgagctctacgtcccacccgatatcccggagaagctcctctacagggaggccctctactacggcctattggaccacgtgcgcgccgccaagtggggcccattcgacggcaacaggttaaggttgtcgcggtctctgcagggccaggcaccgggcgacggaaccgccattcgggcgggcccggatggcggctgctgcgttgcgcatggcagcatggttcatgtctatgattggatgttggatgaacacccacctcttaaccttgattaccagagggtcaacgatgttggttgggttgactccgacaacatggttatcggagtcagcgagcgccttgggcgaggtgacggcgggatggggctgttcagctcccacacaggggagctgaggtacaagtttcacgtctgtcatgacaatcaggtgaaaagttacactgctggagctctgagtttcagttcggattataagatattttctagctgcaaagggaggagtaatgagtatggtgttggggtttgggatcaggttactgggaagcagattgatttcttctacgagcctttggggtggtcccttggggatgctgataagcttcagtggatggaatggagcaattgtatgttggtggctactatgttttctaggaaggacaactgttacatttgccttttgggtttcaaggacaaaaagatggagtggtgttggcctgatgtgctggctccttttgccgtccatgagaaacgggt

SEQ ID NO: 98471 - DNA, 493 bp, Glycine max
  Clone ID: PAT_MRT3847_59933C.1
ccaacaaatttaacagtttcaaccccatctaacaattttcataaatcaggcaaaccacacactaccctaactttaagcaaatttcacctattcccaaaacccccaaacttcacctatcataaaatttcaccaattcccaaaaccccaaacttaaaccctaaaatccatatcgagcaatgtcagcccaccactcacactccttaaaaaaaccccaaaacccaaaccccacaaaaactaaccaataccccaattcaaacccaaacccaacagaatttttccacttgacaaacgacagtcaacacttaatactcaatcaacaataaccacaaacctcaggataaatcctcgggaggacaatattcctctcctgcaaccgaacaactggccgaaccattttttcgtggctaccggacagggggggggcctcctccatctgaaccttataacactttcccgattataaacaacaggaaactttccgggtactgattaa

SEQ ID NO: 98472 - DNA, 254 bp, Glycine max
  Clone ID: PAT_MRT3847_59934C.1
atacactgtacaaattatccttattaatggtattgaggtagaaaagattccacgagattttgggaaggataaactagtcattgaagatcattgtaaattcaatcaagaataagctaaaggtatcgaataagcaacaaaaacactcaccacaatcacttctgcatagatcctaacatatgaataagtctcccatatattgcccactcccgcacttgtccaacgtgtcataaatcccatcatgctacaccaaacac

SEQ ID NO: 98473 - DNA, 467 bp, Glycine max
  unsure (1)..(467): unsure at all n locations
  Clone ID: PAT_MRT3847_59935C.1
aaaatatatttaaatttttttatattaaataaaacttacatgagtaanattattggaaaaaatgtatttttttatgagattcatatttttttatgttctactttaatttaaatttttatttttttatttttattctttaaattaaacacctaagatcatgactagtaagtgtctttagttttggagtgggggaagagaaggattataaaaaagatgaaaaataagtataaataaagaaaaattagacgattttttagtttgtttagaagattatataaaaaaacaaaaaaatattgagaattaaagaattaaaaaaaactatttaatatagagattaggagaacataaaaaaagtctgaataatatgatttaacgatctcaataaaaaaaaaaattcctttaatgatttggatgggttaccatttgtcaaaaatgaaacatgaacacaaaagccatgatgggcagtc

SEQ ID NO: 98474 - DNA, 812 bp, Glycine max
  unsure (1)..(812): unsure at all n locations
  Clone ID: PAT_MRT3847_59936C.1
aattataacttttcactgtattgtttgatgaagtctgttgtgctgctataatcatttgtattgcatattatgacacaaacttgtttttatgcatatttgcaccagtgtcgttgcagatacatgtgttgccatggatggctgggtgcagaaccctactgcacatacagccttggatgaaattcttccatgtgtggataatgcaactgcgcaagaaaccttgtttcgaaccagggatgtgacacaccaacttgctaacttagttgacaacattgtttccaatgtcacaaatagaaatctcccacctgctgctggacccttgtattacaatcaatcaggccccttgatgcctcctctgtgcaatccatttaacaatgatctcacaaatcggtcatgtgcagatggggaagtttcattggacaaagctgcagaggtaagggattatttaagatttttaaaagtgaatctatatcaaacaaaagcctagttagacactttcttgctgagtcctcctttttcacttttttgtcttgttttttcctagcctaaaacgttttcggataattttgttatgagtttatgttttactagtttttaaacactttttaccatatttacaaaacaataaaaattggttntaggatttgggaggtgagttttaaaaaaagaactggtggcctctctctcgccaccgttctttgccggtcactgctcgctggtcgtcgctacctgcctnccgctgccacctncgatgaccaacaatgccttnccctncaccattccccacctttgatcgtttcacccccaccataccc

SEQ ID NO: 98475 - DNA, 656 bp, Glycine max
  unsure (1)..(656): unsure at all n locations
  Clone ID: PAT_MRT3847_59937C.1
cctatcgagaaatgaagaattagagagagtgagaggaggaagaagaagaagaagattccagaatccagagtgagaaacattaggcttatcagaggagacatgcccgagttgaaccgacaattctattactactctttgcttctttcttcatgcctcatcaaatcccaaaggatataattgaaggttttgggaactaaggctgcaatattgtatacattctactcaaggaatggtcaagatctggaaatttgctatgtggaaaggttaaatgaagccattcttgttgagtcatcctgatactatgtacaattgttctcaagtttattgtagtcattcactggctcatacttcttatccttgtggtgatccttattttggtagttcaatagttgcttatggaacacaggctattactcaacaaatggtgccccagatgctgggattagcatccaccagaattgcattaccagttgagcttgcagaagatgggcccatttatgtcaatgccaaacaataccatggtatactgagaaagcgacagtcacgagcaaagcttaaagctcaaaacaaactcatcaaaagtcgtaagccatatcttcatgaattctcgcaccgccacncattgaaaaaggttaggggaactggaaagcgctttc

SEQ ID NO: 98476 - DNA, 1936 bp, Glycine max
  Clone ID: PAT_MRT3847_59938C.1
gccgatcagagatgcggaatgggggagggagagacaaagaaaagaaaaattagagagtgagaagaggaagaagaacattctagagggagaaacattacacaactgaacccacaattctattactgtttgcttcaaaggatataattgaaggttttgagaactaaggctgcaatactgtatacattctactcaaggaatggtcaatatctggaaatttgctatgtggaaaggttaaatgaagccattcttgtcgaatcatactgattctatgtacaattgttcccaagttggttgtagtcatccaatggctcatacttcttatccttgtggtgatccttattttggtagttcaatagttgcttatggaccacaggctattaatcaacaaatggtgccccagatgctgggattagcatccaccagaattgcattaccagttgatcttgcagaagatgggcccatttatgtcaatgccaaacaataccatggtatactgagaaggcgacagtcacgagcaaagcttaaggctcaaaacaaactcatcaaaagtcgtaaggtatgcttcacaaattacagttatacattattttgattcaccctgtttatcctaccttattcgtgtatggtcatgcattatattttgtggttttgggggggggggggttgtctttggaaagaatgttggtgaggaggaagagatgggcttggttggttgtatatgtatattttcacctgtttacctgctatggtgtaaaatataaaatgtagtttcattttctatataatttttcgtttttttatatactatacaattttaagttatttgagctatgacatgggagaaaaaaatgcacctgtttacctgttatagagtatttttttttctttctcgcttggataaataattaaatttagaatataagcctatacagctaaattacatgttaactacagtctagaagtgttatttatcattgcaagggagcattggaggaatcactctgaatattgaacttagaaatgaaccgtgatacagtagaataacaattacatgttgcattattctgtgaaatgttattattacatttagtcatatggcaaagctgtacagcctgctttcttgaatctgttttggaccaaaagaaatagtgttactccactgatttccctccctttctaattgattgcagccatatcttcatgagtctcggcaccgccacgcattgaaaagggttaggggaactggggggcgctttcttagtgccaaacagcttcaacagtttaatgcagaacttgtcaccgatgcccattcaggcccgggccctgtcaatgtttatcaaaagaaagatgcatctgaggcagaaagtcatccctcaagaactggaaaaaatgcatctatcacattcacagcaatctctggcttgacaagtatgtccggtaacagtgtcagtttcaggcggcctgagcacaacttcttggggaactctcctaatataggtggatcgtcgcaatgcagtgggggactcacctttggtggtggagctcggcaatgtacttcagttggccggtgagaggtggaaccaatcaaaatcaagttcactggtctggcaaatcatccttggcttagtcactttactttctgtgtttcatgtgttgttacggaaatgttgtcttttggaagactctgcattagcactcagacttttgctagtgctttcccatgtattttgaaagttgctcttgtttctgttgttgaactggaccccaaagtttgtgcttgaaaatttaacttaatatccgtccgtgcatggtccttgctttgtccaactcctataaaccaaaaccggagagaagaaaatgaaaatttgctcattactgacgtcaacatgtatttggatgaagtaaacacagaacattgaagttggttttcccgtac

SEQ ID NO: 98477 - DNA, 504 bp, Glycine max
  Clone ID: PAT_MRT3847_59939C.1
ctcgtgttaaaatgaaactaaacaaattgaacatttgttatacaccacttttcagtacattagccacctgagtatatcaaaataaactatcaaacatctacatctttcttggggaggaaagttctgcagtgtttatcatttacatcttttcttttctgttttcattttacctgtgtttttgggagatttaaataggcttccctctgctttatggagataatatctattttttaataaagaaatacaaatgccctctagctgaaaccttatttttttctttgatttattatatctaacttcaatgccttttctcttttgttttatccaatatatatctttggttcccttttagaacaacttgacttttgattcaggattggtgaatattttcgttgtatgatttaataaatgctgtgacttggcatttgttttgacttttgatacacgagtcagtgtggcatatctatatgggtatggatgtgtgatgtaaaacttgttttcact

SEQ ID NO: 98478 - DNA, 469 bp, Glycine max
  Clone ID: PAT_MRT3847_5993C.1
aattcggctggagggcagcggtaataaacttctttgagactctgagaatggaacttggttgggatattggcataactatcgccacacccggttttgtcaaaacggaccttacattgagggcaatggaatttgaggttggtcttgttcagagaacatgcagtggtaggagagtaggataacatctctttcaagttttaaacgatacagtttagtagtagcatccaatttacacgtacttatgtcactgatttttaaattaatggctatagttgcattttatcatctaaaatatactcttccttttgttaatatggagtctgttaagatacaaaattagtaagaacttagaagaggattgggtatttttcaatatctactacaatggattgggctttttaaaagtgcatatatatattgctttagaaaggataaaatgaagatatatcaacccttcataacaataaacgat

SEQ ID NO: 98479 - DNA, 512 bp, Glycine max
  unsure (1)..(512): unsure at all n locations
  Clone ID: PAT_MRT3847_59940C.1
aactattaactctgaaaatcacttcatagatcagagaaaatcataattattggttgggtcactgtctccattacatagttatttggactaatacaaactgacaacaggttgtagtcaaaatgaaaagcaagcatatggcaggaacattcacgaaaaaaaagaaatgtaagcaagtttcatacacagcacctatttattttattcttgccactctctgtcaaccaagttaaggtatgttatggcctaaaatggcagatatagtcactggagtttgcaatgatatcccagcttggcccggaagggagagggaagacatcagtgaaaagagggcatattttggaataaaaacaacagacaggacaattgaatttgaatgtggaagtaaaggagacaaacagttctggcttgaggggatccagtatatgttgaattgccgtgtcaaagtaacattataaaaaaaaataccattgacattgagatagctgtatatatgcctttnttttttttttccc

SEQ ID NO: 98480 - DNA, 301 bp, Glycine max
  Clone ID: PAT_MRT3847_59941C.1
cccacgcgtccgcagacccatagagtttcacatagctccttcatcataggcattttcagggttcttccaggcacactgttaccatcaatcatatacgtctcgattctaaaatctctaaaaagatgcagctacaacatggctctgctggttaagccattaataacctatcacaagatctgatttactacgtcgccggaatgattatcgacaagtcaaaggtggtgggagaccagagcatcttttaccggcacaaaaaagatcactttggacccgttgtcaagcttgagaagttctcactcta

SEQ ID NO: 98481 - DNA, 367 bp, Glycine max
  Clone ID: PAT_MRT3847_59942C.1
aaaataatttgcttctctctctgtctttctcacaagacaacagaggaggactgccgatctaaccgtggcacgttgatcaaatgcagagtccgaggatcgacttctccaaatgcgtcttcctcgagggcttcctggatggtcagtttactgcagcttcaactgctaaaacatgagagcaaccctgattatgcggtttgaggcgcatctctcttttttgaagagtctgaatggctaataagagatctcacatttgccttacataaaaatggccatgactatagaaaagtggaagctcatgtgcaccagctcattggacgcagctcaagcgtatggttcacacacggtgaaacctgcctgctttgctttc

SEQ ID NO: 98482 - DNA, 117 bp, Glycine max
  Clone ID: PAT_MRT3847_59943C.1
atatagatattcccgagtgtacactagattgagaattaactactcttattctactccagtagcttcactaaacttgagcgtatcaagagctacccttaacagcaccggacgcgtggg

SEQ ID NO: 98483 - DNA, 244 bp, Glycine max
  Clone ID: PAT_MRT3847_59944C.1
ttacttttagctttaaaatttttaaccccagacgaaaccaaaaaggggaaggggacaacacaagacagaaaagccccaaaccaccacaaaccggaggacacgaccgcaaccaacaagaactagacagatggaggacccgcccctaagagcagtgccaacgggggcggaaccaaacacaagcaccaacacaacagccccaccaggggcaaggtcgaggcaaacccccggggggaaccacccgacc

SEQ ID NO: 98484 - DNA, 461 bp, Glycine max
  Clone ID: PAT_MRT3847_59945C.1
gttgttgttcttgtttgtttagtacctctagtagttcctatacctgtcatgttccttgcatgattcacctccttgattcaagctctcattcgtgctactttagctgcggcttatatcggtgaatccatggaaggccatcattgaccagttttctacacaatagcccttttcgtttagcttgccgcacatatatagcggctcaatataatctactttagtaaacatctatctctattctacctatatgtatatagatataggtagatagatatcgatagatattcgattagcatatattagcatatattagtatatattggatattcaaaaaaagaatatatactaaagaaatttagaacccttattagaaatctggatgatatttacgattacagcgtgtgataaaaagattccttttaggacttaaggagattcccggttcaagtacctttcattcaacg

SEQ ID NO: 98485 - DNA, 270 bp, Glycine max
  Clone ID: PAT_MRT3847_59946C.1
tacttgatttcctcgatggtgggtaggaggtcgtggatgtagctgatgagctggtcggcgcgcgggagatgtttatccgcattttcagaagcttcgtcgcgatctccccagcaaaaaaatcgttcagggccattatgttgtagataaccccactttctctgctctcactcttagtggctatatcgctcttctttcttaaaccaacttttattatctctgagctactatacaaaaattgtagtattatttttagagtcattgtgtttactg

SEQ ID NO: 98486 - DNA, 696 bp, Glycine max
  Clone ID: PAT_MRT3847_59947C.1
tgagttcttgatgagcaaggaaatggatgagggagcagtggaaagagtcgagggctgcaacggcagcgacacggccgtggagatcaaggatggcgaattctcgtgggacgatgtagatgggaatgcggctctgagagttgaagagatggaaatcaagaaaggggaccatgctgctgttgtgggagctgttggctctggcaagtcttccttgttggcttctgtgttgggggaaatgttcaagatatcaggaaaggtatgttcttcttctggactcctcatctacatatgttgtttttttatttattttgtaggaatccaagttggtgttagtagatttttataataattcacgcattcaacttaaccaatctgagttagaccctttaacttatgtttcttgttttgtgcaccgcattactgcaagttaattgcttcttgttgcattggagattggtgtgcttgttgatgcatttatatgttcataatgccccatacattgaatgcctacaaagaaagtgatagatgcaaaatttttacatgacaaatgtatgttaagattcaattctactatagaggatccattccctcaaattgaagaatacaaacattgatttccttgggattcatagcattcacaacacaattcaccaaaaaaaaaaaaaaaaaaaaaaaaaaaaaagcggccgctctagagga

SEQ ID NO: 98487 - DNA, 1577 bp, Glycine max
  Clone ID: PAT_MRT3847_59948C.1
ttaacataaacccaatgtcgtcctttagccgactttataaacttaacctaaacccaacgtcgtcgtttcgtcgcccaaattatcatcgtgtcgcgaaccaccgcgtcaatgtcgggcagtggtggcgtcgccatcaacggccagaacagcaaccggtctcggattacaaatcataagcgcctgcgtactgcgccgtcattcactgtcaacagctttgcagaggacaaataccggtgggccttcataatcattatttaataggtagggccatatccaacctatcactactggactttgggcttgcctctcacaaattcaaagtttctctctgggatcccgatggggtttctgaatgtcagaaagccaattctctgttgcgggctgctgaaaactggcttaggctattgcgagttaatcatcctgattacaattactttatgtctcattatgcatatgtgagatgacccgagtttctcgaaacagaagcagcccaacttccgaataccagtttatgtaatccctgcccagtatatttgtgttgtccattaaaataacagttatttttttatatgctcataaacgcccgcgtcacttgtgttttcctaaatagaacagcagggttgctgcttcagcaagggggagaataggtattaggtattgaaaactatacacctttcatattgaaggggactgcttctgatttcaaaggatgcagaaaaaccattattaacaaagtttcaacttcttttcccccctgcataacctttcatgggttcatcaagtgatgagactgagagctgcagccctcctggtcagcttatttttgaatactttgagcatgagacaccttataatcgtgagccattggcaaataagatttctgatcttgaacggcaatttccagagttgaaaacatactggagctgtgatctttcccctgcaagttgggtttcatttgcttggtacccaatatacagaatacctactggtccaacattacaaagcttgagtgcctgcttcttgacctttcattccctgtcaacagctttgcagagttcaaatactgatgggctacataatcattattcaagaggtagggacatatccaagctatcactaccaatctttgggcttgcctctcacaaattcaaagtttctatctgggatcctgatggggtttctgaatgtcagaaagccaattctctgtcgcgggctgctgaaaactggcttaggctattgcgagtcaatcatcctgattacaattactttatgtctcattatgcatatgtgagatgacccgagtttctctaagcagaagcagcccaacttccgaataccagtttatgtaatccctgcccagtatatttgtgttgtccattaaattaacagttgttttttcatatgctcgtaaacgcctggttcacttgtgttttcctaaatagaacagcagggtcgctgcttcagcaagggggaagaatagtattagttattgaaaactaaacacctttcatattgaaggggctgcttctgatttcacaggatgcagaaaaacccttattaacaaaggttcaactttt

SEQ ID NO: 98488 - DNA, 451 bp, Glycine max
  Clone ID: PAT_MRT3847_59949C.1
cgatctatatcggggagggttccatgtgaacggctcgggcacaggggatagccactcctaggggacggtggaagcccgtatgatcgcctatgggaccgtctgcgcaagggactcatcctaaaatgcctgaacacggacgagccgggtgacctacacgaaaagaaatccggagactaacggggaggccccggaaagacatatactcattgttgaccctcttggacaccctgcaaacgaataagccggtggaagaccacaatcggctcgataagcagcttgcgaaccatgttgcaaagtgcacaccccgcggcctgagaaaataccggcgtccgagagtgtcaggcccctggaggctctggtaactttatcaacatggcgcagtgaataatgtcagttttatgcaagattgccagcttaccaatgttttcaggggaacatgttagctctacac

SEQ ID NO: 98489 - DNA, 289 bp, Glycine max
  Clone ID: PAT_MRT3847_5994C.1
ggcgcggccgcttttttttttttttttttttttttgttttagcatcaaatattaatttttttggcatggggggaacagcccaggaaactccctcttcatcatttaccaaaaaggaacccccccattttatcaaattggggcgcagggccttcaactggtttcctaaaaataaaataagttaaaaaaaggggcgctaatggccgggttatggccaggcccaaatggaaaaggggtcgatgcagttacacacgggaatggaatctgggacttctccgggggagatgcaacc

SEQ ID NO: 98490 - DNA, 427 bp, Glycine max
  Clone ID: PAT_MRT3847_59950C.1
aataattattattttatatttcatacttcttgtttcattttctttatgttgttttccacattcattttttttgttggtaaacggggacaaacaaaaacaatttttatgtcctattatttccaattccttatagacaatctaacattttgtcgattaatcaacaaaactaaattatacacttgttcgattaaggctattgttaattttttttttaacttaacaaaagtgtatagctcaatctccataagaaaactgattaaatgcttatttttaacccttctcttgatagtcccccttgaaataaaaaaaacacgttacaatttgtttaacaaaaacactgatcccaattttaatcggttttaataacttggtttgaatcaaatttattctttataaaaaatacaaaaaaaaattgattaaaaaaaca

SEQ ID NO: 98491 - DNA, 241 bp, Glycine max
  Clone ID: PAT_MRT3847_59951C.1
caaactcagggtagggcagagagagagagagagagagagagagagagagagagtgggagtgtgggatatcgcggtgcatggtggcgctggtgtcgaccctaatgtcccactcgagcgccaagaagaagcgacacaagttgtcacgcgctgtgtcaatgtgggagtctgtgctctgaattctagtgttcgcggcatagatgtcgtcgaacttgtggagagggaattggaaacgggtgctctg

SEQ ID NO: 98492 - DNA, 262 bp, Glycine max
  unsure (1)..(262): unsure at all n locations
  Clone ID: PAT_MRT3847_59952C.1
catcgattctctcccttctctttctctntgcgacaccagatgatggagacgacggcgaangannangctgtcgttgcgccaatcgcggcgnngttgttggnggtgctantcgcggcgattgtngtngtggaggctcaggagaacncggncgtgaagacgcnggtgcagnaattgcangggaancatnatgggacaccangatgggaatgtaagggncnntnaatttactctagnagccnnnctaattantgnnnatttccac

SEQ ID NO: 98493 - DNA, 344 bp, Glycine max
  Clone ID: PAT_MRT3847_59953C.1
aggaaagcaagaggaagaaataatataagcgaagcctcaaaaggggcaaaccacaaactaaaggaaaaagagacccgggggtaacaataaagactaaagggaagagaaaaccaagagaaataaccaacctgaaaggagaggaagaaaaaggaggcagagcgacacgaggaaaaacgaagggtaactaacagaagatccttaaggaaacgcgagccatgtaggaaggaacaggcgaaccaataaaccttgaccacaaaagaaggcagacagaaggcagcaacagggatctctgggtaaggaaaattagaggggcccgttgacacccccaaatagcagaggagcaa

SEQ ID NO: 98494 - DNA, 519 bp, Glycine max
  unsure (1)..(519): unsure at all n locations
  Clone ID: PAT_MRT3847_59954C.1
tacggctgcgagaagacgacagaaggggtccatattagtgctgcatcctgtgtctattatctttcttctctacatcaattttcaaatattgaatgctaggacacttcttgtagcatccatttctttagcatatttaagagcttctgaattggaatttacaggcaacacaagttttttttttcttttttaatgactgcttattcttcactattgtctcaatacatttttactttggactcccnnnttgggttcagcttaatagaatctctgaaatatgcttttcatatgacttgtcttgtgatttttcttgtatccaggactgctaacatgttctggtggttgcttgctgttttgaggcaatttaatagtcattattgaaggttgttattgttcaattgggaagtatttctctgtttgggaggagtgttattaagagactcattgggtattatgtgttggtagaaagcagttgcatctccagcctttggggatttgattactgaatcgtggttgctgtga

SEQ ID NO: 98495 - DNA, 340 bp, Glycine max
  Clone ID: PAT_MRT3847_59955C.1
agatatattgagttctatcgaccgctaaccctatggctgtcacaactgctcaagagccgatagagactccatagctgggacagtgagtgtacctaagcattcgagaactacatgtagatgcaactcactcatataaagatcaatactatgtgcgctgcatgactcaagatgtgcttcaagaagcttgcgggcagtcggccactgataatctctgctacccggaaatgatccacgaacctgatcctgctagcgtgaccacattccatataacgtaatgttatactaccaggcgaatgcatggtcatacatcattcctgacagagattgatatcctatcaca

SEQ ID NO: 98496 - DNA, 292 bp, Glycine max
  Clone ID: PAT_MRT3847_59956C.1
gaaagcccatgtgttgcgaggatggcatttatcagccaccaaagaacacggaaaacaccgtgaaagcccaaaagacgggggggcccgaaaaaaaaaaaaccaaagcggcccacagcaagggggcccccgcatgaaaggaaccaagcttgctggcggttcccggcgacggacaacatgtccaggcttccgcgtaagcccaatccactggcgggagatccacaccaacgcgcctgccaaacccctgccgggccccaattgaagccccgggccgtacaacccctgttagcccagc

SEQ ID NO: 98497 - DNA, 696 bp, Glycine max
  Clone ID: PAT_MRT3847_59957C.1
aattcggctcgagcaactttctgccttcttcagcagcagtgtgtcaaaaacttcatatcattcatggccaagccacaaaatacaaaacccgggtgtttctctttctcaagcttcctacgcgtgtttctatgtgctggaaatggaactactccaccagtgcacccttatcacattacagaatcagaagaatcagaaaatgcacatttcaccaaagaaaaaatggtggtgaatgataatgatgatattgcttctgcccctggagtggtggcaaggctaatggggctggattcacttccaaaccccaaatgggtagtgaaatgtggcaccccagattcggttcctagaagcaggtcagtgaactttgtggattacttgcttgagtttgatgcaagccatgttagtagccataggagggtgaagacctcggcatcgttcagagaggttcctagtttggttcagaaccaaaagggtaatggttatggtaatggtaataatctctttgtgttttgcatggctggtgacaataacatgagggaagagcaagagggtagaaatgagatgagggaagtggaaaagttgaggcagaggaagaggcagaaggagagtgtgagtgtgaagaaagagaggaatcaagggaagaagaacaagaagatttccaagctgaagaatgaaccaagggaggtcccttcttcttct

SEQ ID NO: 98498 - DNA, 668 bp, Glycine max
  Clone ID: PAT_MRT3847_59958C.1
ggtttggtgcgcttgaaagcaaaaaatatttacactctccatcctattattgaaactagtttttagacgatgaaaaaagtctactgttgcaatttgctttataagagtcggtatttttacaaactattatgtgcaccataatccagtaaaaagaggaagtataagaaaattcgactgccaaaatcggagttactgggcaccacttagcgcagaaagaatctataaaatgccgaccaactcagaaatatcaaacactcagctggtaaccaacatggcaacatccattgttcatctcaatactgtcatataagtgcagccagcattgctccagggtctgtcaatgattcaggagtgctggctatttgagccattggaggttcttacataggttatcccaaagcaactgtcattcgcagctgtcttctgtctgctggatctgtttcaattcttgtcacatttgtactggggatcggcatctttacaaggctacgttggctgacagtcagagttccattaacaggacattgatctttcctatacatgattctgttgctcaggctctgctggttgagtgtgcataagaattttagcatattttgagagaagaataggaatggtaaaagtcctttggactacatccaggttgtctaactagaaggtgtccaaac

SEQ ID NO: 98499 - DNA, 410 bp, Glycine max
  Clone ID: PAT_MRT3847_59959C.1
agaagaactctattaagctgagatggcctcttcagtgatggcatgtgtggccctcaaacctgcccctttcactgttgagaagtgctcagttagaggccttacctctctatcaaggaactccttttcattcatagttgaggccagtggtggcaagaagatcaagactgacaagccttatggaattaatggtggcatggctttgagggaaggagttgatgcatctggcacgaaaggaaagggaaagggcgtttaccagtttgtagacaaatacggtgctaatgtcgatggttacaggtaattataagatctatattatttaaaatttataaattattttcattcgattgtgtataaattaacctactcaatcaaattgaatttgcctgatttattatgcagtcctatctacg

SEQ ID NO: 98500 - DNA, 138 bp, Glycine max
  Clone ID: PAT_MRT3847_5995C.1
agagcttgactccatgcacgcgtcgtagctcgattcgtcgggcaaatgttagcccacagccatgccaacatgctatatcactgtgaaatgcgtcaatggcccatcactgctagtgagtcgatttaatctgactaacag

SEQ ID NO: 98501 - DNA, 827 bp, Glycine max
  Clone ID: PAT_MRT3847_59960C.1
aaaaataattgacagggatcacactttttcaatgatgagtaaaatattgggattaattacaacatacaagaacacaaagcaaactgaatagattgctagctctagctgcggcaatggtacaatgataataaattgaaaagaataaaaatcacactttatagactaaatttaaaagagctgagaatggacttcaaccgagtattgaatcttcagctttatcttcaaatagcgtttttgcagcttttgtgaacaagttatgggcctgcttggaagagaggcctatcttctccaaatcatttaacgattttaggggactttcttctctaaggtctattatgtattctgccattttctctcctataccctttaactctagtagctcctctctgcttgcattattcaagaaatcaatgtattcttgaactaaacagttcttcagtgtaaaacttcgtgtgctgaatttgccaactcgagcatgatccttttactcccctttattctctgagcaggtttgaattgaaatcaattttaattcaaggggttactcattaccaaggatggagataccaaggagagcgtttgctctacctccttgcattatacaagaaataacagtattcttgaactagactgcccttcagtgtagaacttcgtgtgctgaatttgccaagtggagtgtcattcttttgtggccctttattagtggagcaggttgccagaaaaggtgtttgtgattcaaggggtttctgattaccattgatgttgatgggggagagggcttttcttaaaggactttgtgctgcatctttactcttaatagtaattga

SEQ ID NO: 98502 - DNA, 400 bp, Glycine max
  unsure (1)..(400): unsure at all n locations
  Clone ID: PAT_MRT3847_59961C.1
actcnagcttcaaaacggtattacatactatatgtcaccaattataanagcagccgtctttttaataaaactagattcacctctaaaaaaaatatgccctctcactctattccaatcacccaattatctctataacacgattgcactattctttacatctccattacataccctttttatcgccaaacgctatcctttgagcattaactttggttcatttacacttataacgctgtgtgccaacattcctacttacttcgctattgtacaaatacattttctacaaacttttaaactttcttcacgcgatacaatataatctttctttaatattcaaatattttccccctaatacaatttctttaacctttatttcttttcacaacaacctttaaataac

SEQ ID NO: 98503 - DNA, 728 bp, Glycine max
  Clone ID: PAT_MRT3847_59962C.1
tttcaaggcaatctcagagctttgtagctcaaaacttcatgtgcaagcaagagttagaagcagataacttgagttgcatgcttcaagatccatttgtgcaacttcctcagctagaaagcccatctttgccattagtaaagaggccaagcacagtgtcactagtatcagacaataacgaagatgaagacattcaaaacaggttgttatccaacaacaacaacacaaagaaagtcaccactgattggagagcccttgacaagtttgtagcctctcagctccggcaagaagtagactcgcatgaaagtaatggagtaccctcaagctttcaaccccatgatgataaccacgacatggcactgctgctactgcagagtagtagggatgaggggaacaggttgagcccatttctaaatacaagctcagactgtgatattgggatatgcgtattcgaaaaatgatccaagaataaagaaatgcatggaaacgatttttaattattggtagtagtacgccatgtgttaaatgttatatggatgctgagacatagacatactatatttttgtaaaaaatatgtgtggatcagaagaattaaaactctctattgccttctgcgtgagtgcagctgtgttcgcaaattgagatgcatgcgtccaagtggctcaagaatttaagtagtttttactatattttaagttatcacgataagcaggtacagtaatagccttgc

SEQ ID NO: 98504 - DNA, 552 bp, Glycine max
  Clone ID: PAT_MRT3847_59963C.1
cggataccacagccaattttcaaagcaaaggaggacttaattgatgcacatgaaaactcattaattcgaaggactacactgaacttgactgatcatacccaaaccaattccatgttcactctctctggctatgattcatgggtggtaaggcacccttctgcattgaactcgtttgataggttgatgaaagccgccagtgggaagaggatcatcgtttttttggactacgatggtaccttatcaccaattgttaatgaccctgatcgtgctttcatgtctgatgagatgcgtgcagctgtatatgaagttgctacttattttccaacagcaataattagtggaagaagcagagataaggtaaaaggtttcgtgaagttaaataatttatattatgctgggagccatggcatggacataatggcaccatcaatggcagttacatcttctgacggcaagcattttgacattgcccgtaacacaaatggcactgaagttccctttcaacctgcgaagaagtttttgccggcaattggagagataataagagtacta

SEQ ID NO: 98505 - DNA, 808 bp, Glycine max
  Clone ID: PAT_MRT3847_59964C.1
aataaatgaaattttgggaggctcaaacatcaatttgtatatccaattagaattagatagaaaagaaggggaataaggaaacccttcgcctcggtgcgcatccaatccaatctaatcaacaaaagaagagtagagcgagagtggaatagaacaaagaagatgagcggcgccagcagcactataaggctatcgccgatggtgagcgtgtccccgaattgcaattgctcatcgatgatggtgatgaagaagacgacgacggcggtggctcctttgtggatgaaaagcaagagcgctaggggtggtattaggtgcgaggtggctattaatgcggtggatgagtcgacgacgtcaccggagtcgaagattggagcgcgtgtgaaggtgactggcgggtttgaaggtgtaccacgtccccaaagttggggagcttgacctaacgggtctggaaggcgagatcaagcagtacgttggcctctggaacggtaagcgaatctccgccaatcttccttacaaggttcagtttctcaccgacatccccggtcgtggtcctgtcaagttctttgcccacctcaaggaagatgaattcgactatctttagtcactgtactgcactgcactgccctgcacgtcactgttgtttaggtgtccctgtacttgttggtaaaagcaatggtatccttcggcaaatctgtcttttgaacctactatgattttactgacctcgaaaactcaactcaacaatgatgttttgtgcactttcatgttattagtctctacaaaccggaaaagaggcaaatattgatatttt

SEQ ID NO: 98506 - DNA, 254 bp, Glycine max
  Clone ID: PAT_MRT3847_59965C.1
gacggctgcaagaagacgacagaaggggggacatttaaccaaaatttttaaacccaaagtgcttctctcctcggtgtggtctctctctctggctatccggttacctattcacacttctttcaattacaactccaagaagctcatttcccatccaccatgtttcaacattcaaaaaaatccttgttatctccacttcactctttgcaactgtttcactcactaaccattcatattgtcctcttccattttaattt

SEQ ID NO: 98507 - DNA, 1793 bp, Glycine max
  Clone ID: PAT_MRT3847_59966C.1
cacgcgtccggttgttgtatgtaatcaattttaatccccctgaattttttacttatgtattaccttctgtttcaagccgatagatgcctactaaatgaatgatatgaattcatcttaaaaaaaaaaaaaaaaaaaaaaaaaaaaaaaaaaaaaaaaaaaaaaaaaaaaaaaaaaaaaaaaaaaaaaaaaaaaaaaaaaaaaaaaaaaaaaaaaaaaaaaagggggggccgcttaaaaggaccaaagttaacaaacgaaattttgggaggttcaaacatcaatttataagatcgtatagaagaaagggaataaggaaacccttcttcacttctacctctaatctaggaataggaaaaagatgggcagcactagtgcgagtgccctcaggctatcgtcgatggtcagcgtgtccccgaattgcaattgctcatcgatgacgcttatgaagaagacggcgatggcgatggcgatggctcctttttcacttgcaatgaaaatcaaaagcaaaaggggtggtattaggtgcgaggtggctattaatgcggtggatgaggagtcgaggacgtcaccggaggagacgaagatcggagcgcgtgtgaaggtgaaggaggcgggtttgaaggtgtaccacgtccccaaagttggggagcttgacctaacgggtctggaaggcgagatcaagcagtacgttggcctctggaacggtaagcgaatctccgccaatcttccttacaaggttcagtttctcaccgacatccccggtcgtggtcctgtcaagttctttgcccacctcaaggaagatgaattcgactatctttagtcactgtactgcactgcactgccctgcacgtcactgttgttgtatgtaatcaattttaatccccctgaattttttacttatgtattaccttctgtttcaagccgatagatgcctactaaatgaatgatatgaattcatcttatgcagtcacttctaacaagtaataataaaattacatatctattaatcagagtaagaattaaatggtctggtatgtaaccaaaaagttgtataaattaatgggagactacctcgtactcgacatacacttataggcaagtcgcggtctcgcgtcgtggggactgaaaaacccctggggttccccaatttaatcgctttgcagcacatccccttttccccagttggggtaatagcaaaaaggcccgccccgatcgcccttcccactaggtgtccctgtacttgttggtaaaagcaatggtatccttcggcaaatctgtcttttgaacctactatgattttactgacctcgaaaactcaacttaacaatgatgttttgtgcactttcatgaatttagtctctacaaactggaaagaggcaaatattgatattttgcttggttctattattgtctagttactacgtagtagtaattcccttttaacgttccaacttgtggtttttaaatttcatatctgttgttctgtgttagcattatatggtctggtatgtaaccaaaaagttgtataaattaatgggagaatacctggtactcaacatacacttataggcaagtagctttcccgagtatttcttgctgatatctgcagtttaacatgaaacatgaatagattagattagttagattattacaatgaagggttgttttttgtttgtagaaatgaatcacttatttaaatatttccgaagcaacgtggctttatgtcactatgtagtccgggccaaaaaaaaaaaaaaaaaaaaaaaaaacaaagggccgctctagaggatcca

SEQ ID NO: 98508 - DNA, 342 bp, Glycine max
  Clone ID: PAT_MRT3847_59967C.1
acgcgtccggctgcttcttcttctatgcttttctgctcctcatgccagtgctcagtctagccaagccaggtcccttgacgcaattctgcaagaatatgccttcaaggcttgggtcaaacccagaacaggtaccatttacaacgcaacagcaactcagcttccttccaatttgaccggggttaagatttccgcattgagattaaggagtggcagcatgaggagaaaggggtttcccagttacaacgagtttgagattcccataggggtcattgccaaccatatgtgaagaggctggttttggtgtaccaaaatttggggaattggtccaacagctactaccct

SEQ ID NO: 98509 - DNA, 313 bp, Glycine max
  Clone ID: PAT_MRT3847_59968C.1
ctctggattatacaatcaaattcctactgccttccatccttttgctgatgcaaatgctgatgacttctgtgcttagtcaaaggattttctacatattcgcgttcatcagccaaatggtaggaacaacctgacaaccgttcaagtattgaaaaaagaattcagctttaacaagatacttaaagactttaagaaagagctctggtgcaatggaacacttgtttaaaacccataactatgacaggttattcaacttaaaggtgatcagaggaagaatctttctactatcctagcccaagctggtttcggtaaaaag

SEQ ID NO: 98510 - DNA, 588 bp, Glycine max
  unsure (1)..(588): unsure at all n locations
  Clone ID: PAT_MRT3847_59969C.1
agggagcggcgggaggaagaggagcgcctgaacaaccccgaggagcagaggcggatgcagttgctggagcagcaggaggctgagaggatgcagagggatatgatcctcttccgagagagagagaaggcgtggatggacactgtcatcactcaaaaacaacaacaacaacagcagcagcaacaagaagacgaggatgatgaatacgaatatgtcgaggaagaaggccctccagagatcatttggcaaggaaatgagatcatcttcaagaagaaacaactcagagttagggttaccgacagggacaaaccaaagcccaacgagactaatcaaaatgaccaccagcaggaggaggataataaacctacatccaatcccttacccccggaatcattgacacttgagaatgttgctcaacaaatacccaattttggaactgaacaggataaagctcattgcccttttcatctaaaaacgggagcttggtcgtttggtatacgctgtancagagtccatttgtaccctgataagtcgtccactcttcttatcaaaaacatgtacagtggtcctgggcttgcttgcgaccaggac

SEQ ID NO: 98511 - DNA, 416 bp, Glycine max
  Clone ID: PAT_MRT3847_5996C.1
gaatcagctgagctgaccaagcatgattcataatggttgcattgtatcccaagggtgtgcccctctgaattctaggtcacgcaaccatggcatacctagtacctctgcctttcgttgcgcttctctaatgcctcccaaggttgccgtctctaacatccggagcttttggggacataatctggaatgtaaacccttgttgccaagaggttatagggactgtgagccgctggatgccgctatcactctactggggtaaactgggaatgcatttttggactgctgtatcatttggttatctatttaccgtcttggagtccataaggtgtgctcttgccggtatgtatgctgacattcctttcatctgtgacgcagcatatatccagataccatatgattaacagggcagatgtaagaag

SEQ ID NO: 98512 - DNA, 207 bp, Glycine max
  unsure (1)..(207): unsure at all n locations
  Clone ID: PAT_MRT3847_59970C.1
ctacagcattcaactcgagtccagctatccttactttttactcatnccacanagtgtatatttcttggcttctcaccaagttaacaagggtacaagttcctacaccnatgatttgagtgctatatatttacaagattgttttattcaaagataaactgtctattcctctatccctgactttatccccaaccatatttacacatcctc

SEQ ID NO: 98513 - DNA, 261 bp, Glycine max
  Clone ID: PAT_MRT3847_59971C.1
ctttagatcaagatttaagatcaatatcagttcctttgtattgcaagacgttcatggaagaaacatttgttcccttacgtggcattaagaacgacctcaaagcaagaattccgtgctatagacaagattggactagtggattccaagctggaatcagatggaagtctcactgctgtgcagactcttgcatcaaccgcactatgcggtattatccactcaatcattggagggcagcctctcctcatactaggtgtagctgag

SEQ ID NO: 98514 - DNA, 519 bp, Glycine max
  Clone ID: PAT_MRT3847_59972C.1
cccattcgttcgcccacgcgtccgcccacgcgtccggccaattgatcagctgagacattctctcccaatcgccaaattcgtcgcctttttctttcgcccctttcgaaatgcttctgaattttgaatttattccaacatatttcacgtcaatgaacggctttttcgttcccatttttgccttttttgtcattcaattgcattttgcctcggccgacccttttgctcagggcaatttggcattggtattcgatgccaaatccggaaggagctcggaaaacagcgcacagatagcaaatttgagcgctctttggtgtcaggccactttcgacggaagtgatcagcttccgatcaaaagtgcccgattcatccaattgcaccctccgccgctccgacaccaccaggccagactcagtcccgaagggaatcgcgcttttctcgactttggcctcgtgcccatttccgtcattggcaaataccgatgcgaaatcacaacggaggacgacaaactcgtcacgggca

SEQ ID NO: 98515 - DNA, 472 bp, Glycine max
  unsure (1)..(472): unsure at all n locations
  Clone ID: PAT_MRT3847_59973C.1
gtaaattgtaattagtaattgtttgttttggtacaggtaaataaatccctttcatattttctttcccctccaaaggacttgagataggaagtttgaaaaactaacgtggtaaaatcataatctttgatacagtaagtagatgatttggggatggttgttatttatattccctgtaaagccgatcaaaaactcgttttaaaagcagtcagtttggcctgcattacgataacccattcattctatgcaattacttgctgcacctccataattgcgccatgcagcctttttaaggttttccggccagggatcaaaaaggtgctttaacattttgtataaggggccttaggctgtcacgttgngtggaactatgaatcccaaaaagggaaacgtagccattttgccattggggatttttttttcctgggcctagaaaggagggggagggttgaagggttaaaaaaaactaccaggg

SEQ ID NO: 98516 - DNA, 444 bp, Glycine max
  Clone ID: PAT_MRT3847_59974C.1
taccggtccgtcgtcccacgcgtgcgcccacgcgtccggtttgctgtgagctataagcatgattatcgtgacgagaatatgaaggggttagcggtcctttatgctgaattggttgtggtagcatggccatgccatggctcacgctaccaaaggttccctcctcgaatgactactggctatgagtgagcgttcttcggaggtaaaaggcgcaagttttaggcttgctcgggaagcacacaacatccgtacctttgaaaccattcctgaagagtgcattgaaccaactaaggactacattaatggcgaacagatgtagatcagactctaaaacatgtataccaacaagcttccctttatgctagtgaacgcgaagtccatcacaacgacatatttatattctgcatatattaacaccgtactttctaaaattccatactatgaaaa

SEQ ID NO: 98517 - DNA, 200 bp, Glycine max
  Clone ID: PAT_MRT3847_59975C.1
gactcactcatacaataaagaacaacttttggctccttggtgacaatggaaataaggaatccaggtggcttctcctcctggccctcctccctggccttggcttccaagttggtgttgcaaacggaggaaaaattttttaattcaaaaggcaacggttccaagggttggggtataaaaaacaacactggtccttgggccgg

SEQ ID NO: 98518 - DNA, 342 bp, Glycine max
  Clone ID: PAT_MRT3847_59976C.1
tcgataaaaattataaaaaaaaaaaaaaaaaaaaaataaataaaaaaaaataaaaataaataatataatagggatggaaagattataagaggtattcgagtattaaaaacattttctttcgatcccttaactttttttttgtttaatctaaaatgcaattatacttccgattttttgctacctgtttgctggaaaaaacttggtgtctcccacataattccacttgttaaagttacatttttctctaggtgtgtgagaggatgtcaatttcaaacaaatatcaccataaaacattttgtttgtctttttcgtcaatggaacgcacattgtagggcggtttta

SEQ ID NO: 98519 - DNA, 169 bp, Glycine max
  Clone ID: PAT_MRT3847_59977C.1
agacgcaatttctctggctgtagcgacacctctacaaaggccgtaaatgtcattgtcaatgtccgctgaaattgggctgacgaattcgtgctctccttcgaggctgtctcgaaggcgacttcgttctttatgatagataaattctacacctttgtatttttgaggcact

SEQ ID NO: 98520 - DNA, 155 bp, Glycine max
  Clone ID: PAT_MRT3847_59978C.1
aagcctgaacccctgcaggtaccttcccatttcccggcacgtccccgctttccttttctcatccgggaagaaaaaactcggggaatggtactttgaactatatatcactggcacccaacattatcacgaatgacaaggtttattctattaaagat

SEQ ID NO: 98521 - DNA, 261 bp, Glycine max
  Clone ID: PAT_MRT3847_59979C.1
caaaaaattgggcgcaacggtcctgccttcatggattaacacaaacccttggaaggcacatgctgcaacattatatgacaacaacatttaaacaaaacttaaattactgatgggattcaataccaaaacaagggaggtggccttccttcttaaaggtatggcttcacaccaggccatcatacatgaacaatgtcttcttttgacatcaacactttcacaaacgcttcattttaaccgccgcacgttcaaaatacgagaaaa

SEQ ID NO: 98522 - DNA, 2037 bp, Glycine max
  Clone ID: PAT_MRT3847_5997C.1
ggcagagagagacggtagcagataaacctaaagacgaacctcgcaaattccctcaacactggagtcactaagtgggactcggtggaaattcattctgggactcaggttagttttctcaatttaaaaaaacaactctcacaatgcgatccggatccttaaattgttgcttgctttgaacctaacgataagctgtgatgtgattatgatgttgtgtatttttttatttttaattatttagttatcatatgttttcgtcataattttcaactgttaatcgttaatttactgttatttactgtgctgttgaatcagctaagctgaccaaccatgattcaaaatggttgcattgtatcccaagggtgtgcccctctgaattctaggtcacgcaaccatgtcatacctagtacctctgtctttcgttgcgcttctcgaatgcctcccaaggttgccgtctctaacatccggagcttttggggacataatttggaatttcaatccttgttgccaagaggaatgacattgtcaaacacgttcactgcatcaagcctacgtgtaagtgagggtcaaaattttctctttcgtgttctccctctgttaccccatttgcgcaagtctaatatggtccctcgggcatcaaaggatgtcccaactagctttcgttatcctccaatgaccaagaaaccgcaatggtggtggagatcattagcatgcctcccatacctcatgcctctccatgagacatggatgtatgccgagacggcatacaatcttcacccgtttttggaatgctttgaattctatacgtacccttttcttatggcaattgggagcctgcctagctggtttcttatggcatacttctttgttgcatatcttggaatcgtgaggagaaaagagtggcctcatttcttcagatttcatgttgtgatgggaatgttattggagattgccctgcaggttatagggactgtgagccgttggatgccactatcactctactggggtaaactgggaatgcatttctggactgccgtatcatttggttatctctttactgtcttggagagcataaggtgcgctcttgttggtatgtatgctgacattcctttcatctgtgatgcagcatatatccaaattccatatgattaacatggaagacgtaaggaagtttacccttacattatgtatcacttttcgttgtataagagtttttcttgagcagcattgaagaacgagtagtctgttagtgattgtttatgtgaaaaaaatatgtatttgagatttccctagcgtacattttatttatatggattgaatttatcagtaatctgggttcaatctctttgtttctcttccatttggcattctctactgtcgctatctattacaaatgcacattacctttatcatagtctttatgtagagatggcaattttaagcatgtccaggaacttgattagtttgatctacaaaattactgtgaaatctgagattgatatctactttgggggcaaaatagagattatctactcggtttgattcaagattacaagttttgttcggcctcttggttactaatcatcttacctgcttgagctttatctttgtggaggattgtggatgggagtgggcaatatgtgcagactcttctttagaatatcatcgtcccttatgcctcacgtaaaccatctattttgctgacatattgcactatctatttcttggttggatggcagaatctttctatttatcattttgcttttctggttgcaacagaatcttccaattcaactggtgaataagatggccctattagttcaaagggaagggatttgtcaaataagcaaacaatgatggcgacactagaacagcataactactggaacaaatttaaaatagtactttgttcggtgctttttataagaaataaattttagtgtatttttacacatttatgggataactaaacaatgaaggtgacactataacagcataactatcggaacaaatagtactttttatataatattttatttt

SEQ ID NO: 98523 - DNA, 244 bp, Glycine max
  Clone ID: PAT_MRT3847_59980C.1
tcgcgtacgcatccgtagcaaccttaccagcctttccatgcatagtatctcaaaacactcagggcatcaacaccatgacctcggaggtgcaacgtctcaccaaaaacaacgtgagcgatcaaacccattcaattgactgtatcaatccggaaaagcaccctttaatcttgtttgcgagtgatttcgatgactagatttagaattaacgctacgacattttatgacgcatccatgccgtacatcg

SEQ ID NO: 98524 - DNA, 624 bp, Glycine max
  unsure (1)..(624): unsure at all n locations
  Clone ID: PAT_MRT3847_59981C.1
ccacgcgtccgagagagtatgtcgtatccaaaactcatttggtggtctccgtcgatgctcatgtcgttggagtctctgccagcgctatccgcgtccagcaccacttggccaggcctcttctttgcctccgtgagctccatgtagcttccctgagagctcggcgtcgtgatcccggcgaactggcgcgtcttgatgtcgccggagtccgagcgagcgagactccggtagtgcagcgagaatgccgtcgagtccatcgtgacgtcatccgagacgcctgagtccgataaccgatccggtcgaatgaaatgcgccgacaccggacctctaaaatcatcatcgtcatcaactgtgcagtaagtaagtacatcagaagcaacgaaattgaattaataaaaagtaaatcacactaattatcccttagattttgtgaaattacacaaacctcccttgcttctatctgctcttttgaaaaacattacaccggactcccctgtaagtcagatttcagggagaatttgtgtaatttcacgaaacttcaaggatgatttagtgtaatttactcggtaataagcaaaactgagcgaagagaaatgaaaagagatagagctcacangtcagcgtcgt

SEQ ID NO: 98525 - DNA, 272 bp, Glycine max
  Clone ID: PAT_MRT3847_59982C.1
ggctcgaggtaaaacctcagtctctcactcgcagatctttcactcacccaaaaccaagctagtccgaggaagtcctctattcagaaccagatatggagacaaaacccaccgagatcagcagcggcaagatgttcggaggctacaacaagaggttcagacatttcagccctaccctcggctgctccatgaacttccacatctacttccctccatctccttctccctctcacaaattcccagtcttgtactttctctctggcctcacatgcacg

SEQ ID NO: 98526 - DNA, 147 bp, Glycine max
  Clone ID: PAT_MRT3847_59983C.1
ttttgggtttttttttttttttttttttttactcccactgttacaatatacaggttacaaccttcccccccaggtaattagcaaacaggcaggtgtatcacctcatcttctggtcagggagcccatacctttgcccagattatccac

SEQ ID NO: 98527 - DNA, 332 bp, Glycine max
  Clone ID: PAT_MRT3847_59984C.1
ttaatacgtgccgaacacgaagcaggacgccccagcccggtaaacatgcccatgccggtgatgatatggggcaagctcaaccttgctcactctcacaacacctacagctgcacttctttgctgtcctgttcattgcagtactacaaccacaggcaacataggcacggagactctgctggaagaggaggagcaggctggtcgtacactggctctacgatgacagaatgaatatgctgctggaagtatctaccctaccggctaagcaagaatgaacatacccaagcaagaaccgccaactgtggcaaagttccagagaaaaaacatggcaacaa

SEQ ID NO: 98528 - DNA, 303 bp, Glycine max
  Clone ID: PAT_MRT3847_59985C.1
ttactctctttcatcaaacattcaaaccagaaattggctcagtgagtcatatttggaagtggagtgagtaaacaggactatgtgattagtgcatacaatgtagtagtaatgtgcatggtgtaaagaaacagatttgatatgaacttgtggggtttctgtatgcggaaatgttgtgtagtcagacagtaacacagttttgttctgttaaaaaaaaaaaaaaaaaaataaaaaaaaaaaaaaaaaaaaaaaaaaattaaaatttataaaaaaaaaaataataaaaataaaaaaaaaaaaaatatg

SEQ ID NO: 98529 - DNA, 253 bp, Glycine max
  unsure (1)..(253): unsure at all n locations
  Clone ID: PAT_MRT3847_59986C.1
agnncaacnnacaggggctgcctcaacatnnaactggtgtntctantcttgtgccgncaccanccccanntncctgctatgacagcggntctggctgcantatnctagatgangttattagaggtaccattaactcanctgtgactttacatgactatgtgnaatanttnanccatangtacaagatcattttactnanaaggctgtgaagcaattcaagcagtgtnttctagntcagaccgacaagatctgg

SEQ ID NO: 98530 - DNA, 1226 bp, Glycine max
  unsure (1)..(1226): unsure at all n locations
  Clone ID: PAT_MRT3847_59987C.1
tgatggtaaatgatctggntcactgaaaatgttcngtcaganncatcaagctgtgtattcccacgcgtccggttgatagtgctgaaaatgatgagggtgttgttagttgtccagcttcaagtcagatttgttctccatcaaggggtctttcagatttggaagagcctccgttgagttctcattcttatccaatggaaataaaatccaatgaagtagaattgacgcaaattgccatggtcacaaatgctgagaagagtgaaaatcaatcagcaccattgctagatgtagcgtcatctgatgtcgtaaattcttcattgagtaatattacaaagttagaagaatctctttctacctttgcagattcacagaagaaagagatagaagttgatgaggcagttgctagagattctttgacagaattagaggaacagaagatagtggatcagccagaaattgcttctgtggatgtacaattgaacctgaacaaactggttccctttgatcttccagattcagaaatatgtaataatattcaaaagtcatctccaagggagaaattccaacatggtgcttttgttgatgatgcagaaatggtgcctaaatttttggggttagatgcccagcaatcagaatcattatcttatggcctgcatgatccattacaaaatgacagagatggtttttcatcaccttctggtaaccagttggaacctgaaactgatttagatctgttctcaaaatctcaaattggtgaacaggatgcagaattcccactcagagaggagaaaaactttgcctctgaaaaacctcatttcagcagatgcagaaatatcaattggagcaagaaagcactaatgctacttctgactgcgtatcagaaatccatgcagatgagccatcatcattttattccttgccacagtcatctagccaggagaataatgctgcaaaacgtgtcatggatccattgaagcctcttcttcctaacctctttcccaaggcaactgaaaataaacttgatgagatgccacccatgcctcctctaccgcctatgcaatggagaatgggcaaggttcaacatgcttccctagcttcgcaaagagaagagttagaagtaagtcaggtctcagtccagccaaatagacctgataaacaatctctatttggtttgccaacttctgagagagagaccttgtatcaaaatcctttttttgctgtcatggctt

SEQ ID NO: 98531 - DNA, 502 bp, Glycine max
  unsure (1)..(502): unsure at all n locations
  Clone ID: PAT_MRT3847_59988C.1
cgggaggacggctggattgggggggaggatacgttgttatcaagataccctaggctgtatgccatttcttctcagcaaaaccaaaaaatacagcaaataggggctttcggaggtacgggttggtagtgggatttcaggcggaggaggccattgttcgatagtgaaattgatatggcggtctcattcctaagggatgttgaaggtcacaggattcagccccagaaaggaaatgagtgggtttggttggcagaccctattggtcactactcggccaaatctgccaccatgtcattaggggggatatgcctgtatagaaccaggntggagcatttgaggagttgtggaaactaaaaattccgcctaaaattgctatatttgcatggagagtgattatagacaggttgccggcaagagttaatctgggaaggcgacttttttttgtagcggatcctagttgcccattttgcagagaaacagaggagagcgcggatcacttgttttt

SEQ ID NO: 98532 - DNA, 1766 bp, Glycine max
  Clone ID: PAT_MRT3847_59989C.1
ccctcgcgtccgcatagaccccacgcacacactgttctgttcattcgtgtcggctcgcatttcaagctttagcgccaatattcagcttccgttcattccacgcatttctcgttcgtccgattcgtcgttctgcattccatttccttttaaattttacattttcaaattctttttgcagcttaaaatttaaagaatttgaaaagctcactcagttctcgctcgcgattttctcactctctcgtccgacgctcgcaatactcgctacgaccctcgctctactctctctgtctcacgcgcagtggtgcagagcgtctctcatctctgcgatttagatctttgttagacaagcactggatagtgatctgaaatcatcgttgaaatttttctgccttttatttcaagacatgtatggttaatattggacagctgaaatgagatgcaatgcatgctggcgagaagtagaagggcgagccatttccacaacttgtggtcacctattatgcacagatgatgccaataagatactcagcaatgatggagcatgtcctatttgtgatcaagtcctttcaaagagtctcatgaaacccgtggacgtcaatcccaatgatgaatgggtcaatatggccatggcaggggtatctccacagatattgatgaagagtgcatatagaagtgtgatgttctacttggggcaaaaagaactggagatgcagtttaagatgaacaagattgttgctcaatgccggcagaaatgtgagatgatgcaagagaagtttacagaaaaaatagaacaggtacatactgcttaccaaaagatggccaagaagtgccagatgatgcaacaggaaattgagagcttaaccaaggacaatcaagaacttcaggaaaaatttgctgaaaaatccaggcagaagagaaaattggatgaaatgtatgaccagctgaggaatgagtatgactcggtgaagcgatctgccatacagcctgcagacaacttttattccagaaatgagcatgatttgttctcgaacccacctaatataatggatggcagagaaatgggcagaaaaggtgggctggtattcactcctgccactccaggaccaagagaggatgtctggccagcaaggcagaatagcaacaactctggtcactttgatctgtccgtcggctcaccagcgaaacaaacagtcattgcaggggatgctggaaacagaagggctggtgctcatcctgtttttggacctggtgctactaataacccatccatgactttgaggaacttaatactgtctccaataaagcggcctcagctctcacgtaaccgcccccaactattcacgttgtaggcacaaaggaggaggctaaccttctataatatcaggaaaaacgaatctaaagtttgcacaaatcagtttgtagtttgcgtgatgtgctaatgatattttagacttccgtttctatttcttacctcaaactcctatagatgaagagctgctaacatgaacaatttatatatcattttagttccctagcttcaatctgtagatagataattcccagcgtattatatggtgattggagaaaactcaagtgaagccacagccccatttggtttcttgtagcaaagaatgaaagcatgttctttagcatttttaacatgaacattttgaacttttaaaaatgctatttgttcacattgttggaagacttgtatgtcacatgataacatgtatattgtcgatcaatatcctcgttcagcaggc

SEQ ID NO: 98533 - DNA, 899 bp, Glycine max
  Clone ID: PAT_MRT3847_5998C.1
ttttctccttttgattgaccgggtaaacgcatgacgacgtcagattcagctgtgcatacgcagcccttagagataataaagaagaaattaggaagaaaaataataaaaaaaagcgaactcctcctttgtggtgtcgagctgagaataccagttgctccagtagccggcactaaacaacatggcggacaaggcagtcaccatccgaaccaggaagtttatgacaaacaggcttctctccagaaagcagttcgtcgttgatgtccttcatccagggagggctaatgtttccaaggctgaactgaaggagaagctgggaagaatgtatgacgtgaaagacaccaacactgtatttgtcttcaagttccgaactcattttggtggtggcaagtccactgggtttggtttgatctatgattcagttgagaatgctaagaagtatgagcctaaatacaggcttatcaggaatggacttgataccaaagtagagaaatcaaggaagcaaatgaaggagagaaagaatagagctaagaagattcgtggagttaagaagaccaaggcatctgatgctgcaaaggcgggaaaaaagaaatgagttttcaaacatcctgtcctgattttaaggttcttttgctatcggtattttctaatagcttcctagaatgagatattttgctgtaagtgttacgttaattgatgttcagttataactagagattgggtactggcatgatcaattttgacaattcagttgaacactttgttttcaaatatttagtattttgataatgaattctggtgtttcttgatttgggatgaaccagccgattattgtcacaaaatcattttaagtgccttgttatgactgataatagtctaatattttaaatgcaacttgtttt

SEQ ID NO: 98534 - DNA, 297 bp, Glycine max
  unsure (1)..(297): unsure at all n locations
  Clone ID: PAT_MRT3847_59990C.1
agaagagaaaaattnagtggaggggaagganaggatgtgtcgctgngagcgaacaagttccccggaganacagccgattnggacggaggcgcagagccaagncgacggcaaggantancaggancnggcgccccngctactggttgacccgacggantttacgtnatggtccttttacagagcagggatancagagtttgtggccacttttctntttctatacatcactgtcttaaccgtcatgggagtcgcnggggctaagtctaantgcagtaagttgggattcaaggaatcgct

SEQ ID NO: 98535 - DNA, 601 bp, Glycine max
  Clone ID: PAT_MRT3847_59991C.1
attaacttattactatattatttatttattaacaattacggctgttacacatgggcttgtgcaactacccatagggcttcttgaagttgtttccttttcgtgactttttgagaagatagttctctatggcttgtgttttcctctagtttgtttaattcagcctctatcttcttgacccttttgagagtatctccaaactgttcctgattccaaatcttcagcctttgttttagtctcttgattttttccttgaggacaaacccaccccagcctaattgttggtgagaagtccagcattggtgtacaacttccttgaaggatttatctgataaccagcaatcgagtatcctaaaaggcttaggaccccaatctgctagcttggatcgaagaaggattggacagtggtctgaaaagttccttgccagagtagattgatagctgccaggccatctgtccagccattcgtgtgataccaggaacctgtctatcctgctcctagatgtctcatttggtctaaaccaagtgtattttctcctgatccatggtgcctcaataagctccagctcatgtatccagtcattgaattttgtgatgctgttgt

SEQ ID NO: 98536 - DNA, 355 bp, Glycine max
  Clone ID: PAT_MRT3847_59992C.1
ggggggaaaagcaaaaagcccccgccggggggattaataaaaaaaaatcctttttttttttgggtatcggagggtgtgcccccaaattttttttcagaacttggttttgctttaagatattcccatcccaccttcccctttcttggggttttccaagccccggccaaaaggattggaaaccccaaagggggggtcccttaatgaacccgaaaaaccctaataaaaagggtttttttttttttttttaaaaagggccttttatacagggggggggtttaacccaccaggctccccccttttttccccaataccaaggggatgggttttctgcaaaaattgttttttttggggcccc

SEQ ID NO: 98537 - DNA, 498 bp, Glycine max
  Clone ID: PAT_MRT3847_59993C.1
cttttttttttttttttttttttttttttttttttttttttttttttttttttttttttttttttttttttttttttttttggggagggaaaggggataagggaaaaaaggatccggaaaaaaaaacgggcaacaagggggacaaacaaaacacaaatccccccccccgccccacattaaaaaacaaattggctaaagccacccctgggcaattgggcatgggaaaaacaaggcaaaaaaacccccggcccccccccccccgttatggaactaacgggaaaacaaaaccaaaaatcaaaggggcaaggaaggcttgcttaaaaaccccaaccccaggccccccattggaaggggtttaagggggagggggccccattggcccccccctccctattaacaacccggggaacatcttccacgggggtaaaccccgttacattaacaacagggggacctcccttgattttagggggcagggccccccctgtttggtcaggc

SEQ ID NO: 98538 - DNA, 382 bp, Glycine max
  Clone ID: PAT_MRT3847_59994C.1
tagaggaaatagtattttgcgaactgagacgagatgggtggagtggcatggacagaagaagaagatcacttgctcaagaaatgcatacaacaatatggagaaggaaagtggcatcgtgttcctatactggctggtacaactgaattcaattaacctctctctccttttatcattcttgagttttcaagatatattctgcaaaggagtgctctataagttaaaaggggatcatttattaatggtgcaatggcttgtttaagattagcaattggttatgactcatagatttatgtatcaaacgggagtaacacgctgttttggtaaaaagaagacagaactgattaaccagatggatggcgtagggacttttaaacaacacatt

SEQ ID NO: 98539 - DNA, 392 bp, Glycine max
  Clone ID: PAT_MRT3847_59995C.1
cctatgcgtccggaaacagtgtgatgaaaatgaaggtccttgttttgttcgatgctacacttttggtagcatggcaatgccatgcgtacgatatgttccctttgcgaatgaacactggctatggtgcccgtacttctgaggggagacgcacaacttggaggctagctgtggaagcacacaacatctatggatttgagaccattcctgaatgagtgcgttgtaccaacaaaggaatacattcatggtgaacaatatagatcagactgcaaaacagataaccaacatgcttacttttatgccatagaccttgaagtgcattccaaggacacattcgtgttcagtatacatggcaccgtactctctaatatgccatacttgcaaaaacatggata

SEQ ID NO: 98540 - DNA, 194 bp, Glycine max
  Clone ID: PAT_MRT3847_59996C.1
ccaccaggttttgtgtaattacacaaacaccccttacttttttatccattatagtcgcctcgcttgtaaggggtgttagtgtagcatatgagggggtgtcaatgtaatgttttcaaacatataagggggtgccatactatcagtgtaatgttttcaaacataaagggggttagtgtaggaatagaaaaaaagtg

SEQ ID NO: 98541 - DNA, 619 bp, Glycine max
  Clone ID: PAT_MRT3847_59997C.1
cacgcgtccggcagaaatgaaaaaacttgtccgtgcttcccattgaaatcatgaatatgcgagtaaggaacctcaaaatcaaatgtcttacatgcaactgtctcagaagttttacgatgctttcaagctgtgtgggtccccacccattgctcgcaaacttcatgcccaactcatactctccggtttggacgcttcccttttcttactcaacaatctattgcacatgtactccaactgcggcatggtagacgatgcttttcgtgttttccgcgaggccaaccatgccaatatcttcacttggaacaccatgctccatgccttttttgattcgggtcgaatgagggaagcagagaacttgtttgatgaaatgccccatatagtgagagactccgtttcatggaccaccatgatatccggctattgtcaaaacggcctccctgctcatagcatcaaaacttttatgtcaatgctccgggactccaatcatgacattcaaaactgtgaccccttttcctatacttgtactatgaaggcttgtggctgccttgcctccactcggtttgctcttcagttgcatgcccatgtcatcaagttacattttgggagccccaaacctgca

SEQ ID NO: 98542 - DNA, 360 bp, Glycine max
  Clone ID: PAT_MRT3847_59998C.1
tccactcgtccgatcagagcctacagacacgttaaccctttcaatcccttgcacaaagggacggtaactgggcccttgcatacgggtacttcagtggaaaactttcagagaggaacttcaatcataaaatctcacggagggaatatcctaacaagtgtatctggattatagccaacatgaaaattcttacaaccaacaattgtcgatatttctgccgatgctcctgtagataaccaataattgtttactccagttctgaatgttatgaaattacagactctatactaagcatatgcctttaacaattctgtacctcatggattacataagtcacatctttacccaaatacctggaactat

SEQ ID NO: 98543 - DNA, 437 bp, Glycine max
  Clone ID: PAT_MRT3847_59999C.1
tacggctgcgagaagacgacagaaggggacaacaaatcacaatgcagcaagctccaaccacactcaccggattgctccatcgcgtcgccggaatattcccctcccgccgcgccgtctccgtctccggcaagttcgacctcacgcactcccgtctccaccacctcgtcgaactcgccgcctcgcgcctcctctccgccggcatcaaacccggcgatgtcgtcgccctcaccttccccaacaccgtcgagtttataataacgttcttggccgttattcgagcgcgagccacggcggcgccattgaacgcggcttacaccgccgaggagttcgagttttatctatctgactcagattcaaagctgttactaacctcaaaagaaggaaacgagccggctcaagccgcgggcttcaagcttaacattccgcacgcaacggca

SEQ ID NO: 98544 - DNA, 127 bp, Glycine max
  Clone ID: PAT_MRT3847_5999C.1
acgaatcatgcgaaatatccttacgaacccaagctctcgtggagtagggcataggatatcaacaaactgactaatcgcactaacaaaggcttcacgtatggggcaacatcatggatagctcaagcct

SEQ ID NO: 98545 - DNA, 361 bp, Glycine max
  unsure (1)..(361): unsure at all n locations
  Clone ID: PAT_MRT3847_599C.1
acatctgaagacatatctgtctctcctgctcaatggtcgctataccatatcttcacgcaagcttgcatataatcccaagttatctgacttttttgagattttggctacatctgacgatggagatggaaagactatccttttcacactacgaggtatgaaatatgccgtgactgtcaacctattgcaactaaagaagaatgcttatgaatgtgctacatctttgaaagctcctcacacacacgatgcaattaaggttactcaatccacagcggactccctcataactgaagctacgatatgcacagacacacctgatgctgactaagtgcgagatnatctcatctacaattacaaacctact

SEQ ID NO: 98546 - DNA, 117 bp, Glycine max
  Clone ID: PAT_MRT3847_59C.1
ggccccctcaaaatcagtcaagatgggaatcgacctggaccgccaccatgttcgagacgggcaccgcaaggtccctaagtccaccaacccctacggtaggctgttggtgcccctgta

SEQ ID NO: 98547 - DNA, 889 bp, Glycine max
  Clone ID: PAT_MRT3847_5C.1
gtcgcatgcacgcgtacgtaagctcggaattcggctcgagatttcaaatatcctcaacaaggaagaaggcctgatccagcgcttgaaaaatgggcttcaggactgttccacacacacccagcccttctggaacgcgctgacccacagaaccagaacgccatctgtccaagtagcccaaaccgctccttttaacacaagggagcctgtgatgctggcctgctacgtctggggcttctatccggcggatgtgaccgtcgtgtggatgaagaacgggcagcttgttacttcccacagcaacaaggagaagacggctcagcctaacggggactggacataccagaccgtctcctacctagccttaaccccttcctactgggacatctacacctgcgtggtacagcacagcgggacccctgagcccatccgcgcgaactggacacccgggctgtcccccatccagacagtgaaggtctctgtgtctgcagccaccctgggcctgggcttcatcatcttctgtcttggcttcttcagatggcgcaagtctcactcctccagctacactcctctccctggatccacctacccagaaggacggccctagagggcagagccccgcgctgagaaggagatccagacttttgatggtgccttcatgccccccagcatcttcaggacaccccactttcttgtgtcataattcctctactcagttccactttcccatgtaaatattggtggcctggggggtattcgtaatcaaatctgcctcgggtgttttttgaggtgagctgctctgaggagggggttcagtgccctcctgaaagcccccccttgtcacagaaggcactgtgtcccgatcccccctaagaaataaactggtgtggaattt

SEQ ID NO: 98548 - DNA, 733 bp, Glycine max
  Clone ID: PAT_MRT3847_60000C.1
tccggattcccgggtcgacccacgcgtccgcggactctgtctcacaagggtcgttttccctttctagtttacatcttccactcctttgaaaacttctacttttacgcttttaaaaccatccctttacacctcttttcttcgtccattttcgtttccataaagggtttcattcgttaatgcgaatcattctctccttcttcttcttcaaatctccactgattttcctttcaatcttcacatactcgctttaggctatagtggggttggtgcagaaattcgaatttgatttcgggcttcacctgcttcttgtttcttatatgcaaaggcagtgacaagtgcatgatgggaaacaattgtgtcggatcaaaaacctcaaatgatgcactatttccctatgttcttccgggttcattctggtggcttcatcaaactagtgtcacagaaatttctgatgcaccttcactcgtgactaaaattcaagacacaaattttctagagaatgttcaagaaaacccaccacaagtagtgaaaattaaccacgaggagatgaagctgaaaccaacagttccaaaacatgacaaagagactaatatgccttcagaggaacaaacaaggcacatgcagaaaatgcctcacaaagttaagaggctaccaatagggcttcaagcagagtcaattttgaagagaaaaatggtaactttaaggagtactataacttgggacaagagcttgg

SEQ ID NO: 98549 - DNA, 411 bp, Glycine max
  Clone ID: PAT_MRT3847_60001C.1
ggctcgagcgcgttagcagatactgattttccttatcttcacaagccgacttgattatctctcatttgttccccactatagcatgtctctaaagctagccatcaaactacacctggattcttacactccttatttgtacctccttaccgtcaacaaccacgaacatgcagacatgttaacaacttacgaaacttgagccaacaccaaggattgtcccaaacccatttatagaaccaaccctctgatcattcgcacgtgtaaagtgaggccaagagtgcaatactgtggcaccatgatcaacagatctttgattgaacctgatgggggggcattgatggatcttgtcgtgcctgatggtgagaggggtgctaagagcacctagactgactcactgtcttaggtgcaatttac

SEQ ID NO: 98550 - DNA, 555 bp, Glycine max
  unsure (1)..(555): unsure at all n locations
  Clone ID: PAT_MRT3847_60002C.1
aacaacgggagcccgtggcaaaacaaaacctggggctggaatggtatcttatggcaacttcagaaatgtttgttcaagatgttccagaaggtcaggcctctaatggttccttggtggaactcttccccaaaatactccatttatgcaactgcaccaaggagcccaaaagggaaagccttcttatatttcttaaactttggaaaaagtttgaaccttaaaagaaagttcaaaaggaaggatcttggactggttcaaccacctattcaaattgatgaatggaaataaccactgaaaaaatcaagatgaatcaaagcccaaaaagtcatgtnaccatggttttaagcaaaaagtgaaaacttttaactattatctgaactaaagggtgaaggccctaaaaacatgtggaaaaagggtttgtaccatataaaaggtgcatggcagaaaaggaaaaaccagtgctcatcagtatattatgaagaaagggaaaagacaacgtattaagctttccttaatagtaccctcttattggcttttcttcaaagcagtttccctttt

SEQ ID NO: 98551 - DNA, 273 bp, Glycine max
  unsure (1)..(273): unsure at all n locations
  Clone ID: PAT_MRT3847_60003C.1
caaacatggctcttctctctttcaattccttcacactctcccctctccattcaccattactccccncttcttccantnntgctcttcccaccacctctgcttcaagagnaaacgtgattctgcccccgaancccttgaatgngnncgaatctcgacanccanaaggangactnagtcggtgattgtctccgccgcngcggaggangcgagttcggctgtggagggtnggtcgccgccgcctcctccggcgganancgagaaaganancggcgc

SEQ ID NO: 98552 - DNA, 166 bp, Glycine max
  unsure (1)..(166): unsure at all n locations
  Clone ID: PAT_MRT3847_60004C.1
catcccaatacttggctggggacgcctnaaaacgtttccagaactgggggcttatacatgaccgggagctcttgtgcactcatagacgaagtgcggctgagacttatatctacagacgcaaatcacttggctaaagactggtggaacgtttcagcaggaccacgaa

SEQ ID NO: 98553 - DNA, 372 bp, Glycine max
  Clone ID: PAT_MRT3847_60005C.1
aacggggacaaatttatttataaaaaaccattcgacgctaaaaaggaaaaaccaaaacaagaaaaggcccaaacaccctaaaaaggggtaccccaaaaaagggaaaaaacccccaaaaaaaaaaaccaccgtctggaaaaccggccctaattacccaaggacacaacacggaccctaaaaaaaaccccccgttcaaaacaacctcattccaacacccaaaaatcgaactcaggaaaacccactacccaactatggaaaaatctcggcaaaccaaaacaccacccatcaaaagccctccagggcccctgtctttgcaaccggaaccctcaacatacaaaaaccccgtcggataaaacaaactggttgcaccat

SEQ ID NO: 98554 - DNA, 274 bp, Glycine max
  Clone ID: PAT_MRT3847_60006C.1
tctcgagccgattcggctcgagttcagagtatttaattattggcataagaactggatgctactttttactttgattaacagcaatctgtccaaatatctgtcactgattatgtccggttgacaagcactaatggtatattttctgttaatcaaagtaaaaattagcatccagttcttatgccaataaagagaattcagagtatttaattatttttatttgatgaagctcttcggtaaggatgccaaaagtattactgatttttttatttttatt

SEQ ID NO: 98555 - DNA, 1093 bp, Glycine max
  unsure (1)..(1093): unsure at all n locations
  Clone ID: PAT_MRT3847_60007C.1
cgaacatcgacggcccaggttggccagagttgatatcgtaattgggcagtgactgttgttcagtaattttagcgaaatggatcaagagttgtcttccatatttcagctggaaacaaggagattgttatggcttatcggcattacggttgctatggttttagcattccaatatttggaacttccttatggtggcattcaacgcattgtattctctgccaacaagataccaacatctgatagcattagatttcaagctgcagatctaccatctgagtctgaaaggtttaacaatatgacatttttgaatcaagctaattctactggtgaaagtgccactgttaatgaaactaggacttctgaggaaaaagacaatgtttcaggaactggtttaatctcagaactaggaagggaatcaagcagatctttaggatttaatgaaactgaggaaagttccactgtgcaaagtactaggatatcaaatgaatcaacgcatgcaggaaatctaggactgagcagttacaacgataccatttctcattccccttctcgtgcaataataccaactaatttagctccacctctaagtccaacaaaagtgagtccaaatattactcctccaatgtcatcaaatgatcatgaggaaactgattttgcagaggatgagaagttaagaccagtacaagatgatgtcaatatactacgacataattcgcctatcaacagtgtagcacctaagaagactaaaggttctcaaaaaccacttccagaagtaacaacaatctctgaaatgaatgagttactgcttcagaaccgtgcctcatttcattctgagaggccaaggtggtcttcgattgttgatcaagagctactgcaggccagatcagagatcgaaaatgcacaaattgtaaatgatgatgtaaatctttatgctcccctatttcgaaacgtttccaggttcaagaggagctatgaattaatggaaagaactcttaaagtgtatgtgtatagagaaaggagataggccataatgcattcaccgatactttccggactttatgcttnccgagggtggttcatgaagcacatgggagct

SEQ ID NO: 98556 - DNA, 309 bp, Glycine max
  Clone ID: PAT_MRT3847_60008C.1
ccacgcgtccgatgaaagtttgtagttggttttggttttggagttgggtttagaatcttcaatcttgtttgggagagagatgtacatagcttccatgggaaggtctttcaaggactccttgaaactgcttgaagctgatattcaccatgccaataccctgttagtttctctcttctttctttctttctttcatcactcctttcatttcagtttttttttccatacccgttgtagaaaaatcagttcttttgatcaagtttgtatttttgtttttaagtgttagactcagacaccctttgtttatttctt

SEQ ID NO: 98557 - DNA, 241 bp, Glycine max
  Clone ID: PAT_MRT3847_60009C.1
ttcgaacacatgcccagtcgtccatacagtgagactagtttgaacatgatgttggtgatcctatacactgagactcatgctcgaaatgctctcgattgtcactgctatccatcgaataccccactaggaggcactatggcattggatgatgccaaatatgtgaagcggaagctatggacccggttacccatgtacactggggcgccacatttatctgagcatgtcgtttccggccattaca

SEQ ID NO: 98558 - DNA, 947 bp, Glycine max
  Clone ID: PAT_MRT3847_6000C.1
gggcgggcgtgggaggcactcggtcctccggattttaagggccgccgggggcgcaccggacaccacgcgacgtgcggtgctcttccagccgctggaccctacctccggctgagccgtttccagggtggtgtagactgtcgagcagtgaataccagttgctcctatagccggcgctcaacaacatggcggacaaggcagtcaccatccgaaccagaaagttcatgacaaacaggcttctctccagaaagcaattcatcgttgatgtccttcatccagggagggctaatgtttccaaggctgaactgaaggagaaattgggcagaatgtatgacgtgaaagacactaacactgtatttgtcttcaagtttcgaactcattttggtggtggcaagtccactgggtttggtttgatctatgattcagttgagaatgccaagaagtacgagcctaagtacaggcttatcaggaatggacttgatactaaagtagagaaatcaaggaagcaaatgaaggagagaaagaatagagctaagaagattcgtggagttaagaagacaaaggcttccgatgctgccaaggctggaaaaaagaaatgagttttcaaacatcctgtcttgattttaaggttcttttgctattggtattttctaatggttattttactttctattagcttcctagaatgagatattttgctgtaagtgttacattaattgatgttcagtagttatataacttgagatctagtactggcacgatcaattttgagaattcagttgaatgctttgttttcaaatatttactattgtgataatgaattccagtgttgcttgatttggtatgaaaaaaaaaaaaaaaaaaaaaaaaaaaaaaaaaaaaaaaaaaaaaaaaaaaaaaaaaaaaaaaaaaaaaaaaaaaaaaaaaaaaaaaaaaaaaaaaaaaaaaaa

SEQ ID NO: 98559 - DNA, 202 bp, Glycine max
  Clone ID: PAT_MRT3847_60010C.1
gttcttcctgttttcgggttcttattttaatgaattaaaggagcacattttgcggatgggttaaaacattaagactattgcgtctgaagttttaataccctttgcttttatgtcaagctttgacaaagcttaccgaacttcatcaaaatcattttgtgtccccgctatggttgagggattgaagatactctttaatgttaaa

SEQ ID NO: 98560 - DNA, 281 bp, Glycine max
  unsure (1)..(281): unsure at all n locations
  Clone ID: PAT_MRT3847_60011C.1
ggctggctttgttaaaaaagatggatcatcttctgtttcagctgcaaatgttaagcagcagtacaagtgagacaaaaagagaatgcgagggagtccagtcaattgctgcatgggagaggaatcatatgcataanaggtctgatgttccttttagtaatgccgaaaaacctatgaagaaaatgaggacagatgatatgtacaatacaaatcatatgaccatgagagatggatcaagcagtttgggccatttttatggatcaggaaaagctaatgtgggagcc

SEQ ID NO: 98561 - DNA, 104 bp, Glycine max
  Clone ID: PAT_MRT3847_60012C.1
cacaaatattaacttgttttcttctgggaatcagttgcttgcagaaagacattggcagtagcaggccacgtatcagagggcgatttgcaaggaatggcgaaatt

SEQ ID NO: 98562 - DNA, 429 bp, Glycine max
  Clone ID: PAT_MRT3847_60013C.1
gtttcgcggccggtttgttgaggacacatggttagcggtaacatatttcattgtagaaaatatttcatgcctcgtcatgagtttatcagaccatacactttgcacctagtggaatattaatggtatgctacgcctgaacatgtttggagaagaagatagtacagccatgccaaattactgaaagaacttagagctatcctcatggtagctataaaactggtgcgatctggatatctcaaattgaactatgttagggaagaggcttttcatgggacgaaaggacctcttgatgctttcacttgagaaagtagcactctatttgcatcccagggagacctactctgagggatggtgaggggcatcatctcatgaggatttagaggagactcatctacaatggcaaggaaatttctagcttctgggaagctg

SEQ ID NO: 98563 - DNA, 275 bp, Glycine max
  Clone ID: PAT_MRT3847_60014C.1
ccctcggaggcgttcagctgcttcaagatgaagctgaacatctccttcccagccactggctgccagaaactcattgaagtggacgatgaacgcaaacttcgtactttctctgagaagcgtatggccacagaagttgctgctgacgctctgggtgaagaatggacgggttatgtggtccgactcagtggtgcgaacgacaaacaaggtctcccgatgaagcagggtgtcttgacccatggacgtgtccgcctgctactgagtaaggggcattcctg

SEQ ID NO: 98564 - DNA, 262 bp, Glycine max
  Clone ID: PAT_MRT3847_60015C.1
gacaaaacttaaatcttaagtaacattgttcatatgagcaataaattcggcgtaagctcaaaagtaaggcacatagtccaaacactttaaagcttggctttaaactcggagagaggagtcatctgtcccttcaagcctttttttttgtggatgcgggagacaagccgggcagcttgggatccagcctccagtgggtcataagacatcatctcccagtgatcaaagacacattggtaggaaagccggccctgatgttgcaccc

SEQ ID NO: 98565 - DNA, 292 bp, Glycine max
  Clone ID: PAT_MRT3847_60016C.1
aattcccaatgctactacctcactactcttcggtcacccttttttttttttttttctaatcaacatcctgaagaatcaatacaatgcgtccactaattctttcacatttttttacaaacctaattatcaaacattctaaaaaattatcatgattcatccattggtaatccattctcacaacccacttctgattatcaccaacatctaaacaatttattaatctaattaaataaacaaattcttccatcgtatatactttcctatcaacaaaaattaaacccccgttactatt

SEQ ID NO: 98566 - DNA, 208 bp, Glycine max
  unsure (1)..(208): unsure at all n locations
  Clone ID: PAT_MRT3847_60018C.1
atcattccctttaccaacccactcattttacataagtgaaggataggcggctgattttannnaattgagaataataaaatgcagatcttctgcaggaaaaattgagcaagagncagttttgtgaatattganntcagaatcctatccttgcttgaatttgaaagccataaaaaaataagagacaatgaatnngacttcagatttacca

SEQ ID NO: 98567 - DNA, 511 bp, Glycine max
  Clone ID: PAT_MRT3847_60019C.1
gggaaagtcttacccaactgtgagtgctgattaccagaaggccgttgagaaggcaaagaagaaactcataagcttcatcactgagaagagatgctctcctttaatgctccgtttggcatggctctctgcttgaaccttggacaagggcacgaaaaccggtggacccttcggaaccatcaagcaccctgccaaactggctcacatcactaacaacaggctttacatcgctgttaggcttttgcatccactcaaagctgaattgcgtattttgagctacgccaatttctaccaatttactggccttgggggcgttgatgtcacaggtggacctgaagttgcgttccacccttgaataagagacaatcctaaggccgcaccaggatatcagtgggccaataccactaaaggggtttaccatgtaagaaatatatgtgcggatgtattaaggcttactgacgaagatgtgttacctggatctagagattacacgtgtggaagctacggacataag

SEQ ID NO: 98568 - DNA, 678 bp, Glycine max
  Clone ID: PAT_MRT3847_6001C.1
caaacccaacgcactcagagaaagaagatacgtaaaatgcatcaacggagttggaactagggtttaccttttcacaaaccccgcattcaacaacgcaccgaaccggtctttgtttccgaagctgaaccggactctctctgttagcttctccgaccggctccgagatgattatgtgcgcgtcgatgctccgaggagcaaggaagttgttccggcgacacgcggcggcgatggaggggaggcgattcttgcgtcgtctccgagtgctgacaactcgggaaccctgcaactgaaaccattgatgttcaggaacaggtttctgaactttgcgcgattgggttctgtgattaacggcgccgcggaatcgtttttcaagagcgagattcggaggaggctgttcgtaacggctgtgttaattgtgattagtcgcgttggctattttattcctcttccggggtttgacagaaggttgataccggaagactacttgagctttgtcgcaggatcatctgttgttattcatgtagcttctggcagatgaacttggtgacttcactgctgagctcaagctatctattttccagcttgggatcagtcctcagataatcaatcgcgtccattattgagcagaccccttagaagaaattgcaaagtttgtgacttgtgagttatcctttatgt

SEQ ID NO: 98569 - DNA, 427 bp, Glycine max
  Clone ID: PAT_MRT3847_60020C.1
cggtcgcgtggggaattacaccgttcacgcatttatgtattcctactacgctttgcgtgccatgaaattgcgactgcccaaatggttcgctatgatgatcaccgtcatgcaaattgcccaaatggtggtcggcgtctccctcgccttcatcaccctttatctcaaattgggcggcatggaaagctgtcagtgcacttggaccaatttgtacgcttcttttattctctacgggtcgtactttttgctgttctgcaacttcttctaccaaacgtaccttcgacggggaaatcgctacgcaaacaaatcgaaggcgaaaggcggaaaggcagcggctgaaagtgtcgtccacgcgaatggcacggccaactgcttaattaacgacgaaagtgccaaaaccaacggaagtgtttgtcaccaccaacagcag

SEQ ID NO: 98570 - DNA, 332 bp, Glycine max
  unsure (1)..(332): unsure at all n locations
  Clone ID: PAT_MRT3847_60021C.1
ggaaaaacaccaaggttatcaatagtggatgacagcttatggctgtaagccaaaaatctgccatatacatatggtggacctatggcagaagcaatggtggacaaaaaaaaaatatagacaaaaactaaaaaaaagcataaataaatttaaaaaaaaaacagaagaatcatatactaaatttcaagaaaatatcataacattcatcaaagacataatggtgattaaaaaggatagttataaactaacaattaaataacagaattagaaaacaattaaatatatcagaatttaaaaaaggatacaaataataatagttttntnaaaaaaaaaaa

SEQ ID NO: 98571 - DNA, 207 bp, Glycine max
  Clone ID: PAT_MRT3847_60022C.1
cttgtcttaatctactttaatcaaaacttttcctttagattttctgtcactatttggatgccaaaaaattcaactagttctccatttcatctattctgacagctacttaaaaccagaattgtaaatatatttttatgaattttgatacaagtgttggtagtatttctaatgctaatatttccaaaggaacaagtctaacattgccta

SEQ ID NO: 98572 - DNA, 611 bp, Glycine max
  unsure (1)..(611): unsure at all n locations
  Clone ID: PAT_MRT3847_60023C.1
tcttctttagnacaatctcttaaccctatctcaaattcattcagattctcccttcccctttttgatttttcttagaaaactcccaacttcgaatcaatatgaaggtaagactttgtaccctctttcaagttttgtctccttaagaaccatataaatctatttataaatttttttgagatttgctctgcttccattttttttttatactcctttttctagttaagtacaatttgatgaaatttgagatcaagttttagtgttcaaattacaaccttgcttgctttcaacctttttattctttttccttttaccgttcaaggaatcaagttttggaacgttcatgcttagaaatgattattactatngatcctaaaagttcaataatatttgtccgacagaaagtggtgctaaaggtggaactccatgatgacaaaatcaagaaaaaggccatgaaggcagtatctggtatttcaggtatggaatctcagcatccaataatctttgtcaattgtcatgttaattatatacatctttttttatgcttagctaattattcaaggttaaaaaaccaaatggtacacaaaattgaatgtttttggggtgattttttc

SEQ ID NO: 98573 - DNA, 511 bp, Glycine max
  Clone ID: PAT_MRT3847_60024C.1
cccacgcgtccgcccacgcgtccggttatgttagtgaagcattaggtatattgctccactatttaatcttgagctgcatcttttttaatttgtatggcttttttcgttttctctatttgatttgtttatatatgttcggcttaatggattgtgtcttggatagaattttatatggttgtggttcatctgtcatactctctgttgttataggcggtctggttgatattttttttatatgttgtttggttgtgggagttgcgatgaatatgatagatttatgagaataggaattaaaattaagtgtcagggaaaacagggttgggtttggctttattaacgtatgttgagtgggggatttttttttgggtatggaaatttgaagggcaatgttgggaagcgggggggtttcagacgggtacgaggttggctcatagagacaaagaatgatggaatccaatccatacttcgcagtgagcagcggaacaggcaacttaccttatggatatgctgg

SEQ ID NO: 98574 - DNA, 432 bp, Glycine max
  Clone ID: PAT_MRT3847_60025C.1
ggggaggtacttttttgtgggatttggatcggttgctatatcttgaaactacgaattcctttaagctgttgactgctaagcctgatgtatacttggttaatatgacagaaaaagattaccaaagataaaataacatgtttctgcccaaaattcatgcatggtgttaattgatgggatggtagaatgtctctatgtctggtctacgactatggctttgatgtacataggatatgcccattttcactctctaacattccattcctggtcttgactcatattcactataggtgtccaatagcacggtggtgagacttattttttctttcacctggtgccttggaaaggaattttgcacatttgtcaccagattaagcttgttagtatttggaggagaacaaaacacaaattgtttttaccaaaataattaagact

SEQ ID NO: 98575 - DNA, 151 bp, Glycine max
  Clone ID: PAT_MRT3847_60026C.1
atgtggacaggatgtttggttgagggagacctgactgttgctttggctctgtgtgggggcggggatgggaagacttggcttaagggctggcgtggcgtgggaggcggttgtggtgatgtaatagtcggtgggcttttctggcgtctggggg

SEQ ID NO: 98576 - DNA, 453 bp, Glycine max
  Clone ID: PAT_MRT3847_60027C.1
gtaatttggagagggaaaaacgcaacctagcggcagcggaagggtggcgcgtgagagagatggaggaaggtaaagaatggagcgtgaaagagaagaacgaaactacgacgcgaccatccctaaaatcggatgttccattcaacaaatatgaactatggaaacacaagttgagggacaattgctacaaaagggtgcgagaggacagaactcgcttactctggaaatttagatacaaccaacaggaggaggaggacatcgtcaagtgtgcattccaggatattgtatctgatgaattgaacaaaatcaaacgcacggatgagctgttatgggagtatgaaggtcctcaccagggtgaatgccaagacattttgttagaaatgcaaaggatcttttatcaagatctcaattcccaatcaaccatacaagatttagaatgtgatattgaaacttggg

SEQ ID NO: 98577 - DNA, 904 bp, Glycine max
  unsure (1)..(904): unsure at all n locations
  Clone ID: PAT_MRT3847_60028C.1
cgcgtccgtcagtttgcccttccctaagttagatgttttctttatctgaccttttaagaaccgatttgtctgtgtgagatatagccttgagccgtggggaccttcgattctcgaagaaggaaaaggtgagaagcttgagtgcggtcggaacgccgtcgtcgaccttccaaatggcttgtattaatgtctctgaacagcaaacacatgaaccttcttcgaccgtcatcgccaccaccaacagattcaagcttcataagaatttttttaataactgcaacggtgcctctgttccacggaagctacgttcagtgacgaaaaaacggggtcgcgaatccatgttacttgattcagaaaagttgaagcatacgatgcatggaatagaatctctcaaaaaggaaagtctaaagaagtccaaaaaacaaggaatgtggcgtgactgttcccctagagaaggagcttctgggcccatcacaaaagatgagcaagaggttgcggagactctctatgccttggctggaatgttccctcacaatgcctccaatcataatagtacggatttagatggcaaatttttgccagataattcatcagttttgcaagacttggaggataatgcgagtgctgctgctcttcaagattctattctagcctcagcaactgctcctgttgcaagtcctagttatcatgaaagttcagctggagaagcttcaaaaatcagttggttgaatgaagctgttggtcaaaaacaacctgattttcctgagagtgcaacgctcttgatgccatctcatagcacttctataacaataaatcttcagaccatgcctgtggcggctaagcgtgaaaatagcaacaaagctgcattgcatgactctgnagtatgtctagcaatgggatttaatat

SEQ ID NO: 98578 - DNA, 437 bp, Glycine max
  Clone ID: PAT_MRT3847_60029C.1
acaatccttcaaatggaaaatttatttgaacagaaggggcctttatcatcaagggctatatacataatctacattcccatatttttatatcactacaaatattgccaataataaaaggggtccaatttccggcattgatggcaatcttttgtagggagggattaaatgctaaccactcttttgactccaaaattttttggcttcgtttttctcatacctttaaaaaaacacgctccccgcattaaaataccccgaaaaattaaacggggttaaaaaagaaaaagcgaattttaaaatgaaatggcccaaccagcaaaaaaacagggctaacttcacaaattacaacttttcttcctgaaatgtctgaaaataaaactgtctgcatataatggatagttctttctgaccaagccctttatgcatttccaatatgaaaa

SEQ ID NO: 98579 - DNA, 264 bp, Glycine max
  Clone ID: PAT_MRT3847_6002C.1
gttaccactttctttcctgcgcatggtgtgaccgttcttatgtcatgcccttttgggctgcagcatatccctgacgcgtttcacctctgtcggcaccgcttcactaagctctataagagcgcagagtccgcgtgttcatggcttcatcagaaaagatcatcatggtagcacctctctgtagaatatccgaacaacagtaccgagatcctattctgtattggacgataatataactgttgctacttttgctagctttgcaaaagg

SEQ ID NO: 98580 - DNA, 256 bp, Glycine max
  Clone ID: PAT_MRT3847_60030C.1
ggtttcaaggctagtggaggagcgtaggaggctgaggagaaaagacaggctaggctagaaaaagaacttttggaggaggaagagagaaaacagaggaagaggtttgaggccatagaaatgcagaagttgaggaagacggctacgaggcggtgtcgcaactgtttgaacccgtatagggatcagaaccctggtgggggtaggtttatgtgttcgtactgtggccatgtttcaaagaggcccgttttagacttgcctg

SEQ ID NO: 98581 - DNA, 191 bp, Glycine max
  Clone ID: PAT_MRT3847_60031C.1
ggaacaatgtttctttatttattaaagccacgaaagagaaaacaacatagtgaagtctctaacatgactatgaagccacacaactgaatcaacttaacgagaagctcgtgcccctatttgaacgcatcttagcacatataaaaggaaagagagcacgctaaattgacgagagggggaggcactactgaatg

SEQ ID NO: 98582 - DNA, 532 bp, Glycine max
  Clone ID: PAT_MRT3847_60032C.1
gaaaaaaactatcagattaaagcaacactgatgcattgacacttatcaattactcaaaactaatttagagaacagggcccttctatacaaactaccaaactctattagaaagcaacatatgcgcacgatagcattgggaaagatgactcctaacacagaaatcagcactggttatcaaacgacggattgttccacaagcaaagcataatagaaaacgtatgattatttactgacaaccacaagaaacaggctttcgaaagatgcacgctaataattgtcaactcatcttaaaaatggacttattgttcattcagatttatgccttttacgcttgaagagcgagacacggccatagaatactgaaagcaaccactgacaaataagaatgagccaatgttcttgacttacgaactgcttgaggccttggtccaaatataccttgataaacaattctctggtttcggaaaacagccttgttatgtgcaacaagcaatctgaattatttagcaattgctcagacttgaggggcata

SEQ ID NO: 98583 - DNA, 517 bp, Glycine max
  unsure (1)..(517): unsure at all n locations
  Clone ID: PAT_MRT3847_60033C.1
cctacgcgtccgcatccccttgcggaccctgccttcgagatctgatagtcaaaacgaccccgactcgcaagcgacgtcattgctcgcttcgtcccgctacgacgaccacgatcgtgactacgactaccggcaccccgacaccgcccgctcccagcgtcgccgttcctactccggctccgagtcgtcctggaccgacacgggtgacatcggcgaacagctcgccgacaacgaccccgttcgccttcagctctccaccgagatcgaggacgagctgctggctggcgtccagcgtcgacacaagaatcacaatcaaaagagggttcgcatccaggattcccatcaccgccaccactctcgctcccattctgtcctcattgataaggaggctatcgaagtccccgacttcaatcctagaccccctactcgtggtgaacgcataattggcgccatcatgtcgggacgatcaggttccatccacggnctcacgggcaagcccctgctgtactttaccagtatc

SEQ ID NO: 98584 - DNA, 1011 bp, Glycine max
  Clone ID: PAT_MRT3847_60034C.1
ggggtatggagaagcttgtagagtacattaaaataagatatcgtaatatgcccatgtatattacagaaaatggtgggtgaacattgattacataactacaaaaaaatttctgttttcatttctgctacgcacaatttttttgaaaaatgtcattgtcattgtatttctattttcttaatgaaataaaattaaacggaagccactctatcatttctactttatttctggttttctaatgtttgtatcggaatgaaaacatcttcgaaaacagaaacaaagaaaagggagttgtacttttatgattgttaatgaaaatatgaaatgaaaacaagaaaggtgtttccaaaatctcattttctcccattgtgttttaaccttgcattgttgcttgatcacttaatattgaccattgtatcttgagctaggagaccaataacagtgatcatggaaggtcactttttgttatgtatatttgggttttgaggattgagttaattaacaaattttggattactacataaaatttgtttcaggatactctccaccgccgaagccggatgtgacaatacatgattcactacaggatttcaaacgaatagattatcataaagcctaccttgcagctttgcttagatccataagaaaaggtgctgatgtaaggggatatatgatatggtcattgatggataactttgaatgggcaagtggctatgacataagatttgggctttattatgtggatagacagactcttgaacggattcccaaactttctgttcaatggttttctagtttcctcaacaacactagccacaccaacaaacaacccctgagtgagcaatatgttagaagcaaagatgtgccacccctggtttcgaagttatttgaacaaccaaaaatgcatggatactagtgtatgtgtgtttgttccacttctaaactaagattttttgtttgaaaaatattggaaacatactcgctaaatatgcaattatttgttataatttattg

SEQ ID NO: 98585 - DNA, 760 bp, Glycine max
  Clone ID: PAT_MRT3847_60035C.1
cacagcaccatcacgacaaaatggttcgctacggtgcctcctccattgacggcgcaaagtctgctcgcgcccgcggcagctacctccgcgtatccttcaagaacacccgcgagactgcccaggctgtcaacggctggaagctcgaccgcgccctcacctacctcggaaatgtcttggagcacaaggaggctatccccatgaggcggtacgccggcagcactggacgcactgctcagggcaaggctttcggtgtctccaaggcccgctggcccgtcaagtccgctgagatcctcatcggtctcctcaagaacgccgaggccaacgccgacaccaagggtcttgacacctccaacctgatcatcaagcacatccaggtcaaccaggcccccaagcagcgaaggcgcacttaccgtgctcacggtcgtatcaacccgtacatgagcaacccctcccacattgagctcatcctcaccgaggccgccgaagttgtccagaagtccccccagaccctcgagcgccgattgaactccaggcagcgtggccgcgccgtccgcaaggccatcactgcctcttaggagtaaaggatgtacgaggagatgatgttccggcgaaaaaaacggtcaaggcatgggcacggtttgggagtcaatgagcgatgaatattcagggtctttccacactcgtcatgtatgcatgatatggcacttcgatttttgcggtgtttggtccgtaaaataaatagggccccgtcctggttccc

SEQ ID NO: 98586 - DNA, 1350 bp, Glycine max
  Clone ID: PAT_MRT3847_60036C.1
tagtgaatcactcattcatatttggttttaagaaaggcactgacttaagctaccatcaagtctttttctttagttttgtcttggcagcattggcactaaccagtgtcctagcgaatctagacatgcaaatagatccagagacaaaagaatacaaagcgttcactgaacttttgccacttatcctggttctagttctgattgccattttattatgcccattaaacatcgtttatcggtcaagccgtatgttcttccttacatgtctgattcactgcatctgtgctcccctgtacaaggttacactgccagatttcttcatggccgatcagtttactagccaggttcaagccttgagaagttttgagttctatatatgctactatggttggggagacttcaaacaaagagaaacatcttgcaagtcaaacaggatattcatagctttttcgttcattgttgctgtgattccatactggtcacgctttcttcagtgcctaaggcgactgttcgaggagaaagataaaatgcaaggatataacgcgttgaagtatttcctcactattgcagctgtttgcctaaggacagcttatactcttcatcaaggaatgggattgaaagtgatggcctggatattctcaatatctacagccattttttccacatattgggaccttgtcttagattggggcctcctccaaagacattccaagaaccgctggctcagagacaagcttctagtccctcagaaaagtgtatatttcgcagctatggtgctgaatgtcttgttaaggtttgcatggttacagacaatattgaatttgaatttctcctccttacatagacaagccatggtcagcattgttgccaacttagagatcattcgtcgaggcatttggaacttctttaggatagagaatgagcatttgaacaacgttggcaagtaccgtgcattcaagtctgtgccactacccttcaactacgaggaggaggaagataaggatgagtgatttggcaggaacagcaagcacagaacaacaagaatctccaccacaatattatttgtatcatctaactttgtaactacacttgttactctcgagtgataaattcgacttcttcactcagggcatatattccaaatgcatagtagttatatggccgaagaaatcgtttttatcaattttgaacttgtcctaaaccttggtccaccaatggtaacattgtcattggatttcaacattaaaggttaataaaagtaacttagtttacaatatgttgggaaaaaaggggtggtatttttttgacacggttggaattttttattacacacatttttttatttccttttcc

SEQ ID NO: 98587 - DNA, 647 bp, Glycine max
  Clone ID: PAT_MRT3847_60037C.1
ccagaccgtaacaaacaagcagttgcgatcacccgcgccacaaccttgaacgcggtcgtttaaccttcgaatctgaaattgtttctccaacttcctccttccttaatcaacctctgttgcaatgtccatgtcgtgcaattctcttctccttcttttctcctccatattcctcacctatttcccaggattgattatatctgcggacgtgacgctgagctcgattgagatcttcacaacccacgagtttcttaaagccactccaactgtctattttctgtgcaaaggggacaacaaaacccaattgcctgacatcaaaaaaccccatgtcttttattcttttaagggtgaagagtcttggcagcctttaactaatttctcaggtaaaaagtgcaagcgatgtggaatctatgaggaagacaaatttctttcagatgatgtgtttgacgtgtgggaattctgtccttctgattttactacccctgatggaagatacgtccacttcaaggaaaaagaattcaatgctaggtttctgtgcccagagtgcttatctttatctggtggtgggtcacttgctaccttttttctttgaaaactcctcttaaggctatcatgctattagactatgcaaacagcagtgtgatagtagt

SEQ ID NO: 98588 - DNA, 239 bp, Glycine max
  Clone ID: PAT_MRT3847_60038C.1
gatcacacgctgaccaggtagaccgttgccggactatttggacctgcaccggacctcgctagatgaacggccacagacggccctagcgatcggacacacagggcctcgacctgctcccgtggctccgcagctgcgctaggacaggtcgctcagcttgttgcgcttgctgctcattcttatattggggggcgtagggctggggatcatcctgcgcgcatgcagttcctaaatcaccctcg

SEQ ID NO: 98589 - DNA, 514 bp, Glycine max
  Clone ID: PAT_MRT3847_60039C.1
gtaatcagtagagttcgcatggtaagtttatattacacgacctggaagaattaaaaaccatgctatcagcctcttagtgacaccagaagttcggaagcactgctttatgttgattaactctgctgttttttttccctgtaattgttgatttattatgattttatttctgaggtattaatttgttttatctttataacctccaaatcagttttttgtagttggaatgaagcctctttttttttaattacagtatgagtttcctaaacttctagctttatttttcgtttttgctcaagtgatctcttatttgatgtgcttgctaacccaatggagctgaaagaatatttttcaaagtcatctcttgatctatggtatatgataattttgtgaacaatattgcttcatttgtgctttaattttctctgaatttctctaagatggattcttttgtttcctttggaatttggagtcacatctaataatcattcacataagttactgaattttttgttct

SEQ ID NO: 98590 - DNA, 283 bp, Glycine max
  Clone ID: PAT_MRT3847_6003C.1
gtccgggatcatccacaatattgatgagaccctccatgtgggatggctcattattgaggagcacaatggagaacaccttggtgagctcataggtgaacacttaggagtactaccttgtgagcactaaggtgatctcaaatgataacatcaccatgtggagcacattgagggacttgttggtaagatcattgacattatccatggtgattgccttgactatggtgataatatgatagagaatgactatataatgaaggagcatggtcttgaccattatggtcat

SEQ ID NO: 98591 - DNA, 245 bp, Glycine max
  Clone ID: PAT_MRT3847_60040C.1
atcaccctgccgacccacgcatgcgcccacgcttactcctccctctccatactactatcctattcaaacaatgtctcaaaggttacgtgcttttttcaccaaaaatcttccctactctaataacaccattacaaatatctcccattttcatgtcttcctctaaaaacttctactttctattcctactcttctatacctcatcacacaattcatacccttactcaatttatactactaaactctct

SEQ ID NO: 98592 - DNA, 1442 bp, Glycine max
  unsure (1)..(1442): unsure at all n locations
  Clone ID: PAT_MRT3847_60041C.1
aattcggctcgagaaaacatggggtggtttttcctttgaatgtttcacacagtggaagtctcttctcaatttggccattccaagctgtgtttcagtgtgcttggagtggtggtggtatgagatcatgattttgttgtgtggtttgttggtgaaccccaaggctactgtggcttcaatggggattttgattcaaaccacttctttgctttacattttcccttcttcattgagcttcagtgtgtcaacaagagttggcaacaagcttggtgcacagaagccctcaaaggcaaggctttctgccatcgtggggttgtcttgcagcttcatgtcaggtgttttggcattgttttttgctctcatggttaggaacacatgggctagcatgttcacaaaggacaaggagattataactttgacatctatggttttacctataattggtctttgtgagcttgggaattgccctcaaacaacagggtgtggggtgctgagaggcacagcaaggcctaaagtcggtgctaacatcaacttgggatgcttctatcttgtgggaatgcctgtgtccatttggctggcctttttcactggctatgattttcaagggctctggcttggccttcttgcagctcaagggtcttgtgcagtgaccatgttggtggttctttgtagaactgattgggaatttgaggctcaaagagctaagaaactcacaggaatgggtgttgatcacaaccatcatgaggttgatgatccagagaagccactcaaacatgaaagcaaggaagattctttgctgctagctgactctgatgaaaatgaacagtgattggtttaattgatcaaccacccttaaagagaaaacaaaaaaactgaagagcggaggataagatatttcgtaaatttgtctttaactgtatagggaagtagggtagagacagaggataacatttttatatttatgatttttagataacattagatgcagttccttacgtgcttttttttgtgttgttttaaaattataatcggagtttcatttcagtaattcacctaatacaagtttacatttaaaaaaatagtataagtcaccgatgtgaaactccaattttgattaaaaaaataatactgaaagcacgtaaggaagggcatctaagttttgtcctttaagaaaattcactggggtccctctcctcttgaggacttctgctatttccagtaaaattcaattgcatcttgcagggcattgaatgtcatgggaagtaggaaaatgtggtgtccaggaggagtaaccattatttctgtaacgtactcttttttgttcagctttacacagaagaagagaagagaccctcatttcatgatttatgcttattaaaaaaaaaaaaaaaaaacgagactagttctctctctccctcgtggggaaatcctgcngcccggggggt

SEQ ID NO: 98593 - DNA, 461 bp, Glycine max
  Clone ID: PAT_MRT3847_60042C.1
atataattcagtataactagcacagcatgcattaactcaactactcactcacttactctcatcaacctcgtacgtcaaccaaaccaaacctacctagtcctcagtcctcacaaaagaaactaatggccaaaacaaaactaaccttattaataatctccttcttcaccactttttctgttgtttgtctctcctcccccgcggattttttcctctatggcgggtgcacgcagcagcgttacacctcgaactcgccctacgagtctaacctgaactcgctcctgacctcgctggtgaactcggccacctactcttcctacaacaacctcaccgtggtggggtccagccagagcgacgccgtctacggcctctaccagtgccgcggcgacctcgccatgcctgactgcgccgcctgcgtctcccgtgccgtctcccgcgccgggcagctctgcccagcaacgtgc

SEQ ID NO: 98594 - DNA, 160 bp, Glycine max
  Clone ID: PAT_MRT3847_60043C.1
ctcgagccgctcggatatcctcaccaccagcaccgagtaagggatgcgataaggaaaaaaatggcatatagacatgataccaggctggcgcataccgtccgtgacgatcttgaatgaatgacaaaaatgaagccatcaagttcttcgcctataattcacc

SEQ ID NO: 98595 - DNA, 213 bp, Glycine max
  Clone ID: PAT_MRT3847_60044C.1
cgacaatgaaaagatattattgaggatggggtatacacgggatgagctttcaaaatgacgagattttatagctgagggatagcaacaacaagtattaatgcttcatcatatgggtgacattaaaggtattgctttaaacagttcaactctaaacacatgtaattgccctcctttaaaaaggtacaagcactacatttattgtgcacattcatt

SEQ ID NO: 98596 - DNA, 254 bp, Glycine max
  unsure (1)..(254): unsure at all n locations
  Clone ID: PAT_MRT3847_60045C.1
gagaatggcaantatgactggtgtgagcctttcatgccccagggttttcttcaacgcatcagcctcacngnaaaacgcgcatgcngtaaagtncncactnccacncagccnangagagcnaccgggtagtatcaanttgggtcgngtgatgatgatccgacccgttggcgntgcgcctgancgcanatcggagaaggtggangagannataacngaacgcgcnggaggcgtacgccgacgatccgangagnang

SEQ ID NO: 98597 - DNA, 831 bp, Glycine max
  Clone ID: PAT_MRT3847_60046C.1
caaaaaaaaaaaataagaaaaaaaaagtaattttttggcccttctctctctctctctctctctgtttttctctctctctcttgatttctctctcttgactgcattcccctctcccaagtcttgtgcttcaattctagtcagcttgtattgaatttcccttcagctggagtcgaaccatcaatccttacaatataaagggtcccttgtttttgtttagatgtatatacatacatacatatatatatatatatataaataaatatatataacactactactatgtgtatatttatggtgatgattttgaattggggtgtttggtggaggtggtaataaacctgatagtgtgttgtgtctgtcggcgcaaggtcactttctgtcggcattgtctgtatccactatccaacgatgatacacttctgagagaaagaaagagagagaaaaaaaaagagtatttttttcggctcgagaaattaataaaaagtacaacgaagatagagaggttttagttttacttctgggttttcattgcttacagagtgcctctacctttcaaagagcatattcatatcagcccttgaccttgtctctggagccaagccaactgagacttcaatcctgatctgaagggtcttttttctttctttggttttgattttgaaccccactttccacatttgcatcttgtgtggaatcctagaacatcttggtttggttgttgtcagatttgtgttgagagggtggagaattggttcatatgagggaaggaggagggggtttgtgggtcaatcttgatttccgggagtggcattggaagctttctcaaagtgt

SEQ ID NO: 98598 - DNA, 259 bp, Glycine max
  Clone ID: PAT_MRT3847_60047C.1
gatcccataagagacacaatcaagtcctatatggttcactgacatgtgtagaactatctgcaattacacacaatgaagaaagtgctgacagcattggcgctgatgctaagttgttctgcccttacagcgaccgcttcagatgctatgccaccagtgacaacaaatgcagcagccgacgactacaattgttcacaagcgatgacatacacttgtttgtgtcgagcggagattacctcattggcggcgatgctgtaacttc

SEQ ID NO: 98599 - DNA, 401 bp, Glycine max
  Clone ID: PAT_MRT3847_60048C.1
tggaacctttgggctgatttatgtgcttgcatggtcgtgagaagatgatagaagaggtcgtagtagtaatcccaaatgttgaagaaagcttacttaactcttgaagtttcctattgtaccgtaattacgctgagaagaaaggccagagagttaaaggaagaaaatgcgatctcgggtttagtcgccagggacggtgaatacgctcccggtgctgtctgtactcccgttcttcctaacgacattcctacctacgctatcgactcgcttgggagggaaatatccgcttgtactataggcggaacgaaggccaaggtcgatagagacgaactgctctttcacgtcgtcacgtccgtcgtataggatgccgtcgttagacgtaaggaatcgggtacaatcgtctc

SEQ ID NO: 98600 - DNA, 347 bp, Glycine max
  Clone ID: PAT_MRT3847_60049C.1
aacagcggagattactctacagatgttttccgatcaacatggtggagtcaagggtgtgtttgttgcactcttttccttgtacaggtaagtgcttcacgtctgtaactagggtatcgatcacacctcataattcatcattttatcacaaaggtggtgattcaacaccatgtggtcatatctacaagtacacacgctcaatccgtcatatctgcatctacaaatatattctgcagacttcatgcaactcagatcatgctagctgtatgtccattagctcacagcctgtagtatgtccttgcaataacaccaacaacttccgctacagttcttgtggatccattcaagtc

SEQ ID NO: 98601 - DNA, 562 bp, Glycine max
  Clone ID: PAT_MRT3847_6004C.1
gaaggggaaagcaactcagtttcattaaccaccaaactctgagtacagtttagtatttatagactattctgttggttacaacaactgtcactaactaactaactaactcagaaactaactctctaatgactaactagagtaaagctagctacccgagactactgcagttgaataattgcagctcttacaatactccaatacaaataaaattgagatagtttcgcacgtgcaacatattacccataaataggcagaacgacacagtacaaagggtaactaacaacaattccttaatactaccgaattatttatgaatatcttgttggatcaaccaaccttgttcacaaaagaaggcagtagcatggatctctgagttataaaacttaggaggtccctttgctaccccatttttctctggattcaatttatttattggatgtttgaagttcactgggggaccctccggggagcaaagcatgaatccaatcgccccacttacatatgcaggaactgttgcccaggcataattaacggagcctttgaatatcttgcaattagctat

SEQ ID NO: 98602 - DNA, 806 bp, Glycine max
  unsure (1)..(806): unsure at all n locations
  Clone ID: PAT_MRT3847_60050C.1
ctcctcnttcgaattatggtttgaaggaggttgaggctggatgtgggaatataaaagcctaactgccatttacttgaaactactccatttgcttcttatagtgcttgtagagagggatagtgaaatgttgaagaatgttttctcattgtcaattcgctagctttaatagaaactttcaaaccccatttttattttttttatctctctttctcgtgtgcctttctagtgtcttggatttcctggttttctgtttctttctgggttgtggtgtgatgctttcagatccttcaacagtgttggttgattgacaccattgttctctcttcttatgcaaaatattgtcatcaaaggctctcatcattgctaagctcctgattcaaaaaagaggtccatgaacaacaaactactttagactacaactcagaagccaaggtgagacttttttagccaacaaatccttcatagtgttccatcgtttgctatcttcaagcatatcaaatgccaagatcaagggggtctgagttgcctcaaaggcagtctccacgaggtccacatcaacatcggacatcaagttctgattctgatccgttgcatcatcggctgattgctgaccgaagtccaaagctaggagaccggcgttcccccagaggtactcaatctgagggattaaatcagaagaagctaggaactcgtattgcagatttggaatctcagcttggtcaagcacaagtagagttgaaagttgtaaagaccagctagcttctggtgaagccccaagagagatgctcaagatgagctagtgaaga

SEQ ID NO: 98603 - DNA, 960 bp, Glycine max
  Clone ID: PAT_MRT3847_60051C.1
accaactgagagaagagttggaaaccagtaaagccaatgcagacaagttggatgagaagttgaaatctgtggaagcagaaaaggaggggttggagtcagagatgaagaagctaagggtgcaaactgagcaatggagaaaagcagcagatgctgcagctgcagtgcttgctgggggtgtggatatgagtgcaaggattcctgaaaggtgtggctccatggataagcactttggtggcacatttgagacacctgctggtaggtacaacggctatgtggggtctcccggtatggctgatgacttggatgacggttttggaggtggaaagaggaagggttctgggattagaatgtttggtgatttatggaaaaagaagagccaaaagtgatgtctggcttatatattcagtgagtaaattagtagtactttaactaaggtcatgttttgatggtagcagaaactgcaaaagcagttgcttactgttttgcatctttctggtatctttagtcatttctggtattattaaggccattaagcgtgtagtgttactgttgcatgatctgtgcaaggtagtgaactttttgaaagatggattatatatttcacttctcctgaagctgcgatgagcacttttacttgtttttaggcatattctccggttttgcactgcttggagttaatgtcttaaagaacatgcttcattttctgttaactttggtatgactctaaaataacgttaatatctaaaatgttatattgtttgccagtgagcaacttcgtatgtggaacctcattatcaatggctgaggaaggtaatatgttgattagatagatagatactggaaacaaatgcatgatccaaatattgaagaggtagcttagcttgagtaaagttagaccaagctccataatatgcctatgcttgcgctctattgcaccattttgatggtgagtatgagggc

SEQ ID NO: 98604 - DNA, 1046 bp, Glycine max
  Clone ID: PAT_MRT3847_60052C.1
ggctcgagcaggttgcttatatatatatatgggtcacataaaaattcttttttgcctttcttggggtgattgttttgtattgtttctatgagttttaaactgtggaccattgttttgtattaggttgcatttactccgtttgtgtaaaacatgcaacatttacagcccttacatgcttttaaacaaagcaaaaagcaccgaataaagtaggttctgactctgcatgctttcttgctcttgggggtggtattaaaggcatacttttatagcatgtcattgtttgaacacaggaccagtgtgcgatgtggggctgctgctttattcatcttttctttttttttatctcttatgatttttccgaaagggtcttctaccttcctagtttctagtggaagataaattttggtatcttgggtttaaatcaattgccttttagtttaatagtcgcggttgtagtgagttggctcctttatgataatgagggttcaaggctttcaaggtcataaatgtacatagccattgtgaatttttttgtctctatatctcttcttaccaaattatggtttggagaaggttgaggctagatgagggaatataaaagcctaactgccattaacttgaaactactccatttgcttcatatagtgcttcatagaggtatagtgagatcttgaagaatgttttctcattgtcatttctctactgttaataaaagctggcaagtgcaaaattgctaaaaagcaggtgagactattttagccaacaaatccttcatagtgttccatcgtttgctatcttcaagcatatcagatgccaagatcaagggggtctgagttgcctcaaaggcagtctccacgaggtccacatcaacatcggacatcaagttctgattctgatccgttgcatcatcggctgattgctgaccgaagtccaaagctaggagaccggcgttccccaagaggtcctcaatctgagggattaaatcagaagaagctaggaactcgtattgcagatttggaatctcagctcggtcaagcacaagtaga

SEQ ID NO: 98605 - DNA, 2615 bp, Glycine max
  Clone ID: PAT_MRT3847_60053C.1
ttaccattcgtccgggatccttgattgagggcattgagggcacttccttccaagttcaaagttcgaagccatgcgaatgaagccaatccagctcccggagccgcccagccccacggcggcgcgtggcactccggacatcttcgaatccggcgtccacaccctcgtccgccgcgccgtcgtcatcggcaacggcttcccctcctccgagaatcacagcatcggtttgctccgcgcccttggcctctcccacaaccacctcctctaccgcgttacgaggccgagaggtggaatcaacgattggctccattggcttcccctctctgtccatcgaaaatttcattacctaatttccatgttccgcgccttctcctccaaatctcactacctgcccctcacttcccaccctaacggcttgtcctctattctcgaagctgatgccaatcacatagtcaatttggctcgcgaaacttgtgaaaaggagggaccgttattggtggttgcatctggaagagacacaatttctgttgcgagttccataaaacgtttagctcctgatcttgtttttgttgttcagatacaacatccaaggtctcatttgaataggtttgacatggtaattacacctcatcatgattattatcctttgactccagaaggacagaagcaggttcctaagtttcttagaaggtggataactccacgcgaacctccagatagtcatgtggttctgacattgggagccttacatcgaatagattttgcttcacttcgcagtgctgccattacatggcaagatgtgtttgcaaatgttccaaggccattgctcgtggtcaacattggaggaccaacaagaaactgtcggtatggtgttgaccttgcaaagcagttagcaacatgtttgctcagtgttcttggtagttgtgggagtgtaagaatatccttttcagataggactcccacaaagttgttcagtgcctggtggatgtactatcgacaaaaaacacatggctgtttaaagtagcacagcattttctgaaacagctgtctgattgggtgggggacgatgatgtcagaagagtttctgttatagtggctatccagaagcacagcaatggaaaatttgatcgtataacacggacaaaacatgttaaagatttcatgtcacagttcaaaactgaacctggttgcatgcttttcattcagaacttaatgaacctctttgtggatgaaggtaatgcccttgaggaaccttcagatcagagtcaaactacagatgaaaattctgaaatagggtctattgaggataaggattctcctaggaccaatggaaattctgattttttgaagagttgggttatagaatcccttcccagtattttaaaattcttgaagctggatcatgaagagaagttcagagtacagaaagaaatcatgaagtttctggctgttcagggtctcttcactgcatcacttggctctgaggtgacttcgtttgagttacaggaggaattcatggtggccaaaatctcccacatcgaatgctctttgtaagatgtgtatagaccagctgcaattgttgttagcaagtgctcagaaaggggagggcagttgtcctttggccaacagcgttgagccaaatgatcttggttcatacttcatgaaattctttggcaccttatgcaacattccttcagtttccctcttccggtctttagatgatgtggatcaaaaggcagtaaaaaaattgcaggcaatggaaactagattatcgagagaggaaaggagccgtgactgtagcactgatgctaatagattgcatgcactgagatacttgcttatccagctgcttctgcaagtgcttcttcatccaggggagttctcagaagctgcatctgaactcgtcatttgctgtaagaaggccttttcaacttctgatcttcctgagtcctctggagaagatgatgtggaggttgatgatgcccctgaattgatggacgttcttgtggatacattactgtctctgcttccacagtcatcagctcctatgcggtcttccattgaacaggtatttaaatatttttgtggtgatatcactaatgatggactgatgcggatgttgcgggtcattaagaaaaatttaaaacctgcaaggcatccagatgcagcaaatgcagatgatgatgatgatgaagatgatgactttatcgatattgaagaagaagaaattgatcaagctgagacaggtgaaacaggtgagagtgatgggcagacagatgactctgagtcagtagttgaggtggaggagactgatcatggccattccgaagcttctgatgattctgatagtgggatctttgatgatctggagatcgtttccatacctccatgtggctttgttggcgcgatgcgtgcatcccgtttcgccgtgcgtctttctttctgccatgcaatgtggatgatgagtgtttgttcaggattgatacatatcttgcccagatgtttaaagagaagaaaaatcaagctggaggtgaaactgctcattccagcttgggctggtcaacttaaaatccttcattgttggaaatttccttcatgaaatccagcttttggtaccc

SEQ ID NO: 98606 - DNA, 2401 bp, Glycine max
  Clone ID: PAT_MRT3847_60054C.1
gcttttcatgtttctagattggatggggctcacctgttcatacagtttattcatttgaacttgcatttttgttaccacgcgtccgctttctagcgtcttggacttcctggttttctgcttctttctgggtgtctttgttgtgggattttctaggcctctctgtccttctctttagttgatgagatgtttttcttacagtgcttgtagggagggatagtgaaatattgatgaatcttttctcattgtcaattctcttctgataataacaattgttctgtcctaaagtgctaaaaagcaggtgagacttttttagccaacaaatccttcacagtatttcatcgtttgctatcttcaagcatatcaaatgccaagatcaagggggtcagagttgcctcaaaggcagtctccacgaggtgcacatcaacatcggacatcaagttctgactctgatccattgcatcatcggccgattgctgaccgaagtccaaagctaggagatcggcgttcccccagaggtactcaatctgagggattaaatcagaagaagctaggaactcgcattgcagatttggaatctcagcttggtcaagcacaagtagagttgaaagttttaaaggaccagctagcttctgctgaagccgcaaagaaagaagctcaagatgagctagtgaagaaagctgtgcaatcagtagtgccagtggtagagaagctccaagagaaatccacttccaagaatgctccagagactaataaaactgaaagcaaatcccaagatattatacctgatgacaaccaacaagagactgatgtgtttgaagttccaattgagaagttgacaattgaattcagcaaacctgctgatcaatcagaaaaggaaactcaaccatctgaagactctaacgcaccagcaatatcaaagccttctgtggatgaacacgaactaacactaaagaatgacgaaattgcattgttgaaaaccggtttggaagagaaaggaaaggagttagagtccatgactaacgaaaaggagaatctgaagaaccaactgaatgaagcagtttcaaaagtgtctgctgctcaaaccaaggaagaagaaatgaccttgcagttgaaccaactgagagaagagttggaagccagtaaagccaatggagacaagttggatgagaagttgaaatctatggaagcaagaaaggaggggttggagtcagagatgaagaagctaagggtgcaaactgagcaatggagaaaagcagcagatgctgcagcagcagtgcttgctgggggtgtggatatgagtgcaaggattcctgaaaggtgtggctccatggataagcactttggtggcacatttgagacacctgctggtagatacaatggctatgtggggtctcccggtatggctgatgtcttggatgatggttttggaggtggtaagaggaagggttctgggattagaatgtttggtgatttatggaaaaagaagagccaaaagtgatttatggcttatatattcagtgagtgaattagtagtactttaactaaggtcatgttttgatggtagcagaaacttccaaagcagttacttactgttttgcatctttctggtatctttagtcttttgtggtattattaaggccattaagcgtgtagtgttactgttgcatcatctgtgcaaggtagtgatgtgaactttttgaaagatggattatatatttcacttctcctaaagctgtgatgagcacttttacttgtttttaggcatattctccggttttgcactacttggagtaaagaagatgcttcattgcttactgttttgcatctttctggtatctttagtcatttctggtattattaaggccattaagcgtgtagtgttactgttgcatgatctgtgcaaggtagtgaactttttgaaagatggattatatatttcacttctcctgaagctgcgatgagcacttttacttgtttttaggcatattctccggttttgcactacttggagttaatgtcttaaagaacatgcttcattttctgttaactttggtatgactctaaaataacgttaatatctaaaatgttatattgtttgccagtgagcaacttcgtatgtggaacctcattatcaatggctgaggaaggtaatatgttgattagatagatagatactggaaacaaatgcatgatccaaatattgaagaggtagcttagcttgagtaaagttagaccaagctccataatatgcctatgcttgcgctctattgcaccattttgatggtgagtatgggggcagatgagtctgctgaataccatgttcgtagattagtgtatccaataacagcactcaattttgtgggagaagcaaagctagtaagatcagatgaaaataatatac

SEQ ID NO: 98607 - DNA, 424 bp, Glycine max
  unsure (1)..(424): unsure at all n locations
  Clone ID: PAT_MRT3847_60055C.1
aagcttctccaatccccatttcgcaaattcacaatcgccaccattcccaaccctaaccctaaccctaaccctaaccctaacccttctcaaacaatggtagtcgccctgggccccgggaaattctacggcaccagccttccccgccctcgcatctacaccgacgtcaagttcaacgaccaccgcgtcgacccacccgttcccgtcaacgacccactcatgtcatgggccgaagaggcccactggtccatgggcggcctcagtttcaagcgcctccgcctccagggcaaaatcgaaggcaacgtcganaggctccgctcccagcgcgagaagatccaggcccgaagcgcaagcccaccggcccgctccgatcttcgcagatccaaaagagctgcctcccctctgactcaacgggtccggtcatgac

SEQ ID NO: 98608 - DNA, 455 bp, Glycine max
  Clone ID: PAT_MRT3847_60056C.1
ccttcattgattcacattctcgtatagataggctctcaagttgcatcaaacttttggcagttgagcatttcaataaatactccatcccattacagtcgatcacttccaagtctttcagattgatgaaagacactgcacagctcactaatttttctaatcgagggcacccccaaagagttaatatttgaagcttttcagagtatggcttaacccatgggtgctgctctaaccctatcgactccagctctccaagatctaacagtgttaattgtttcaatgcgggaagtgaacggtcatgaacttggagtttctgagagggaaatatctccttcagaccatagcatctttccactcgaagatgttctaagctgggtaccttctgaaggaaatcaaaaggcacagtatctttcttaatgccatcattatcaaaggatagatcaagacacgttaatttg

SEQ ID NO: 98609 - DNA, 374 bp, Glycine max
  Clone ID: PAT_MRT3847_60057C.1
cggtgctggcattctcaagccagtgaaatcggtgcgagtgtcttcgcctctgagagagatactatgagatctcaagcctcggaggcgtagatactcacacctctttttctggctatctcaccactgctcttttccgccggggcacgaaggtccttcgcctcaccaaatttcgttctttaaatttcacctatatttgtgtatatttttaataataataattaggtttaaagggaaaaaaagtcgcttcttaatcctttattcattgtatgcagaacgatttgattcgtgatgataatgtatggatctgtatagtcggttgctctagtatccaataatttgatttctaacaaattaatatgtagtggccttcttgg

SEQ ID NO: 98610 - DNA, 1419 bp, Glycine max
  Clone ID: PAT_MRT3847_60058C.1
cggtccggaatcccgcgtcgacccacgcgtccgcaagattgcccatttgggaactcacacacacaaacgacaaaagagggaaacaaaaaaaacatcaaccaacgacatcctcgtcttcatcttcttcttcttcttcttctttgttcagcttccctaacgttaacgtcgtcgtcgtttatcccaaaacaaaacgatggacttcaccacttttgcaaattccatatcctcttctcatgcaattcctccaatacacacttatcgccttcaaccctctccttttcctctccacctcccattttcgaatttaaagcgttcaggtttggttaagaatcggcttattgctcgttgcacttctatgtccgatgaatttggttctgttaatgggttgcaattctcgcccaataagctttttgtggaggaggctattggggctgaatatggggaaggctttgagacttttagggcagatggaccactaaaagttgatgtggactatttgaatgagaaattgcaagatggttttcttcagcgcatacgctatgctatgaaaccagatgaagcttatggactgatcttctcttgggacaatgtggtggctggtacacgagctctaaaaaggaaggcatgggagcagctggcctttgaagagggaaaggatattccggaaggtgatatgcacaaattactgttttatgcaggtgctgattatgtgttgcataagttttttctctcagataaggcggaaaatgagctgaataggctaaagttaaggttttctcagatatattatgataatcttgtcagacttgaaaaaccaatggatggcctcaatgactggttggaagcagtttatacagctcgcatcccctgtgctgtggtttcaagtcttgatagaagaaatatgttagaggctttggagcggatggggctcagcaagtatttccaggcaattgtgacagaagaggatggaatggagtcaatagctcatagatttctttctgctgctgtcaagttggatcggaaaccttccaagtgtgtggtttttgaagatgatcctagaggagtaactgctgcgcacaattgtacaatgatggctgtagcattaattggagctcatcctgcgtatgatttggggcaggctgatcttactgttgctaactttagtgaactttctgtgatcaacttgcgaagactatttgctaacaagggttcttcatttatggacttacagaagcagatcatagagaaagctcctcccaaaaggaaacttacaatagacaccattttttaatacattttctttcccatccaccctcccccccagctaaatttccttgtaattaaatagttatgcagtcataatatttttttatatctaataaaaattgcaatcagtttggtctgattttatccgaaaaa

SEQ ID NO: 98611 - DNA, 153 bp, Glycine max
  Clone ID: PAT_MRT3847_60059C.1
atcccgaaagaaggtaacgtcttagaaaccatgggaaattatttccccattatcatcgttgacctataaacaaagcaggatggcgctactgaaagaggatgctattttatctgtcctaaacactaacttcgactcaaaggccctggaaacaac

SEQ ID NO: 98612 - DNA, 1008 bp, Glycine max
  Clone ID: PAT_MRT3847_6005C.1
ggacaagagtaagcatgtttcatcatgattattaatattagggcagggggcttaatttttgacgtcaaaaatactgtgattcagagatgaaagttaatggaactagacacattggcttcctaccgtgaaaccaagtttctgtttttttcattcaaaataaacacggtaaagtaaaagccttattgatggataaacttagtaaatagacatgcagcattaatgctatagcatcattacttgattcttggcttgagttttactagcaggggatggagcctgtgggtggtaaggcccattgtatccacattctcttcttccccttgtcccagctcccactcaaattgctgaaccaatctgccaattgcagtgcaagctatcaacatggcctgaagagagcccgcacacaccctcttccctgctccaaaggccatggtcttgtataaatccatgtggtcatatttctcatctagaaatctctctggcatccactcattaggattttcccacagattgttgtccatgttgcatccgtatatatttattgcgatctcgcttcctgcaggaatatgatatcctcccaattttgtatcttcatgagcatatcttagtggcacaatcggagctggactatgcttccttaaagtttcatggaatactgcccccaagtatggtagcttagataattggtcttctataacattttcatgtccacatacatattggagctcctcataaagacggtcctgacgagttttgtctttagcaagttcatacatagcccattcagttgtaactaatgtagtatcagatgtctcaataatggtctcccagattagcatggaaatttgatcttcagtcagttctttagcttccgataccaggtagtcaaaataacaatttacttcctttcctgaagccattctgttcttctgctcattcatccagccacgtgaccagcataagcctcgcttcgcattccctcaccggaacactcccctcggatctcaa

SEQ ID NO: 98613 - DNA, 576 bp, Glycine max
  Clone ID: PAT_MRT3847_60060C.1
aaaaaagtacttttgctacttatacgatggctaagtgcttttcattctctctctctcgttttctgatcttttcgtttgtgctgctacagacacaaacggggaatgggtcaaatgcaacaccgatcaagttgagagtaggggtacccaagagagatggtttccgccaatttgtggatgtagtaccttcggactctcatgaaaaaaagtacaacgtatctggatattgcatggatgttttcaatgccgttgttacccgcttacctttcaaggattctcttcatattcaacaaccttatggtattgaatcaagtgagatttctggaacatacgatgcacttcttcatcagatcccagcaaagtacgatgttgtggtaggggatgtaacaattctggcgaaccgttcaaatttcgtagatttcacgctgccatatacaggttcgggagttaaaatgttagtaccagctcaacatgggaggcaacaagccatgtggattttcgtggaaccattcagctgggagcttgtgttgagcatagtcatcatctctaccttcatagggttttccatactcatcatgg

SEQ ID NO: 98614 - DNA, 409 bp, Glycine max
  Clone ID: PAT_MRT3847_60061C.1
cataattaaatttaaaactaataaattaatatatcataagttagtacacttctttcctaaagagaaatacttatttaattaaaaaaaaaacttagaacaaaggagtaagttaaaaagatttgaactcttcactaatttttaacaatttttcccagaagaatgttatgaaccatattatccaaattaagaaacgaagatccattagggccagaagtagcattttttgccaattccttccattgcaaaactttgtctttcatcttcttaccattttctccatccatcaactcccttaccattttctctaacccaatcccccactctttgcaacaaaatctacaattgatttgttgctccgcgaagaaaggccaacatatcattggaacacctccacacacactttccaatg

SEQ ID NO: 98615 - DNA, 366 bp, Glycine max
  Clone ID: PAT_MRT3847_60062C.1
tttacggatgggtgcgtatggaattattgaccaattgttggacactaggcattcttaatgccggtgtagataactagcgcactcatacacgaaaaggaacgatgaattggatgttcaccagggcagtgtactgagaatccaagaataacaattctcacgagcggtgattcagttccaacaaggaacgagcgcatgacaaggagtttacacatatctattgatagaacatgggaattactggaaatgagatatggcaatacacgatgactatgttgattcatcgaatgatcgtgtggaactgcttctagattgggatatgctatgcgtaccgggaccaaacgtaatcataggtgtgctactggatgg

SEQ ID NO: 98616 - DNA, 281 bp, Glycine max
  Clone ID: PAT_MRT3847_60063C.1
aaaccaaaacgttgcaaaatgcattgaccattttacctagaagggcctgccattaaaaaaatgttgcaaaaaatgggggaaaccttatacaaattggcaatccgggagcccaatacggttggaccaagccgaattccgcttacatatgaggcctaaggggtgccatccggataggggaatccgaaagcatgcctaatccgtttgggggaatctggaggagacttacgaattcaggaatctcgtttacctttacaaaggggcaaagatggaattttactggt

SEQ ID NO: 98617 - DNA, 337 bp, Glycine max
  Clone ID: PAT_MRT3847_60064C.1
tatgttatgtaatgtggttccttcttcctagaagatgcggacactaactaacaagtgcagtgcgtaacagagcatagacaaccatgggtccaatgccagaacgcccaaagcaaagctagctggattagactccatctacatctatagcataagcataccatacataaaaaagatgcattttaattaaattttagggataaacatgtttttaattcttaacaatagaataaagtttgtttttaattcctgaaaaataatttttttattcctcttttataaaaatgtgaattgtcaattattggtctcttattcacatataatgtatttccataaatga

SEQ ID NO: 98618 - DNA, 454 bp, Glycine max
  Clone ID: PAT_MRT3847_60065C.1
accattcgttttttctatccacgtcagtatcctaaacttgcagattctcacatcccaagcaacatgaaggggaagctcatgtttcggacggagctcctatgatccacctttcatatctccttatacattactgactgctaacctgcaaacgggaaccttaaactgtgtccttagccctgcgatctgaaaggaactgccgacattggtggcagacactccatccccaaaagcgagatctatatcttggaggagtacataaagtccggcctgaaccacggcgacatgctggtcgagggcctccagggggcctactacttgcgcacttgtgactaggcctacgtcaagcagacgatcatggcgatcaaggacgtgatctactacatcacctacatggaagcccgcacctgcgcgcatgatgagagggtcaacatatccgacactcacaactggggcg

SEQ ID NO: 98619 - DNA, 777 bp, Glycine max
  Clone ID: PAT_MRT3847_60066C.1
aaataaacaatgttgttaacatacaacttcaaaaaagcaaacccatcaacccttttctttgaactgattccttcttggtaaccttaagacacacacacactactctttcattatggaattcagatccaagtcatgcagagatgaaaggctgcagattgaaaggtactgtggaggcaaggtggccccaacaagcatgcaagatctgaggtgttacagtgctaataatgctgcttatgcaaaccagataggtagtaaggaggtgaaggagaagaaagggaaaagcacagtaactaaaccatcaaaaagttggagcttcagtgaccctgagttgcagaggaagaagagagttgctggctataaaatatatgctgctgagggcaaaatgaaaggctctctaagaaagagtttcaggtggatcaagaatgcataaacgcaagctctctatggatggtggtgaatcatgtcttattctctttttcttcatatttttttttctttttctgtaatgagagttacttatttgtttgtttctcagtaagtgtttaaattaaatcctccatctgccgtagtagtcttatctggttggagcaggattgtctccattgagtcttttaccaaaagtcccacatcctttcaaaagttcaattcctttttgtatgagattccatggcttatgggtgtgtagtttggttactactgctgagtttcttaattatcacttcaaatttaagatgaatattactgggtttgaattaaaaaaaaaaaaaaaaaaaaaaa

SEQ ID NO: 98620 - DNA, 234 bp, Glycine max
  Clone ID: PAT_MRT3847_60067C.1
tcccggggtcgacccacgcgtccgcgaggagacacaccttcagcagcagcagccatggttctcaaaaccgatctatgccgtttcagcggtgccaagatctacccagggaaaggcattagtatttgttcgtggtgattctgaagttttcctgttcgctaactcaaaatgtaagaggtattttctcaacaggttggaagccattaaagctcaccttgactggaatgtgcagaatgc

SEQ ID NO: 98621 - DNA, 426 bp, Glycine max
  Clone ID: PAT_MRT3847_60068C.1
gcgcagggagccaggcgggctgccggcgggtgtgaagaaaaaaatgacactccaatgggctgcagtggcaacctttctttatgccgaaataggactcattttaatcttctgcctaccttttattcctcctcagagatggcagaagattttttcatttaatgtctggggtaaaattgcaactttttggaacaaggctttccttaccattatcatcctattgattgttctatttctagatgctgtgagagaagtaaggaaatattcctcagttcataccattgagaagagctccaccagcagacctgatgcctatgaacacacacagatgaaactttttaggtctcaaagaaatctttacatttctggattttccctatttttttggctagttttgagacgtctgggggggatccactagttctagag

SEQ ID NO: 98622 - DNA, 240 bp, Glycine max
  Clone ID: PAT_MRT3847_60069C.1
tggtgagtggtgagtggtgattttgtatgtctgcttccgttgcgttgcgtgtcgtttacatgaatcacaaattaacagatggcttgttcccacctgcgaatccattgcccattccgagttctgagtgccttcaaatattatcatacatcagacatatggccacgccacccttcattcacgcgcgctgtgcctactcgcctagaatttccaatcgcaacagcaagggagcctcacaacaac

SEQ ID NO: 98623 - DNA, 403 bp, Glycine max
  Clone ID: PAT_MRT3847_6006C.1
aacaaccctatcattatttttataagccccatgatagggtttaatattagtaacatttgacagggaaaatatttgggattttcaaaaattttaaccccaattaaaccagaacaacaaacaaacagtaaagcattaaaaaattgggggtttaaaaagggttgacaaaggggaacagcccctttaattggagaaactttttggggggatgcaaatttagctggattgaatttatgaagggttaacaagggttttaaaatgggctccccatttagctcaagatcccttttaaactggaacattagacttttcaagacgatgaaaacccaatggaagaatgcaagccgttacccccgtttcacatgaagtcacaactgggcttttacagaaaagcctttttggaaaa

SEQ ID NO: 98624 - DNA, 478 bp, Glycine max
  Clone ID: PAT_MRT3847_60070C.1
actggctgcattaacccaaaacatggatcacttgacagtgagcagctgatatactcgaatgcacaggatcgttctaatgcaattgcactcgttgatgcatataactactctgatcactaccttggttgaactcttggacgttacgacggctatgtgtataccaagttagccaaagaggcatggaaggatcctgatgatgatccagtggatactgatggctttaaagagtgtatacgaccgatgcttaatcatcaacttcccaatgctactctggcgttaagtttgtggcaatgatgctatgggcatctaagaaagtcacgcacactattctgatgtacaactgttaatcaagctgcggttgccagctagtaattaccatcgcaacatggtgtatctggaactggaactgggacagactcatttatttatgacattaacgatactcgatgtctaggtaactatgaccttgttggaaaca

SEQ ID NO: 98625 - DNA, 389 bp, Glycine max
  Clone ID: PAT_MRT3847_60071C.1
atgcttaatttagttgtgaacaacagcaacgacataaatgaagccgatgcatgagggttttggattcatttcattaagatgatctggttatctgtcttcttatttttaaaatttaaagtctttgtgtgatgtctgtaaggcattctaagtatgattattatgagcagcttgattcgcgtcatgggccaatgatatcctctgcttataagctttaataagcccaacttatgtgtgatgtacggttgtgattagaggattgaatgtgcagactctagcattgcagcaaagtcatatatatgcatcatttaatttactgtaaggctattatggcagtctacggctaatgagcttgatgaccctgtaattaattgctgaccgttacctgcaag

SEQ ID NO: 98626 - DNA, 2248 bp, Glycine max
  Clone ID: PAT_MRT3847_60072C.1
ggtttcacagatttggagatatcttactggcatggctctgctgcttccttccgctggaatcaatatattcaacatcggtcagtgttggtatctgatagacatgtacaatgcgactgcaaatgtttcccagtaggagatgaaaatgcatgcacgctaggactaccagcgattagaagaaaagggtggttgtgcatattgactggagggagatgaaaaagatgattgtacttgtcttggttggccattaggagcagaaaagggttgttgagaaaattgatctgtaggaactggaatgttctgctgtgaatgcatctcagataatggtgcttgaggaagaatgtctgcaagaatatctgtttctggctgtgaagatgacatatcttgagacggaaactgagagtttgtagagaaaggttgagcgtcagaggaaacaggtgcagagtatggtacaacagaaaatgagtccccaaacccaaagttagagtttgtttctgcattaaggccatttgattgggatggctcaatactctgatatgtctggggttgagatggagcagtttcagtagaagtaaaagccttgaatggcgagtcaccaaatggatcttctaaagactgatcaaaattattggacccagatggtggtgctgcaaaggaagctgttgatccagcatttgcatcaggggctgcagttgctgatgcagctggtacaagagataatgcatttgaagaggacgagtctgagagggagccgagcaagtccatttcaacgttactagtggtggctggggcagctgatgcaggaccaccaggaccaaaaaaatcgggacaagagagagagaaacaaacatacaaagggctactctcactacaatgtcggagagtaggtgattcgaagcgataatcacagtgaaactaagatcccgtatacgcagaggtttgactaggattatcatttacatgaggagaggagtctctaggagcaggtgctgctgaagtttccacatctctttcactgtgtacagggctgcgagattcactgacagcttcttcatagctaggaggagcacccatattttgctcagaaagtttccgctcaagccttgcttccagagattggtcttcagctttagcattgcttccacgagatgagtgttgtccatcatcatcataacgatctctatcagagctcctgcttcttgtgtcatattggtaatcaacacttcgacttcttcccctgtagtcgtcatctctgtatccatccctgccataacgatcctcataatctctgccataacgatctccatcacgactatgtcgatcatcatctctattgccccattctctttcctttccataaccatagccatttctatcttcttccctgcttccataacgatcatcatcatatctgtcaccataggctccactgcttgaatatgaaccaggtctatacattccacctgctgtactgttgcgaaacttgtccctgttagcagcagccttctgcctaacttctatgattctttctttatcattcacaaggacaaccagactttgagatttcttcctgacattgtttccttggtctcttccactggaatcaatatattgaaaatcggacaatgtcgatatttggtaagcatgctctctaatctcatctatgactcgctctgacccatgagccaccaagcattctagtactgtcaaagccttgtagacatgtcgccaattcttgccagtgtcattaattcgcttccagattactgacatgatcatctggtattcatgagggtttctggttgcctgagcaatatctgcaagaagtgatccatgaggaccccatggttcattgctggtagcatcaagaaccttctgttcaatcccaggaactttcagcactttcttatttacttctcttttaaggtccctaacagtttgaccaataaccttcttcattattgctggatttcagcaaaagctacaaaccaacaacaagggcacgaactgatccaaaggggacaaacaaaatcgtcggcagaaaggggatagagagagagagagagagagagattgcaaatttgcaagaactctctgagttgttgtgtcccaaacaacaataataatagtattacgttgtgacagaagaaaacacacacaacacaaaaacgctctctctctacaatttcggagttaatcttaaacggaagcataaagctcgagccgtgggtcgacccgggaatccggaccg

SEQ ID NO: 98627 - DNA, 267 bp, Glycine max
  Clone ID: PAT_MRT3847_60073C.1
ccttactgtcacaactcacgaattctcgaaatgctttctttgatctttataaccagatgctctcacagcctttctcccacaaccactacaccttcacccacgccctcaaagcctgctccttccacaacgcgcgctccaaagccctcgaaatccacgcgcacctcgtcaaatcggggcgctacctcgacctcttcctccagaactcgctcctccacttctacctcgcccacaacgacgtcgtctccgcctcaaacctcttccgatcca

SEQ ID NO: 98628 - DNA, 1546 bp, Glycine max
  Clone ID: PAT_MRT3847_60074C.1
acgcgggattgccgtggatctcgtggtgggcctcaaggagtgctcattgctgaacactggattcagaggtctgctgtggtactcatgatcagtcctgactcgataatggaaacttattttcaaggagtgcgatccattctgcattatggccagatagttcaggagaaattaattttcaaggagaaggatccgttctgcattatggccagatagttcagtacagcacactagccccactgtggaatgaacttaagttatcctgtgactttgcgaaggcacgtgaagaagttgaccaattcaatagtcacaaccgctggaggaagcgtggcattgctatgattcctaataagtttatacggatggaactgttttagttacccatgggggtgtggaaatggggcaaggtttgcataccaaagttgcccaaattgctgcttcagctttcaacatccctcttagttctgtcttcatatcagatactagtaccgacaaggttcctaatgcttctccaacagcagcttctgcaagttctgatatgtatggagcagcggttttggatgcatgtgagcaaataatggaacgcatggaacctattgcttcaaagcataacttcaactcatttgctgagctagttggtgcatgctatgcagagcgaatagacctttctgcccatggattttatattacacctgatattggttttgattggacgataggcaaaggaaaaccttttagatatttcacttatggggctgcgtttgctgaggttgaaattgacactctgactggagattttcacaccagagtggcaaacatatttttggatctaggttattcgctgaatccagcgatagatgttggacagatcgagggagcttttatccaaggtttggggttgggtagctttagaagaccttaaatggggagatgaagcacataaatggatcccgtctgggtgcctttacacatgtggacctggagcttataaaattccttctgtaaatgatgttcccttcaaattcaatgtctcactcctgaagggccatccaaatgttaaggccatccattcatctaaagctgttggtgagcctccatttttcctagcatccgctgtgttatttgccatcaaggatgctatcatagctgcaagagctgaaatggggcgtaatgagtggtttccacttgacagtccagcaactcctgagagaattcgaatggcttgtttagatgaattaacatcgtcatttgttaactcagatttccatcccaaacttagtgtttgatactctgcttattcacttgttcattttcttgtgagtggtttccacttgacagtacagcagtttgtacaagattttgtgatgaagagaaatagacacagaaaataatgtttatgaattattgtatgagtaacacaactcttattatcaacaagggaatgctcacaatgtataagtcgtccaaaaacctagagaatctccaacttatgatgtagcaattgacaataaaagcaatgtcaacttactggctccatctcaagaaaaaa

SEQ ID NO: 98629 - DNA, 245 bp, Glycine max
  Clone ID: PAT_MRT3847_60075C.1
gctatgcaattgcagttgaaaccgctgtgtaagcacaaggaaaaagagagggagctcagtttcctgaagatttccgatttttcattatgaataagaacagcttttactatacgttagtttcctccatctcattcgactgctcttcttttggtggcaagtggagcagaaaaagattgtgtaaaaacttggaattcagtcgagatggctatggcagttcgaaatacaacaaatcctgaagaactgca

SEQ ID NO: 98630 - DNA, 165 bp, Glycine max
  Clone ID: PAT_MRT3847_60076C.1
tgtcggctgctagaagacaacagaaggggagagaggatggagtatttaatctcgcgccggatcgcataaggggcatactaaattctttatcccttttctcaaagcaaaggctttattatataccatcttcttattcagaccttcgatgtgtgcccaacacaaacg

SEQ ID NO: 98631 - DNA, 449 bp, Glycine max
  Clone ID: PAT_MRT3847_60077C.1
gaggacgacctaaaagcttgcaccctgtggtttctctctacagtattcctctcggtagttgctagtcccctatccttgcttttgattataaggatgtcttagctttgcgatctatcctcctcgttctgagaaactccacttggaagattagttctgacgcatatgggtccgtggatctggtgtggccctccgtacctatgccaatactctttctgtggcctcctatgaccactgccaggcccccacgtgggcctacgaaggctctggctctgatcaaggtctgtgggacgacgcagggctaatggagtacccacatgctattgccaatgacctcttcggtaaaagcaacgttctacttgagatctgcgacgtaacgcccccgctgggagccacttgcaccaatcgatgggcgaggctggctgtctttaagcctccctgacggcggggta

SEQ ID NO: 98632 - DNA, 656 bp, Glycine max
  Clone ID: PAT_MRT3847_60078C.1
gaaaggcgattttcttaaaaccgtctttgagattagtatctttctagtcgaatgagccttatcgtctcgttgtcacactcagtcttcatgattcaaagactgttcgcattcactcttctccttccaccggactttcttcttcaccacctcactttctgtcttcctcctctaggttacactccatctgagcctcttcccaaaacaaccttgcgtttcacaccccctctactccaaaccctacccttgttcatcgccgccattgccttcttcttcattcgcttccaccacacacccacttgttcctcacctcgcaccggaacgcgtggctggcggaggagaagtgcctccggcaccagattgatgccacgacggacgagatcacgcacctgtgtggcctcaacgaaaactacttctcaggtgagtttctcgcctcggtcgcgttcctccaccgcgtgaaggtcattgctctgtcgcagaaccatatctccggcgccattccggcatcgctgctgaatcttcgaccactgtacgttctctactagcaagacagcgcgtccaccggacgcattgccggtttcaagtagagcagcctcatgtattctactgtatacatcaacccggctctcgtgcaaattgccgggaggtcggctatggat

SEQ ID NO: 98633 - DNA, 655 bp, Glycine max
  Clone ID: PAT_MRT3847_60079C.1
cacaatacatcgtttggttgctaagtcaacagtggctaacatggagcaagaagaaaatgtaactactccataactctaaggggatcgagggctaactctcacatcctctatgtggggccatcgtgacacacgaggacatcaagataacacgacgatcaacaaacattctttagccaccaggattaattcaccatagtggagcgtcaaataagtgagatgacaaagtttaatgtgagagagcactatcccggaacctagtagataatgcaggattccatgcgaccccacctccttaggattctcggggccacgataacaattgattgaatgttggaagcggtgcttatttacatcgggaacctcgacaaagcgcaagaagttatgcaaatctacagtattgattttgtgactcttacatattttgagatgtctacattctgcgaaatgacgaacgatgctgtaccactggagctttcaaacactatcaatgttatcgtggacattatgcaaacccatctcaaattttgcggcaaatgcggcgtttataccaaaccctcgactatttatttgactgctgcacgtgctattaaggataaaaatgcgacagacaatgggtaatctatagaatgctttttttgcctatagggccaaccag

SEQ ID NO: 98634 - DNA, 249 bp, Glycine max
  Clone ID: PAT_MRT3847_6007C.1
ggctcgagcttcagttcacttgtataatatctatctaaactgagggttgtcatcactgcttagagtacttggagaatgatttggtgttaagtccccattattcatgtaggactattcctttttaacgtgtcacatgacgtgcacgtggctggtgctgtggaatttagtgacgctcctttagcagggaagtctatcgactatagcgtataatcgcttttcaatgcatgagaaaaaatactaacgggctga

SEQ ID NO: 98635 - DNA, 242 bp, Glycine max
  Clone ID: PAT_MRT3847_60080C.1
aacaccattaacaggcccagatggcggttgatggctcaggaatcaccctctcacgactgcagacaaagccggcactgctggcttctgaatcattgacggccctggaaccgtacaggattttgccaagatggagcttcaagaaattgcaggacaacattcgaagtcggatgaacaaaatcttcttacacatggaagacgttcgcaggcttacgatacgacatagaattagtaacgctgtactt

SEQ ID NO: 98636 - DNA, 409 bp, Glycine max
  Clone ID: PAT_MRT3847_60081C.1
cggttacttccgcccacgcgagcgtgcacacgagggggaacatgggtacatctcctggggctcctacatatgatccatatgctgggtatcccgtccagcccgtaccaatgcccactcttgctacaacaccaggacctagcacttatggtccggatcagaccaacacggattacctttcttgccacaccctgatcattggaaactgaacagagaacataggcgtggaacaacttcagggtctttagcgtgcccaacctggagctatacttctaaagagttcaggacaggagccgcacacctctggcgtcatgctgccggagaacacgaatcgctctgcaaccgggctgcataagttgcgggagcctgctctgcccatgagggcgctgatgggcatgcagattcacttttc

SEQ ID NO: 98637 - DNA, 348 bp, Glycine max
  unsure (1)..(348): unsure at all n locations
  Clone ID: PAT_MRT3847_60082C.1
taattcccgggttgacgagctcataatacttgcggccgcccttaatcacattanaggggggaaatttaaaaaagcatttggtttttaagcccaagagagcaaaacactttttcggcagctgggccaagatactgttcaactcttacttagaatcgaattacttatgacacaagtctcgaagtagatagaagcacctaaccatagacatgataagatttataacagctaagaaaaacatacatgtcagctaaagactacccccacaagtaaatggcatatgaaatttatcagtactcggcgaactctgcattcataatactatacaatctataaagtcaacaagagaaa

SEQ ID NO: 98638 - DNA, 229 bp, Glycine max
  Clone ID: PAT_MRT3847_60083C.1
ggccgtcctttttttttttttttgaagacaaaacatttactgttatccagaagaaattcatcctttaatgacattaacataagggcaaatggttcaccctgcggggccaatgggcgagctaagacttgatttatctatatgtacccttgatgcatatggggctgcagagacttaccatggactctatataacgaggtttttgacttgatatgatgtaataagaactcct

SEQ ID NO: 98639 - DNA, 522 bp, Glycine max
  unsure (1)..(522): unsure at all n locations
  Clone ID: PAT_MRT3847_60084C.1
ggacgcgtgggcggacgcgtgggcgttcgtttgggatcaaaatcttccctccgcgntttagcaatcggtagagagcgagacacggaatttgaaaattcatccaaaaactctccctctctacgcggcgcgaccctcacttcggcactccgcactgtctcggatcactcgctctctctgttggttctggtcatttctgatgtttatgaatctcacctaatgtgtgaatatgtgactttaaacttgttttgacaactggtctgtaaacaagattccaaaatttgataatactgtagctcataatgctagtaaatgagtgtcatatgcttgtaattttgagccaatatccatctactcaatctcatatgtaatctcaacatgctatttctttcatgtttctgcattattgctttcagagggactcattgcaggtaattgttgctcacatctttgcttcaagttcactcatttcatgacatatgataatatgatttgcgtgcgtgagcttcaccttccttcttttgg

SEQ ID NO: 98640 - DNA, 363 bp, Glycine max
  Clone ID: PAT_MRT3847_60085C.1
agtcctgccgtcagacctcctgacagggggccattagacgacagactggatatttggcggagcgggccactgacgaggtgaccctgattcccctatggttcgtgggaaccgcctgatcactatttacaaaaatgacggaagtaacgcacctatgcatacctgtatctatgttctaagggcgactacgcctaccataaagcctgactaacctaacggggcctatatcatcatctaagccagtctttgaaccaaaagttagatctgacacacctaatgagtccctctgtatgagaattatgaagatgatcgctgcctgggtcattttacactataaggttgaacctcttaacacattcatgatac

SEQ ID NO: 98641 - DNA, 591 bp, Glycine max
  Clone ID: PAT_MRT3847_60086C.1
ccacgcgtccgctttttgtcatgttaagtttaacatttggcgcggggctgtgttagtttctggatccgccacttcatccgttgattgcacagaattccctaccaatcgacgccaccacatccacgatgcgcctgcgcagccgggcaatctttgccctcgttcgcaccaccgccatcaccacgtcggccgtgtgttcgccgccggcggtgctgagcgtatgccacgcgctgcgcgagcgccggcgcttcacggaagacgatgtggcggcgtacgcggcggtcagcggcgaccgcaacccggcgcacctcgacgacgccgttgcccgcgagctgagcgggttccagcgaggccgcgtggcgcacagcatgctcgcggcatctctattgccttccgtcatcgccgcaagcttccctggcgcggcgtacgcgagtcagacgctcaagtttgacgcgccggtgtatgtcggggatgaggtggttgatcgagtgaaggcactcaacatcaggatgataggtacgacgaactgcagctcgactagccgatatctcggcaagttcgcaaccaagtgcttcatggacaaagaggagggct

SEQ ID NO: 98642 - DNA, 199 bp, Glycine max
  unsure (1)..(199): unsure at all n locations
  Clone ID: PAT_MRT3847_60087C.1
caaatatgggcacccatcagccaacagagtcgttgcgggacgcacctgagttgaccaagctgtagacactgaactatcatgcntcattgctatgatactagtcctgatatatcagctctatgctagagtgcgtctggtccataatgaagtggctctacgggccttcagcttcgggcacttgctgctggcactccatttt

SEQ ID NO: 98643 - DNA, 447 bp, Glycine max
  Clone ID: PAT_MRT3847_60088C.1
gccgcccttgttttttttctggactgcaaactctaccgacgttaaatcagatctgccataggggtaacgaagatggccaaagaatggatctgtcgctcgtggactacattgccggcaaacacatgcctaagtaccacgtgtgaaactacatgactctgctgctggcattgaacaagcaggagattccaagaaggtctcaaaaggccaatcgatgaaagtatagcgaaacctcctcttgtgaccacggtcaacaacatcggaaagaaactgcctgccattgagaggggacacacacgcctgccagatcattcacaggttgactgaaaacaaccccatccaaattctggtcgaggccatagccgactatggaccccaacaggattcaaccagagttggagctgcccgacatgtggaacaacaggcaggcgatgtgtaccaactcaaaag

SEQ ID NO: 98644 - DNA, 465 bp, Glycine max
  Clone ID: PAT_MRT3847_60089C.1
gggggaaggaggctaacctcagcttatattaattggcacaatggtgttggtgacaaaatcccaaagggaccactgcaggggataactctgtatgtaacaaaagttgcaacacaatggttgaaagaagacaagctatcctcacgctttgccagtttattcatccaattctctttttacaaatgctatgaagcggtttgcgctcggtgcctgagcgcaacagccacggtccttcccttgatgccaagtcttctgtttgtaggcggcattctcacacctcctggtttcagattgatatctccgctggaaaaacatttatcttgtatgggggctcctgggtgcctattcatacttgacaactgcgtgggaggcccttttcgctctatcaagtgtgaagtgacgaggcacctcaactacgcgggtcgcccctttgtttgtggtgcttgggttatcactcacaataatatc

SEQ ID NO: 98645 - DNA, 700 bp, Glycine max
  Clone ID: PAT_MRT3847_6008C.1
ggaagagttgaaaaaacaggaaggaccacgcgtccgggaagagttgaaagaactggaaggagagaaaggaaaggaagagttgaaagaactggaaggagaaaaaggtgaggaagagttgacagaactggaaggagagaaaggaaatgttgaattgaaagaacagaaaggagacaaaggaaaggaaaagttgaaagagcaggagccagagaaagcaaagggagaggaaacaaacctttttggacatgaagagaactctgagtcttttggtgtagaaggtgaagcccagttgcaaaaagaagatgctaatcctattaaagatggcggtgaaggaccaaagattggtgaaaattcagatcttggagaacaagggaaggtggagcttgttgaagatccagaagaaaaccctgaagaagatccagaggaacctccagaagaaacttcggcattggaggaggagcatagggaattggaggctattgcaaatcagcgaaagattaaaaaagaacatgagatttttgttggtggattggatcgtgatgctacagaggaagatctgagaaaggtttttcagaggatcggggagatagttgaagtcagattgcataataattcttcaacaaataaaaacaagggctatgctttttgtggagttttctgataaggaacatgcaaagaaagctttgtctgaaatgaagaaccc

SEQ ID NO: 98646 - DNA, 201 bp, Glycine max
  Clone ID: PAT_MRT3847_60090C.1
cccaactctcttcttctattccaaagacccttttgaaggaatcgatggagtttcagtctcgttccagatgctaccctcttccttgcctaaccaatcttttccttggaccctttcaagcttaagcttaaatttaaggcccttactgccattaggaggccggccattctggggaagggtccggaggtggaatatcgccagacc

SEQ ID NO: 98647 - DNA, 475 bp, Glycine max
  Clone ID: PAT_MRT3847_60091C.1
tttttaaatttgaaggatttgttgatcttcatataaatgcaatcacatgaataacactcattaaagcatgaaattaaatttcacaataaataaaataccagacaaagaagatttgaaagagtgaaaataattatcctcgcatcttctgggtttatttaacagatggtaaagacagaaaatatacaaaaattagatctagcaaagaaaatgtcaacggctaagtatcaagaagaccaaccttaaacctcccaagaaatgtcaaattccttgttagacgtcagaagcaaagcagcaaggtttggattattaacttgatttagattattagacttgcccgttgctaccaatgattcaaagttagaatgtaaagcaacacaagtgatctagttttttatttaaaagaaaagaaaagtaactagatacccactgctaaagcaatgtctaaaggattcccctttgggcttttgagaactta

SEQ ID NO: 98648 - DNA, 651 bp, Glycine max
  Clone ID: PAT_MRT3847_60092C.1
tgacttcactctcattatttcagttcttcccttttttttcttacttccattattcccggtcctcacattcacgaccagcataattgtacatttttccattgccccggcaacgttggtgacgagtgacgaccctttgagtagcttgggcaaatattttggtcaacaaatatttttctgcaatatcagtgttttccattccatatcaaatttcaatcctttaggagtttccttccactcagatgtagctactagaatggacaatcagaagggaatgagtattagttttgagacattcacgtggaaaattgaaaatttctcaaaacagaacaccaagaaactacaatccaagactttccgaatccgaggttataaatggcggattcgtttgtatccattaatgaagaatgttgaccatttttcattgtatttgatggttgcggattctttacctccgtatggatggaacagaaatacgcatttcaagttggctctagttaatcaattggatggcaataagtcagttgtgaaggagactcaacacgaattctacgggggatatcgtagctggggctcactttttgtgaatcttagtgacttctatgactctaaacaaagctatcttctgaatgacacatgcatcattgaagctca

SEQ ID NO: 98649 - DNA, 182 bp, Glycine max
  Clone ID: PAT_MRT3847_60093C.1
gaccctgatttggagcaatggatgcatgaaccttaggctcaagtgggaacatttctaaaccatttcattttccttacactcttaaagtcacagcgtttagaattgatatcatcatacgcagtatgctgtttcatgcatatgcagataagaactttgatgaggtgtggaagaccacttgtatt

SEQ ID NO: 98650 - DNA, 243 bp, Glycine max
  Clone ID: PAT_MRT3847_60094C.1
gttttaaaagggttaaaaattggtataatattatttattacatcgagaagtttttttttttttatcctttttctgagcattttttcattcttcattatcaccagatatttttattggacaaaagtgaccctgtaaaggaattaaaagatttaatcctatatccattcctcttataaacactctaattttattaagttcaggggttacattaacagtttcacatcactttataatattaggtca

SEQ ID NO: 98651 - DNA, 560 bp, Glycine max
  Clone ID: PAT_MRT3847_60095C.1
tctggctcccgtggttggtactgtggaaacattccttgggaggccatggaaggagtactcaaggactgtttatatgcagtctttcatggatagtttgatagctccggctggttggcatgaatggaatgggaatttttcactgagcaccttgtactacgcagagtatgataacacaggtcctggttcaaacactgccaaccgagtcaactggcctggctatcatgttattgatgctactgatgcagctaattttactgtctctaacttcttggttgggaatgattgggtgcctcagactagcgttccatatcagacatcattgtaataataagtcactttacttggattggaatgcctgtcatagagtatgtttaatgtgttgttccatatcatctagctacaataagtgataaatgtggaggatctgataaaagaaggagtgaatttgtcaaatcttttaacacgaataaattgttaatcgcacaatttttttatcagttgttagtttttgttactgaaaaatattgaaattcacaccctctcccttccttctctcttta

SEQ ID NO: 98652 - DNA, 554 bp, Glycine max
  Clone ID: PAT_MRT3847_60096C.1
ctgctcgaggaaatccgtgtactggctgatccataaacttgctggaaggtctgcaaccgtaggagcgcatattaccgatgctaattgctttgtcattcgctcagaggcaggtcatagatgatacccaacttacctcgggcagtaggagctgctaaagggcgacttcaaagataagatggctcaattcgacaatcgtgctctcatggagatcctttcaactgtatgacatactgatgatgataccattgctgctgaacgcttttcagattctatctaccaaaacacagattcaaaccatcacttggaagaaaactctgaggcatatactatgcttactaatggaactatggattattggatttgatatgttaattaccgtttgattgagaccaccactcagggtgctaaatggccttgggcggccgtccactaaggaccatgaagaccgggcacgtaatgccagaccgggacctgcgctcgaacaagctttccttgagccgagtcagctgactgttcgtgataatgactgtcgtatgtccagactcgctgaaata

SEQ ID NO: 98653 - DNA, 389 bp, Glycine max
  Clone ID: PAT_MRT3847_60097C.1
gggggaaggccgaggcactgaaaataaggggggttttttaacggttccaaaggttggtgggtgttggatttggattccactttttggcctttttactgggagggccggtcgaagcacgacacgccttttttgtttcaacattaaaaagggatatggcttgcactaaaccaggaaaggatggatgtggccatggtttccaagtggccaactccggacatggaaccaccgtttttggccaaactaagaataaggtaaaggtttgttgccggggaaattttttacacctggaaggccaaaactgagcattttaagagaattaattcaaggactggggtcccttataactttatgcttttttttgacgatgataataataccatccaaggggc

SEQ ID NO: 98654 - DNA, 1384 bp, Glycine max
  unsure (1)..(1384): unsure at all n locations
  Clone ID: PAT_MRT3847_60098C.1
gcttgtggcagtagtgctcaagaaactagaaagaaaacaaacaaacaaacaaacaaacgaaaccctccctctctatatatcattcccctctcttctctttcgtttcgtcttcgttgtttctctctctcatttctcagccatcacagcctcgtctcaatttctatcttcctttgcgccgctccatctaatcacagatcgcaaaaatcaaaatcaggtactgcagggttgtgaaagctagatactaattagatcgctgattcgaagaaagagaaacaaaccatagtactagtactcttttttattagagatttcatctaatataatatggtttcacgatttaattaatcgcagaagctgccttggtgtgtgagggacgagagaaagagaaaaggagagagatcggaaaagatgtcatcatcatcgaattcgccgtgcgcggcgtgcaagtttctgaggcgaaagtgcacacaggagtgcgtgttcgcgccgtactttccgccggacaatcctcagaggttcgcttacgtacacaaggttttcggcgccagcaacgtggcgaagctgctcaacgagctcagtgcggcgcagcgagacgacgccgttaagtccctcgcgtacgaggccgaggctcgtctccgggaccccgtctacggctgcgtgggcctcatctccgtcctccagcacaagctccggcagatccaggtcgaactcagcaatgcaaagaaagaactcgcaaattatattggtccccaagcactacaaggaattcccgctcccatgctccaacaacaccctaacaacccttttcccggtgccatgtatgggaacatgccgactgcgacggcctccgttcacggcgggcagttggtgattcgcgacgcgcagccggtgcctcaccaccaccaccatcaccagcagcagatcttggaggcgcagcagttggctgctgctgtggcggcgagggaacagcaagagatgtttaggagttacgaacaccaacagcagcaggagtttctaaggttcagtggtgggttcgatgtgggcggcttcttctgcggtgggttcagccaagtgtccccagctgctgcttctgctggagtgttgtctccttagtttggctttgggtgtattcgataacgcttctgacatgcaacagcaaccacagcaagggggctctcaccaccatcatcatcctcatcacattcctcttgcggctcagctacttctccctccgcagcagaagcaacaaacccatcatgagtcacaacttccccttcaccggcaacattctgagagcgaggagtgtangaantgttggtccattcttgttgattttccaattntgcagctctgcgccttttttgtgttttgagtccaacaattt

SEQ ID NO: 98655 - DNA, 545 bp, Glycine max
  Clone ID: PAT_MRT3847_60099C.1
ccagggggagggtttacatatatatttaacaagtttgcatacatgacagaactccaacataaaaaatagcctttaacatgcaaaaaaagaaacccccgagtcaggtctaaagacaaggcacaggctccgtagcaggggctgaggatccaaatcccgcacgggcttaaaacgactggaaacaaaaccctgaatgggtgtcacttaaaagtcaaagtctatgcaaatttttatttggacatttaaaagattacatacccattccaacagtttccctaggcctggggacccaataagttatacacacactctggcacttgaaggctacaacacaggtgatctctggtaagtttcccacagtgagacccccccccccacaaggacaccttggggcacaggcccagggtgagggtaggggacagctgcagtggaaccttccctccagattactaaatcaggaaaagcagcatggttcttggggtttcctggatgcatggccaaggactagttgctcacaaggcaccctgagggcagccatgagggtccag

SEQ ID NO: 98656 - DNA, 347 bp, Glycine max
  unsure (1)..(347): unsure at all n locations
  Clone ID: PAT_MRT3847_6009C.1
tgagagagtgantgagatagagagagacgnttcgcaaatctcaatcgaatntcaganaaatgagannnatcatnagcattcanataggtcangccgggatccangtcggaaactcntgntgggaantctactgcntcgaacatggcatccagnccgacggcatgatgccttctgctccaccttcggtgtagcccacgangccttcaacaccttcttcagcgaaancggatctggnaagcangtncnccgtgctgtcttcgtnganctcgnacncagcgtcatngangangnccgctgnggaacctaccgtcaactcttccactncgancaactcatntcnggnnagg

SEQ ID NO: 98657 - DNA, 317 bp, Glycine max
  Clone ID: PAT_MRT3847_600C.1
gatttggggaagttggtaatttattactgttaaggagaccatgagtgccaagtatttagtgtttacaggatattttttaggttgatttccttccctcctgaaataattgttcatggtgtttcttctctttggtcaaatttgaatggtcgttatctatgattcagttttcatgcatgccttttgatggcatttcaactcaccaagcttataaccttcatctttcatgcatttttgggcagtgtcaatggattggtattgtagatatcaaatactcatatgtaaactatttatttgtttcctcaagaaaattaaattgt

SEQ ID NO: 98658 - DNA, 624 bp, Glycine max
  Clone ID: PAT_MRT3847_60100C.1
ccacgcgtccgatttattaagatagatttatgaagaagggaagggtagctggtcttgaaagctcttacgcttgtggcagtagtgctcaagaaactagaaaacaaacaaacaaaggccttcctccttctctatatatcattcccctctcttctctttcgttttgtctctctcatgtcaatttctatcttccgtcgcgccgatctattcacagctggtcacaaaaaataaaatcaggtactgcagggttgtgaaagctagatactaattagatcgctgaatcgaagaaagagaaacaaaccatagtactactactaattttgattagggatttgatctaatataatataatttcacgatttaattaaccgcagaagctgcctcggtgtgtgagggacaaaagtgagtgagagagagagagagagaagaggagagattggaaaagatgtcatcatcatcgaactcgccgtgcgcggcgtgcaagtttctgaggcgaaagtgcacgcaggagtgcgtgttcgcgccgtactttccgccggacaaccctcagaggttcgcttacgtgcacaaagttttcggcgccagcaacgtggcgaagcttctcaacgagctcagcgcggcgcagcg

SEQ ID NO: 98659 - DNA, 441 bp, Glycine max
  Clone ID: PAT_MRT3847_60101C.1
gaagaaagtaaaaaaaataagaataataaaagataaagataagtaaaagaatgaaaaaaatgaaaaaaaataataatattaaaggagaggaatcgaaacaaaaaaaataaggatgaatagaaaagaaaaaagaggagaaaaaagaaaatagaaaattgaaagggaggaaagtgagataagaggaggggaaaaaaaggagagaaataagatagaaaaaaaatagagagagaaaaaaaaaaaaaaagagaggaaataaaataaatgagaaaaaaaatataggtaaggtcatgaaaaggatgatgataggtggagagtaagtataataatgtttgagaagattactggaaagccgacttaatgtggaggaaacagtgacaaaaaagagtagaagatagaaaaagacaagattaagatgacagcaataaaggatagagaagtaaa

SEQ ID NO: 98660 - DNA, 542 bp, Glycine max
  Clone ID: PAT_MRT3847_60102C.1
ttgccgtgctacatgtgtaggagtaccgcctgcttggggggggggggggggaaggggaaactaagagaggctggcagggtaggattggggaagaggtaagactaactaaagaaaggtggataaaccaaaaatgaagtactgaggttaatctgaagaaaagtaaaaggaaacaaagtgtaaaaagactggttgagacttaaaagggataatggctggtgttatgaaaggtaatacaaaaagaatttgacaaaaatagggtattagagagagggtaaattgagggcaccaagttgtgccgccagagctatagccacgacggctgcgatagtggcacctatgttatgttagtaaaatcacgtgaccgaaggagacgcatcggggtgcggcaatgtgaataactgattagaccggtccgtactaagatttataaagacacttgtgcgcgttccctgaaaccagagcttactaagtgtcttaaagacagtgagtgtggcattggcggtagaattacaagcgcacgtaaaaagagcgataaacgtgct

SEQ ID NO: 98661 - DNA, 263 bp, Glycine max
  Clone ID: PAT_MRT3847_60103C.1
acactatgaacaacagctaaacggttctaaccaaatatcactaatatctctttataataatcaacaataatattaaattcaaatcacttttatatagaataatgacttaaccaacacaattcgaaatgctacatctaaaaacatatcttttcgcgttaccacgagtaactactctatggaccgaagccttgtctgcactcttgatagagatcaatcatttctttccaaattcattcatattcccatttttttcattctattta

SEQ ID NO: 98662 - DNA, 382 bp, Glycine max
  unsure (1)..(382): unsure at all n locations
  Clone ID: PAT_MRT3847_60104C.1
agggncacgccttacattctttttttttttttaaaaagggggaaaaatgtcactcaaatcttcattagttaccgtgtctaaccacggagaaagctaaattctcttggccaaaataataatccaaactactttcggtgacacaactgatctgtacttttttaaacaaaaaagttcagacaaatgaggtgccataaaatgagtaaatttgaccttattcatcaggaaaacataccaaaaagttctttttcatagtaagaacattgaatcaatttttccccacaatggatgcttcgggctaaactattattcagctgcttcaacctgcaaaaacgtttccgttggtttcattttttccaaggaaaaaattacaccttccagcaat

SEQ ID NO: 98663 - DNA, 377 bp, Glycine max
  Clone ID: PAT_MRT3847_60105C.1
ccacgcgtccgttgagccaccctttaatcttcaaaagggcatctttgacacactccttcgacgcattcaatagcgagggcaagggcctgatcacccacaacagactttcttactgggaggggtacaaaccgctaactggggagaggtttttctttttcaaccattattccatgtgcattccacatgataaacccatcctttcttggggaagctttaatgtggagctgttcattgcttttgagactttttatggtcccttccttaacattgctagataagcattgcaatttggcctcacaggaagtgctttaggagcattatttactgcgtgcgttaccatgaaatattcaaacagttaacatggggcttgactgtca

SEQ ID NO: 98664 - DNA, 495 bp, Glycine max
  unsure (1)..(495): unsure at all n locations
  Clone ID: PAT_MRT3847_60106C.1
gcgatatctcattttacaaacagaatagttgcattgattgcacaagtatacacactcaatgattttttactgctcaaaagagaagagggagaagagatatgtcctttgtccctaagagaaaatccaagcaaagtccacatcagaagaactctacaagacacaaccaacacacctaccacagttttccccacaaatccaaccccaccttcacctgtaatcacacctccagatacaccaaccatcatcacagttccttccaccaatcctgtcacggtttcccccaccaatccagcttcaacacctgtcacagttccttctaccacaccagttgttcccttaccccctacaaatccagccaatccagttaccaatcctgtggcctcttatccaccaccatcatcaggaagtgttcctgtcacaagtgcactgctctctccaagcacaaatgctcaagccatgccagcggggcagagttggtgtgtggcaaagacggnt

SEQ ID NO: 98665 - DNA, 1079 bp, Glycine max
  Clone ID: PAT_MRT3847_60107C.1
gagaaattgagaagatgggaagaaaggccaactgtgacaatcaatatgctatgaacagaggtccttggtctgctgaagaagacaaaattcttatgaactacgttcaagtccatggagaaggaaaatggagagagctttccaaaagagcaggcttgaaaagatgtgggaagagttgtagactccgatggctgaattatctcaagccagatatcaagagaggaaacatttcttcggatgaagaagatctcattattagactgcataagctcttagggaatagatggtctctaattgcgggacgcttaccagggcgaacagacaatgaaattaagaactattggaatacttatttgagaaagaaggcagagcacaagcatgacaaaattcctagccataacgataacattcctatcaaattaagaattgaatctccgggttgctcaaaaaattcctttggtaatgttcttgatcctacaaaatcccctcacccaatgaggtgtaccaaggttatgatgccagtcaatgattcagtcaacacaacgaatttgattacaacgagctgggacaatcataacccttcttctgcatccatgcaactagatgactataatcattgcttaacaggtgtcctccaagaatttgacatcagtgacttgttaatgtcgtatgaggatgattttcgttttaatggatatgcttgtgtcgaaataccccaacatatttttgaagatgagacttgcaggcttgatgattcgttgggtgaagaagcatggtatgagaattggaagaatgacccctattttccacaagatcaagatatgggtttttcttccttttaaagtgtttaaaatttaggcacattaccttaaagtgtttttagtattgttctttaatcaaaattagaatttcattttagtatcatgtgcaattaaggttgacatgaaatgttggtactaagatgaaattttaattttgaatcaagaacaggtctaaaatcccttaaagtattgtggctaaatagtctccttttaaaaaactgaacttgaatgaaatggttgaggatgttaaattaacaaaaa

SEQ ID NO: 98666 - DNA, 794 bp, Glycine max
  unsure (1)..(794): unsure at all n locations
  Clone ID: PAT_MRT3847_60108C.1
ggtccggaataaccgcgtcgacccacgcgtccggtgtgatctaatattatgttactacttgcaaacaaacaaacatctttttgtttattggaaggagtcctggcaggttttgtgtcggaangacaagggatccataatcattttaactaacatgtagatgttactatagatgttagatgcatgatcattttaactactgcaaaacctaaaacatgattcaccataaggtcatgatggtagaaagaatcaactggttgtattgtgtgtcatctcagagataaaattaatcatcaatgaggatatgactttaattctactctcagataaaagctttgtatgatgcaaaattcaattttaaaacaacaaggctttccaagaaaaagagttatcttgttcaaattgaaattattgcaactctttccaatcctcacaatagaaagaaagagtttcttattagttataacatttattgattattgactataaaaaaaatatgtaaagtttttttttggaaggcaaaattaagaatattattaataaactaaacagtaccaggggtactgaagatagcaattacaaggcactaggtgccaccttccaaaaacagaaataacaaaaccccaacagagcccctcacaaaggacaccaatacagatatcatttaaccaagggccttcacaagattggtagaccagtggttataagatgtattgaaacctttgtctccaacttttagccaagaccaaactaaaaataatgcatcctccaaaactttctgcggttcaaaaagagtg

SEQ ID NO: 98667 - DNA, 254 bp, Glycine max
  Clone ID: PAT_MRT3847_60109C.1
ttgttacagcttacacaattaataaagatgagtttgaagaactgcatattagttctaagagcgtcgtgtgttgctctcatttacttgtaggggctacatgctgctcgcatggaactcagcttctctaatagtgatcagtcattataatatgattatgatgactattcataaccatgctgagaactctgaatgatcacacgctcaatgcctgatcacatgctctatgaatattttatgcatgatattcatgatat

SEQ ID NO: 98668 - DNA, 426 bp, Glycine max
  Clone ID: PAT_MRT3847_6010C.1
ttcaggttcatcaaggtctcccccttcccccccaatgggtagtggacattttgctaaaaaggtttttccaaaagcttcatattttaggaacatgcaagttgtggattgggacaacaacttgattcccttgtcaaatttaaaggtcctagcagatcacccgaattgctatgacatacaaggaggggttaataacgcgtgggggaattatttttactacggtggacctggcagaaatgtaaagtgtccctaagagaatcaatattgatatagaatttataggtagaggtgaaccctttattttattttttagtatctttttttatttctttttggcatttatgggtttgggtgataggattttgttctcaagctcattcaatgaacttgggtcatttatttttatattgaattaaggttcttaataaa

SEQ ID NO: 98669 - DNA, 459 bp, Glycine max
  Clone ID: PAT_MRT3847_60110C.1
cgccgttttcgcgtgggtttggataaaccgcgatcacagggtgccgtaccttaaaaccggaaacaaaggcaatcggtacttgatttcaagaatgtctcaatatcttcctacttctttgtgtacgatttcataagggaaagaaaagcactctctgtgctggccacagacttcgtgaatcatttgattttccactcttagcttatttgctgaacactctcctatttgatataggacttcgtgtcagatttaaacttcttctgactctctctcagatctgtggctaaatacaaggacaagctggtgaaatcttggattaggactcccactgtcctatctggtataggagttcgcggggagaactttccatgtaattcctttcttttactcctctttttctcactgatccggattgtcgttcaaagtggccttatttgaaaaacacttgggcggaggggcaaa

SEQ ID NO: 98670 - DNA, 825 bp, Glycine max
  unsure (1)..(825): unsure at all n locations
  Clone ID: PAT_MRT3847_60111C.1
gaattcgagctctgtacccggggatcctctagagtcgacctgcagtaatgatgaaagcacacaaaaaaaccatccaacaaaggtgtgttgctatcttccaataattccaatgcttaagtgattctttgctaatggagacaacataaaagaccatatgtagcatgcaaatggaagaaaaggtgatgaattgctctagcatccagttgattctctccagtggaagataattgatcatttgtttccaaatttcgggaaggagacaagaaaccttaggcttggacttgcttgagatggaataaatccttttggtaacttaagcactaaccatagtttgtggcctgttttgctaatgatttacaaccagcctccttggttgtgcatgaagtgacaatacattatgttgtctctggtgatagagggtccaagaaaaccaagaaatgacattgatgtctaaattagtctctttattgaagtcttgagaaggttatgggtagacaaggttgatgtgtttgatgggaatcgacaagagaccttcaagttgtgtggaacggtattttataccattaatgactttctagcatataggaatttgagtggatatagcattaaataacattatgcatgccttatctgtgaaaaagagacaagctacgtccaactgaagcatggaaagaagatagtctacactaggcataagagatttcttaaaccctatcacccgtatcaatgattgaaaaaatgcttttaatggaatacatgagcatgaaagtgcaccgaaatccttagctggaaagaagnttatgagtaggtgaaggacatcctaac

SEQ ID NO: 98671 - DNA, 304 bp, Glycine max
  Clone ID: PAT_MRT3847_60112C.1
catctactattatataggtgaaagcaagaaggctgttgagaactctccattcttagagaagttgaagaagaagggatacgaggttctttatatggtggatgccattgatgaatattctgtcggtcatcttcttgaatttgagggcaataagcttgtttctgcctccaaggaagggcttaagcttgactatagtgaatatgagaataacaagcatgaagagttgaatgacatacttgacatcctttgttaggtgatcaacgatgtcttgggtgacaacgtacacaattgtaaggactctgatcgc

SEQ ID NO: 98672 - DNA, 344 bp, Glycine max
  Clone ID: PAT_MRT3847_60113C.1
ccaaatttctggctcttagtggctctgctgctggctggatccttattgtcgcctcatccttgttctggtatattggtcgcacgcaaaagaccaaaagcctacgagcaatccaacttccctcagatgaaaacgccaaactcatggcggaccatgtcccagcttcgttgtacttctccgatgtctcctacacactagagggtcggcagattctttcagaaatcgttggtggagcacaaccgggacaagttctagcgatcatgggcgcatcgggcgcaggaaagtctacccttctggacttgttggcccggaaacagaaacgtggcgcggtcactggccaaatactg

SEQ ID NO: 98673 - DNA, 395 bp, Glycine max
  unsure (1)..(395): unsure at all n locations
  Clone ID: PAT_MRT3847_60114C.1
ccggctcgacccacgcgctcacgtacggggctgtcgagaaganncgacagaaggaggtagcatgcggacttcgtctgtcaatgcatatcttgttggtcgacatatgcgatgtcgtgatcgagagtgagtacagctttgctaaccattggatacaaatgtctgcactcttcacctatgaaacgcccctccattggtgaggtttcgcaaggtatattgaggattaagctatgactcctcatgaaagaacagccgatgtcatttgcatccagcaacttctctcgaactgtgagtcaaatagacgagtgtcaggttgagctatgtagcatcatcatcatgatacacagggaaatggggtgaactcagtcagatgttctggggcgattttttttttcggt

SEQ ID NO: 98674 - DNA, 260 bp, Glycine max
  Clone ID: PAT_MRT3847_60115C.1
aagctgacgacagatggggtaccccacatgcatttgtcaacgttttgactaaaataatactgaattgaaattgggcatttatacttcacgaccttaccaagaacaatatttttttgatagtgctttccgccgtaaatattttaatcatgcgtataaaagtttattatgatcaggcaagagaaaaatatttttaaccataaatatattttagaacattaatttgtagatgaatagagataatgtattttcactttgcaagt

SEQ ID NO: 98675 - DNA, 249 bp, Glycine max
  Clone ID: PAT_MRT3847_60116C.1
tcaaaacccatgtgtggaattcttcatattagacttttcctttctaaaaatgcatataggaatttcatcaagttgaagtatgaatgttatttctaagtaaccatatgcatctctgtgtttgtgaatgtgtcttatcactgtgtttctgtgatgacagtgggggtgggaatgattccaaaggaccaagtgagtcctgagcaggtagagagctatatggctcaagaaagaggcaacaggagagagcttcta

SEQ ID NO: 98676 - DNA, 469 bp, Glycine max
  Clone ID: PAT_MRT3847_60117C.1
agctgccaaagacctcaagcagaaccagaggttcttgcacaggtttgctgatgtgtttcgaagcattatacagatgacagtccagcaagtggtccgtggccagatcggaatacatatcatgcacagacatgtggcggaaactggcgctggtataagctgctctcagatgctcattcagattatttgtctattgaaaccactgggctgcaccctgtgccatttactgggaaagaaagaaaggggggcacagcagggattcatagtcacatgttcctcagtctgaacgccatgccttttcattccatgattctgcctgtctactatgaatgtgttacgattttgcacatccatgcatgattcccacattgcgatcatctcataggttttggcacaaaaatggaatgtgggaagcatgtgtccaaagtgccacacttgaagcggggacctagacataatgtgtgcttatcat

SEQ ID NO: 98677 - DNA, 228 bp, Glycine max
  Clone ID: PAT_MRT3847_60118C.1
tcctgacagaaagctcaatttattcccatcattactgctttgcaatcaatacaaagactattttaccattaagtacttactaggcaatgatactcacactcatcctttcttcatacatctttacgcaaaaaaaaatcatgccgtgacaaaattcttatttccaaggctcaaactttaaacccatgtgtgagaaggcactgcatgatgctttatcatgttgcgattggc

SEQ ID NO: 98678 - DNA, 152 bp, Glycine max
  Clone ID: PAT_MRT3847_60119C.1
aacggcaatggcggacacggtaacgctggcgctcggacgtcgccggcttcgcgccttggaagtcgtcgtcgccggagcaaaacgatcagcaacctaccgcgccgttcgcgatgagaaactccaccagctcctcggttcctccacacaacata

SEQ ID NO: 98679 - DNA, 418 bp, Glycine max
  Clone ID: PAT_MRT3847_6011C.1
acgagaatctattccactattcaccttttttcaatttttaaatcctttcgaagtaaatggacttgattttttagaaaatatataacattgaaaacaaaagaatgcaccttctagtgaatactctaaccaaggaaaatttctaaaccaacaagcttgaaatcgacaaggatgatcttcttgaccagaaagtggatacacatccataaaaaaatttgatatggtccaaactttatatacgttctacgaattaattccatcttgttgattagcatgataatttcaaactgataggtgttttctcgtatcacgtatcaaagtatcaatattaattttttctcgttcaatcctcaatttagaagtaagtggttggacaagttattctatggttgacactctaggttattctttcttcaacaat

SEQ ID NO: 98680 - DNA, 641 bp, Glycine max
  Clone ID: PAT_MRT3847_60120C.1
cccgggtacgacccacgcgtccgcggacgcgtgggcggacgcgtgggcggacgcgtgggcggacgcgtgggcggagtggtcgtcgaagcgcgagcaagcatcccaaaaccctagctcgcgttctgctttcgtcttttacatcaggatggagtctcaggtgaagcacgcacttgttgtcaaagttatgggtcgtactggatccagaggacaagtaacccaggttagagtgaaatttttggatgatcagaaccgtcacatcatgaggaatgtgaaaggacctgtgcgagaaggagacattctcaccctactcgagtctgaaagggaagcaagaagattgcgctagatggtttcttttggcttgcctccaaattcgaacaaaacagtgtgattttgttgattttaatggtagttggtggatgtcaaaggttttagcaccctatcttattgtctgtctttggtctatttttattcgaattatggcgtgaactttggatgatttgagtttaagcttcaaggttttagtatgttttggtttagtatatgatttgaatcatggcttgaattttggattaatatatatgatctggcttctatatggtgctattcctgcggaaaaaaaaaaaaaaaaaaaaaacacaaaa

SEQ ID NO: 98681 - DNA, 464 bp, Glycine max
  unsure (1)..(464): unsure at all n locations
  Clone ID: PAT_MRT3847_60121C.1
ctctttttgttttgtggatcacaccaaaccaaactggcagcagctacacaacacaacactcgtttcctaattccgcgccctaatgtctagtcttggtgaatagcatgattttatatgtaaccaaatgatcgagttcaatccttgcttgctgcttctaatggaatcaaattccatttcaaggtgatgatggtgaccttgttctttttccacacttaaatccccacgtgatgctcataggctctctgtgtcatgaggaagtgtccgaaataaaaaaattattcataaacctgtacctagcaacttgagcttttggacctttttgtcaagagtttatccttctgaagatgagtgccgaaaacgagaaaataaaaccaaagactgatattgaactctttctcaataatgctaaccagtgcgtttggaaaaaattgaataatgactcangtgcaggtgcaaatgcagcc

SEQ ID NO: 98682 - DNA, 632 bp, Glycine max
  Clone ID: PAT_MRT3847_60122C.1
cctctgtgtattcattccttctctctcactcatggctctctccgccaccttcgttaagacaaaccgttctatactaccatttcaccaaaattcaagtccaaaccatggtcgcataaaacagttgtgtgtgagggcttcagcaagtagcttggatgacgacgaggacagaacagttgtaaggaaagagaaagatgggtggaagatcaaattctcaagccagaaaccagcaactcccttgctggatacaatcaattatcctgcacatatgaagaatctatccttacaggatcttgaacaactcgctgcagagctaagggcagacgttgtacatagtgtatcaaacactggggggcatcttagctcaagcttgggagtagtggaattaacagtagctttgcatcatgttttcaacacacctgaggacaagattatatgggatgtagggcaccaggcatacccacacaagattctcacaggtagaaggtccaggatgcacaccattaggaaaacctcgggactagctggttttccaaaaagagaagagagcgtatatgatgttttttgggacagggcatagttctacaagtatatctgccggtcttggcatggcagttgcaagggatctattggga

SEQ ID NO: 98683 - DNA, 769 bp, Glycine max
  Clone ID: PAT_MRT3847_60123C.1
ctcgatacggctgcgagaagacgacagaagggacactcagctaacagaaactgaattaaaagaagctaatcacaaggttttggcattagaagtggaagtggagaacaaaaatcaatattgtgaagaattagagaccagatgcattgaacttcagctccagcttgaaagcatgacaaagaagtggtcagacaatgatgcttatcagaaagatgagccactgcaaactgactgggagataactgctgcatcagaaaagttggcagagtgtcaagaaaccatccttaaccttgggaagcagttgaaggcattagctgcaccaaaggatgcgtccctttttgacaatgccattgctgctcaacgtcatacagttacagacacaaatactgtccccctaaaagacatgaaagtgaaaaatcgatcttctctatttgatcagatgttggctgatgatgatactaaagcaaaggttagcaaagcaagtgaaagaggctccagtcccaccagcattcctggtttcaaactgcccctggaaaagattttacttttgaatggacttaaaggccaggatgacagtgccagtgttgattctatggccattgtaccagccaagaaatccagtggtcggaatttttggagaaggctatttgggagatagaaatccaagaagaaaacacagctttcgttgaacacatgatatgcagttctagtgttgatttagtacttgccgagacgggtaacagttatatcttctttgctataattctaatga

SEQ ID NO: 98684 - DNA, 355 bp, Glycine max
  unsure (1)..(355): unsure at all n locations
  Clone ID: PAT_MRT3847_60124C.1
gaagaagtattgcagtattatcctcaagggtaccatggagttgataaggaaggtaggccagtctacattgagagacttgggaaagcccatccaagccgcctaatgcacgccaccacaatagatcgatatttgaaataccacgtccaggagttcgagaggaccctgcaggagaaatttccagcatgctccatagcagcaaagagacggatttcttcaacaacaacaatattggatgtacagggcttgggaatgaaaaatttctcacgtactgctgcaaatctcttgtctgctgtgacaaaaatagatagcagttactatcctgagacattacatcacatgtatgttgncaatgctg

SEQ ID NO: 98685 - DNA, 267 bp, Glycine max
  Clone ID: PAT_MRT3847_60125C.1
ctggcgcagagcattgcaatggcgtccgagttccgttgccggcacatagcagaaccgtaaatctttctctctgtctctgcaatattttgcagaagcatgtgaaggatttgcacattgtttttcagttctgattcattctcgttgttttaatcgccaatttttttttatttgtttcgattttgtaaaattgtttttgggccgttccaatgggttctcagcaaatgctgtttgagatctcaatttcacccggccaacatctgatctcat

SEQ ID NO: 98686 - DNA, 1109 bp, Glycine max
  unsure (1)..(1109): unsure at all n locations
  Clone ID: PAT_MRT3847_60126C.1
attcccggngtcgacccacgcgtccgtggaatgatcctgacatcatgaagctggtacataatgaggaggcaacatttgtgaggcaaatcaccagaatgcccaatggtcaacatacatttgactcctatcaaattccccgactgaaggaacgaagcagtgatacatcaacagccgaatcagggtctgatatgaatgattactcctctcccaacagacacaggagctgtccttgtcctcatttagccccagttcatgaagaagttaaagcaccagatctcaatggctactacagttgtgatgatagtgctctagcagttgagaaagtgattgaaagtgatcactttcaccttaatcgagagcagccattgcaaactaatgatatagggaatgttgcttgtagaacagattcaggaggtattgtcatgaaattgttgaagaaataatatttatatgctatatggaactcaagttgcagatataccttgtcatatttgaatttggaagttggaaactcatggtacttatgtcaacagttggttcagcattgttaaggaaaaagtagagaaaataaatgtcttatgtgtggcaagagtgatgacatttttcatggaaaaactagttacactcttccgctatttaacattcgaattntggagaacacagaacaatgttcacccatcaattaccatggaacataacattaataactattcagcaactgttgaaacagcttctgaaagggatcatatttttcgatgtatgcaacgtcttgaaagactagaaaaaacgtttggggaacttagccacaaacctgcaggcatacctttggagaaggagcacatgcttacaaattccttggataggattaaatctgttgagtttgaccttgaaaagactaagagggtgctacatgctacagtgatgaagcagcttgagattgctgagctgctggagaatttgcaggcatcgaagagtcaagtaaattgcatctcgcaaagaaggctgttccgtcgaaagattcaagtttcggcaacaagttagagttgtcaacacctctgaagattaaattcaacagccaaaagattgaccttttgtttgtttgaatggag

SEQ ID NO: 98687 - DNA, 2851 bp, Glycine max
  Clone ID: PAT_MRT3847_60127C.1
tgaatttggagagctggaagaagtattgcagtattatcctcaagggtaccatggagttgataaggaaggtaggccagtctacattgagagacttgggaaagcccatccaagccgcctaatgcacgccaccacaatagatcgatatttgaaataccacgtccaggagttcgagaggaccctgcaggagaaatttccagcatgctccatagcagcaaagagacggatttcttcaacaacaacaatattggatgtacagggcttgggaatgaaaaatttctcacgtactaaagtagaaagaaacagagacggactcactagcttagtttctatatatgcgttatttgtctctgagtactttttctctcttgtgcattacctttgtggtcatggcagcctccgtggatcccctagtggttggtcgcgtgatcggcgatgtggtagacatgttcattccttcagtcaacatgtccgtttactttgggtcgaagcacgtcacaaatggctgtgacatcaagccatccattgccatcagccctcctaagctcaccctcaccggcaacatggataacctctacacactggttatgactgatcctgacgcacctagccccagtgaaccaagcatgcgcgagtggatacattggatcttagttgacatacctggaggaacaaacccatttcgcggaaaagagattgtttcatatgtgggaccaagaccacctattggaatacatcgctatatctttgtgttgtttcaacagaaaggacctttaggtcttgtggagcaaccaccaactcgagcaagcttcaacactcgttattttgccaggcaattggacttgggacttccagtggccactgtctacttcaactctcaaaaagaacctgctgttaagaggcgctgaatctagctatattgtaaccatcagtgtctctcttgagatatgcatggttggaatatacttttaagatatcagaactatataaaatctatgactagtgcgtaaataatgcagggagagggtgtgtgtaaagtaatatagttgtccaagacatgagtggtgccgaccatttccccggctttgataactttttttctctatatatatacctctctttcactctatcaaatatataaagttaatctttattgtactgctgcaaatctcttgtctgctgtgacaaaaatagatagcagttactatcctgagacattacatcacatgtatattgtcaatgctggttctggctttaagaagatgctttggcctgccacacagaagtttcttgattccaaaaccattgcgaagatacagattcttgattctaagtctttatataaattactggaagtcattgactctagtcagttgccagactttctgggtggttcttgtacatgtgctgcagaaggtggatgtcttcggtctaacaagggtccatggaatgatcctgacatcatgaagctggtacataatgaggaggcaacatttgtgaggcaaatcaccagaatgcccaatggtcaacatacatttgactcctttcaaatgcacccactgaaggaacgatgcagtgatacatcaacaacagctgaatcagggtctgatatgaacgattactcctctcccaacagacacaggagctgtccttatcctcatttagccccagttcatgaagaagttaaagcaccagatctcaatggctactacagttgtgatgatagtgctctagcagttgagaaagtgattgaaagtgatcactttcaccttaatcgagagcagccattgcaaactaataatatagggaatatttcttgtagaacagattcaggaggtacttatgtcaacagttggttcagcattgttaaggaaaaaatagagaaaataaatgtcttatatgttgcaagagtgatgacatttttcatggaaaaactagtaacactcttccgctatttaacattcgaattttggagaacacagaacaatgttcacccaccaattaccatggaacataacattaataaccattcagcagctgttgaaacagcttctgaaagagattatattcttccatgtgtacaacgtcttcagagactagaaaaagtctttgaggaacttaacaacaaacctgatggtatgcctcaggaaaaggagcaaatgcttatggattccatggatagaattaaatctgttgagtttgaccttgagaagaccaagagggtgctacatgctgcagtgatgaagcagcttgagattgttgaattgctggagaacttgaagaaatcaaactgccgacaaagaagcctgttctgttgagtcatctaaacgttcagcaacagaagtccttggcaccacagaagatatttccatcaaagagaagacttcgtgcaacctcacacctagattggaccataggaagcatgaggcaacggagttttggtagagcatacatagaaacatgacgaattgggatgatacacagtccactttgttttatatctaataataataataatatgatatataatatagttttcctcttgcatcttttgtcttctttcatagtaaataagtgtaaagaaggtgtaattatgcatggatgagatgttctaataagtttaagacagttttgagaatagaaaaaaaatagaaaagtttctagtgcagaaagtttaaaaaatcctaacctgtgttacgtgtaaaggattttgaaaatgttttcacagacattggaatgataagtcaccagatgggtgtgacagtagtctattttccctattggttcatgtaaggtttgttgagtactcaaactggcctggttatcacaaataaaactcaatgaactggcaagc

SEQ ID NO: 98688 - DNA, 308 bp, Glycine max
  unsure (1)..(308): unsure at all n locations
  Clone ID: PAT_MRT3847_60128C.1
acnnncnngangacccaagggagagggaaactttgtgcttgagttgaactttaaaccgtttaatatatccttacctaaccaaactttgaacaagtccactggaaatggcatcaagttcctcaaccttcaacttttggaacaattcttccatgacaaggagagcatgctacctctgtttgattttctcaagcttgacagttattaggaaaaaatatatatttttttttcataaacttttttaaattaaaactattgtttgggttgtgttaatttttaaaaaaataaaatcttttaaaaattaaccattt

SEQ ID NO: 98689 - DNA, 754 bp, Glycine max
  Clone ID: PAT_MRT3847_60129C.1
cagaaatgttaatttaagtgaagtgaatacatgttttgaactttggtactgatttgtgaattgtgatgatttatttcagggacagaggctctttttgctgaccttgcacactttccagtctcttctgtacagattgcatttactctgctagtgtttccttgccttcttttagcctactctggacaggctgcttaccttatgcataacttggaccattcaaaagatgcgttttatcgttctattccaggtttgttatatttgtcacactctatattggaatttccacttgtaatacacctgtgctgtttagaatatgatcaacaaccatatattgatactagagtgctatcaacactctttttaacacacattccactattggttgtaacttgtaatctattgaaagctataaaatttggaaaaaatcattaaatgagaagttgaatccattaaaatttaagatttctaataaattttagcagtaaatagtgtattagagagtatattgctagtatttttctttctacattcttgtgataaacttcttggtggaagttttcacttttatttctcttttagctattttatgttgactaatgttagagatgttgtaaaaatatgaaactccttcaagtttgtggtgaaattatggttttagattattttttctttgttgttaagggtttatagattgaggactttggacaatagtaaaggacctcatttgtattacttgtggtatgatactcaagtg

SEQ ID NO: 98690 - DNA, 272 bp, Glycine max
  unsure (1)..(272): unsure at all n locations
  Clone ID: PAT_MRT3847_6012C.1
tttttatccacaatgacattgcatataacgggggggtattatatatgagctaccggnccggagggcagttaataaaaatggacccttttaacgccattacattgttcattaagggaccttctttttcttttttttttggaaaaaaaaataaccccccgccggcgtttttcttcactaaaacaaaccacccccccggggcctgccttttttacctggccacaaaaaaatatatttttatatgccaagccggtttgccccccccttctattttt

SEQ ID NO: 98691 - DNA, 172 bp, Glycine max
  Clone ID: PAT_MRT3847_60130C.1
atcattgaaatttcctttgaagtatgatcaacgtattctcagtaactcccatactgaaaactattaacataagttagtgttttttgctgcaactgtagctgttgaaaacttgagataatcggttttttggatacctaaacagcattcgacgggcgtaaccacaaaaagggaa

SEQ ID NO: 98692 - DNA, 207 bp, Glycine max
  Clone ID: PAT_MRT3847_60131C.1
cttttgcgttcggtgaccctaactcttggcttaattctgagcgagcacatggatttcatcatcatacaccgaatcgttcgtgtgaggggagttaataaacatagtgaaccatctaatgctcccaagtagaactgattattagctgcaacttttaaaagattgtgaatgatgcgattgcataaagaatggtggatagtgatagaatag

SEQ ID NO: 98693 - DNA, 316 bp, Glycine max
  Clone ID: PAT_MRT3847_60132C.1
cccacccgtccgaatattcaatctgggcatttataacttatgcccaaaattgaggaaaaggggggaagaaaaagggcgaagcttgcgaaaagataaaaaaccaaattgcttcgattcacaagggagcttgaaaaaaaaagccattattgggcgcagaaaaggggaaatatttttttagcggaggaacacactctacaatgtatagcaaatctgacacatctaaaaaaactctttggatgtttctaatgcttcaaatctcaagcattgtggggaaagaaaaagatattttttattgtgtatctttgggcattaaata

SEQ ID NO: 98694 - DNA, 254 bp, Glycine max
  Clone ID: PAT_MRT3847_60133C.1
ttcgcaggtcccggtccggaattcccgggtggcccaacgggtccgaccacccaagggcaccaacttcggaattcttcttctttcccttcttctgggggttcacacttgccataggcgctcacaggatttggattaactaccgggcgctcggggacaacctttcaccgcccgcgggggtggggaactcttctgggacccagaccccctcttccccggtagagtactaccgggaccgcgatctggggggttttcgg

SEQ ID NO: 98695 - DNA, 1008 bp, Glycine max
  Clone ID: PAT_MRT3847_60134C.1
gatttgtatgaacctggcaacaaggcaaagcgtcagatggcttcgaagacgccagtaattgatttatccctctcttagccatcgtggttcataatcattacacatcataggctctctctctagggtttgatcagactcaagggtttaagccatgggaaaaaggaaggcaaaggcaaagcctcctccaaagaagcgaatggataagctcgataccgtcttcagctgccctttctgcaatcatggcagcagcgtcgaatgccgccttgacatgaagaacttgataggggaagctatttgcgggatatgccaagagagctttagcactaccatcacagctttatcagagccaatagacatatacagtgagtggattgatgaatgtgaactggtaaaccacccggacgatgatggtgctgagcactgatgctcagattcctgttcttgtggttgtgaacggattaactggccaattttatatcttaaaagttcaacctgtaactatgtcggttcctgatgtgagtgagcactggtgcaactataagatgcatgtaatagcttagttatgtaatagcatgtgcaagaacatgagaataattgtcctatttagatgaagccccctggattagaagctagtctgtaatatctaatactattatactgtttctgtatgtgtgcgctggttgcatatgtaaagagtgtgtttttcttctcctttggaagtgacttgggagaaagaggttaatatatagcttgatgatgggcttcaaattatatgatccatgtaatagcttagttatgtaatagcatgtgcaagaacatgagaataattgtcctttttagatgaagccacctggattagaagctagtctgtaatatctaatactattatactgtttctgtatgtgtgctggttgcatatgtaaagagtgtttttcttattacggactggtcttccaccccggggggcttcgtcctgagcactgatgctcagattcctgttcttgtggt

SEQ ID NO: 98696 - DNA, 449 bp, Glycine max
  Clone ID: PAT_MRT3847_60135C.1
ggtgtggactcagttcgtgaccctctcgataacgcatggaaaacgcttcgtttccccatcatcaaacccagagagcttctccttttgttcctcaaagcgggtatcgccgtttcaatgctcttaatcataaccctctttatcactctctacaatcaacctttttatcctaacaacaaccacacaaccatgaaatacatgctccaacagaaaacccctgaggaaaaagcctccaccaacatctcccacctcctgtttggcattggcggctcgtctgctacgtggcagacgcgtcgccaatactctgaactctggtggcgtcctggcgctaccagaggcttcgtctggttagaaagtcacccgccagacaacacgacttggccagagacctccccgccgtaccgagtctccggcgacacgtcggtgttcaagtacacgtgctcgtacgggtc

SEQ ID NO: 98697 - DNA, 218 bp, Glycine max
  Clone ID: PAT_MRT3847_60136C.1
tccccaattggtatttccccaccggccagaaacctatggggcttaaggggatccacctgagaaccaggcaccaaggtgcactgtccactcatttcaacacattattgaccatggttggccatggccccgacctgagttggagggttggctggaaaaaactccagccgaagtaaatgcttattggtctaacccaagggaatatactaatgcaaggaaaa

SEQ ID NO: 98698 - DNA, 149 bp, Glycine max
  unsure (1)..(149): unsure at all n locations
  Clone ID: PAT_MRT3847_60137C.1
attgcaatacttataataataaatganaatgaagaaataatcttacggtggttgtgattttnttnntttttttggncncagttggatnattgggtgctttncngnatttacaacaagangggcacgnncganaaanngnaaccaagcag

SEQ ID NO: 98699 - DNA, 509 bp, Glycine max
  Clone ID: PAT_MRT3847_60138C.1
ttattatttttgtttttttgttcttgttttttttgggttttttttacgggggtttccttgtttcaccttgttttttaacataaaacctaagcctgagtgtgcgggtccccaactcaaggcgcccggggggggggccccccccttaaaaaaagaaaaaaaaaactaggggggggggccccaagacacatttttttcccccaaaccccgagaattggctgggggggggagcccccaaacccccccaccccaaaaaaaacaggggggggggcaaaaaaaaaaaaaggcagccggtgtcccctaaggagaacaccccaacctttacaggggggggggccgggcgggcgaaaacaaagaagggggaggggggggcgccaccaccacccccagaggggggggccccccccccccccaaaagaaaagcaaacccctcggaacagggggggagggagtgcccccccgaaaaaaaaagccctgggggaagggcgctacgaccccccccgggaaggggg

SEQ ID NO: 98700 - DNA, 205 bp, Glycine max
  Clone ID: PAT_MRT3847_60139C.1
tttacacgttttttcacctactcattgattcagaggcttatatcatagaatatagagagctcatatagaagctcagggaagtactacaaaagcctacgtctccagaccatacatctggaggctcgaaagtgtacaacgtgagaaagggtaataattcctcctatttcgctacaagtataaccactgcgatgtgttgttttgatcg

SEQ ID NO: 98701 - DNA, 907 bp, Glycine max
  Clone ID: PAT_MRT3847_6013C.1
ggagcacaagcaatccataacggaaaggtgcccccacaaacacaactaacacaacctttgctaatgaaaaatatctccttttttcatttgcaacggttgctttgaatgaaggaagcagtaacggctatattataatttgtgaggaggcattgatgtggaagaacaagaacacgtgaaggagtttgtgttgtgttgtagagaggaaaaattagtgagagggcaagatggattttacttcgttcttgacgtccctggggacttcgtttgtgatatttctggttttgatgattgtgtttgcgtttctatcaagtaggcctgggaacaatgtggtgtactaccccaacaggatcttgaaggggttggaaggagggtacaagagccgcaaccctttctcttggatcaaagaggctgtgtcttcttcataacgtgatgttattgccatgtctggggtcgacactgccgtttactttgtctttctcaccactgtgttgagtatcctatttttatctggagttattctgctaccggttcttctgcctctttctgttactgaccatggtatgaaggcacatagtaagacacaaacatctagcaacggaactttcagtgaactcgacaagttatcaatggctaacatcacggcaagtagttcaaggttgtggggattttttattgcctgttattgagtctcaattgttacctttgttctcctatggagggcttacaagcatgtgtcatgcctgcgagctgaagctcttaagtctcctgatgtgaagcctgaacagtttgctatagttgtgagagacatacctcatgctcctcatggtcagactacgaatgagcaagttgactattactttagaaccatctatcctgagacattttacagatctatgattggaacaga

SEQ ID NO: 98702 - DNA, 421 bp, Glycine max
  Clone ID: PAT_MRT3847_60140C.1
tgaatgtggaattctttctggatttacgctcacagttggggtggatagcatttgtggggagatgctcattacatatagctatgaaaaattactgctccaggctaaagcttcaagtatgattttacaatccttcaaaaatattgattttatgtgtgtttatagcgatgattacataattagtgttcaataatatgtcaagccttactttattgtttttatattgaaatatcttttatctatatcattacattaccattactgttgtgattgattaaatcttattcttacttttcatatttagaaattgttttcttaatttttgtaattttctcaaaattatactctttaaacatatgactatacttctttctttgctttctattttaatatctaggcttttttttttgttattatattttaa

SEQ ID NO: 98703 - DNA, 215 bp, Glycine max
  unsure (1)..(215): unsure at all n locations
  Clone ID: PAT_MRT3847_60141C.1
gnggcaacaaggaactgccgccgagtcggtaccagtatncgntacgcccaagtactatcgcggccctctgcacccgcaccagccgcctccagcgtccgatccgtcgtcgcgcctcttccagcctggcccattcagcctgccccgcatcgagacagacgtaccagagcaccatagcaggtgatntgctcgccntcacataccaanatatcccnggg

SEQ ID NO: 98704 - DNA, 493 bp, Glycine max
  Clone ID: PAT_MRT3847_60142C.1
cttattatactctagccttgcaccctgaaagaaaacagaaaagaggaaactagtgcaaagattaacatcattaacaccatatcaaagtgaaaaatataggctaagaaaacattatattgagacattcagaattctagattatttttcatatacattttctctcatgctttatattttgttgatgctcttgtgtccagtttcacacctactctttttgtttactttgttttttggtactgttatttcagatatattgtcaaaaaggatgcgccaggtttaacagtaacaaaaatggagaacaaaattggacttaggatcgtacaaaatggagacatagttatggggaaagtttttgtccctgatgatgacagactagaaggagtcaattcttttcaggatacaaacaaggtacttgctgtttcccgtgtaatggttgcttggcaacctattggtttatcaatgggcatctatgatatgtgtcataggtacctaa

SEQ ID NO: 98705 - DNA, 1119 bp, Glycine max
  Clone ID: PAT_MRT3847_60143C.1
ctcacgaaaaagagaacaaaaaccagaaaccctttccggcgcaaaagccgtcaggacttccctcagggaggtaagagaaccttacccacctacacgagaccctccttatgtgcacatgaatagaaagcccaaaacaaaaccaaaaaccacagtcccataaaccggaggtagtaatcctcaatccaacagaaacaaaaaaaaaacctcacttagatcacatagatcaaacaacaaaacacagagttacctaaattgaacctaccccagtaggttctacaagctcttgatcatggcctcagcatcaggggaggcaccaccaccccaacccacttcaacagaagcagctccagcatcaggctcttcagctccagccatatcagcagcagcaccacaacccggaggatcatcgccggcgcctccgagccgctacgaatcgcaaaagcgtcgagactggaacacgtttctgcagtacctacagaaccacaagcccccattaacgctggcgcggtgcagtggcgcacacgtcattgagttcttgaagtacttggaccaattcgggaaaaccaaggttcacatcacggggtgcccgtactacgggtaccccaaccctcctgcgccctgcgcttgcccactgaaacaagcgtggggaagccttgacgccctgatcgggcgactcagggcggcttacgaggaaaacggaggccgccctgagtctaacccgttcggcgccagggccgtcagaatttacctcagggaggtaagagaaggtcaggctaaagcaagagggatcccttatgagaagaagaagcggaagaggaccaccgtggtgatggtgagtagtggtggtggtggtagtagcggtgcagttgcctctccgagtggcggtggtgataccgctattggtggtggagctggttctagtgctagtttaacttcttcagcaactgccacagctaatgatactacaaccacagtataattttaatagttatttaattatttatttttccttaattttttttgtttttacattattactatctatttttagttttctaaggaaattaattgtgattacaaggcttatataattatcaagttgcatattttattatggcg

SEQ ID NO: 98706 - DNA, 351 bp, Glycine max
  unsure (1)..(351): unsure at all n locations
  Clone ID: PAT_MRT3847_60144C.1
ggctcgaggtgaggtcactgatccaatctacccaggtggcagcttagacccattgggccttgctgatgacccagaggcttttgctgagcttaaggtgaaggaactcaacaacggacgattggccatgatctctatgttcggcttccttgttcaggccattgtcaacggaaagggtatcattggagaacctcgccgatcaccttgctgaccatgtcaactgcatcacctgggcctatgccaccaacttagatcccggaaagtgatcgtcctataacgaactgacttctgagagttgatagattcgtgatcggtgaactactgncagatgtgcgaacaatcatgtatatccga

SEQ ID NO: 98707 - DNA, 197 bp, Glycine max
  unsure (1)..(197): unsure at all n locations
  Clone ID: PAT_MRT3847_60145C.1
ggaggatgagcaatagtgagcagnattggaagaagcactgcccttctgggctcaggggcgtgntgaataaaaataaaaaangtattgctccantctcnattcaaaanncaagaanctatnctaaaaangaactaaccccnannaaagaaaaaaagntntgnncccaaaagatccatttaccnaaaancccatncttt

SEQ ID NO: 98708 - DNA, 485 bp, Glycine max
  Clone ID: PAT_MRT3847_60146C.1
atccaacgcccgcaatccgacacatataaatcactgcccttggtattcacttctatcaacatgcgaccggcgtagacgccgacgatttgtacagacccaggatcttcgaaacggatgggattacaaacgacacgcataagcttgttgcaaccgtggccgcaggattcgataagaacgagctcatcttggcggctacgattacgctggaccgagtgagacgcagtccgttgttattgggtagtgtcggaggtatggtgctgtcacttctaacgcttgccatcagccttactgttatagaacattcggagaggaaagtactgcgggccggtggatcgatcatagccaatgtgttgccttacgtgggcacgttctgcataggtgcggggtcaattaaatgggtctatagatctgatatcttaccggcgatgctgcgggcgcaagggtctgccgaaggagctgctgggaataagaccagtaatggggtt

SEQ ID NO: 98709 - DNA, 382 bp, Glycine max
  Clone ID: PAT_MRT3847_60147C.1
ctgacgcacatggcggagccgttaacgactttgcccgtcgccccaaacactgggttttcgctgacgacacggagcgtgagatcaccatgatgaagacaccaccgatgctgctgttggttcactcctgacgagcccggggcgtacaactggcttaccatgggcctcccgtgccatcgggtgtctgaggaggagtgcatgactaatgatgaactgatgggcatcctgcagtctctgtgcgtacaactgaacctcaatgccatcctgacgaggacgaaagattaacatgtcctccgaactgcagaggtgaacgacgagctagatcgacacaacgcctaatcttgggactgggcgtaccaatacaatgaagagctgggaaaaccct

SEQ ID NO: 98710 - DNA, 155 bp, Glycine max
  Clone ID: PAT_MRT3847_60148C.1
cgcgacgtaagctcgtaatacacttcgagttctgaggaaataatatttaccctacccttccacagtaaaaaggggggagtttttgccgcacgcttgaaaccatggctcggaaaaggagagggtccttgatatcggaatcgatctcggaaccacct

SEQ ID NO: 98711 - DNA, 605 bp, Glycine max
  unsure (1)..(605): unsure at all n locations
  Clone ID: PAT_MRT3847_60149C.1
gaggggaaaaaaaaagacacacgttactgaaagagtaaaggccaacttctgttgataggtctttgaagctctaaaaacaaacttttagcacaagcaaactctcaaaacaaccaaagcaatgcattaaaaactagaagtttacttgcattcccttaattatccagtaaaaacagggctggttttattttcggggcacagccatacttccatgtattggactttctatatacaccggggagtttccctgatccagctttttgatggaaagtaaccatcagccttgagcattcgaaaagcttcttttttgagtaatcagtgtaccactcgggggtcttagtccattgcttaaactggtacaaactacattgagctgtgtaaatggcagcagcagccagcaaagatggggaaaacttcagcattttgcattctaccaagcaaagctcgaccaaaaagaaggacaagagctccagctttttatcaaaatgagctgccttgagaaatcttctcatgaacatgtatggagtaggcatanacagcttgaattgcaagatgttcatcattaatttctccatatctaaaacctcatttcttgtatatgccttggc

SEQ ID NO: 98712 - DNA, 278 bp, Glycine max
  Clone ID: PAT_MRT3847_6014C.1
gtcctgcttcatcgatcttagctactgctgttgatgtttgtcagtatgttttttctctcacgtaagaaagttctgctgccgtgataatcgtaggtgctgcaccgccagaaacatgctgaatcaggtgcaggagcagcatgactgttcaaatacatattctacactgtggtcaaacaatagcgtcaacttgggcaaggtagtgacatcagttaacgctcaattcgacagtgctcaaattggtgttcacactgagaaagatggctgcaagtatagaacta

SEQ ID NO: 98713 - DNA, 283 bp, Glycine max
  Clone ID: PAT_MRT3847_60150C.1
ctccaattcgggtcgagcgcactattcctgtgatgcaacttttttttttttgataaaaagaatcatatcatggccggtgaatatgtacagaggggggagtcatattccctgtgcaaagtgttccacggatattcttttccctcttcttgcttcccgtttcttgctctgcacgtatcgtaaccgcccagtatgccgccctgtcctactacaagtcctctattgattttctcttgcccactggccattgcttatttttccccttgtttgactaatcgcttacttt

SEQ ID NO: 98714 - DNA, 2158 bp, Glycine max
  Clone ID: PAT_MRT3847_60151C.1
ccgcgatccgatcgatgcccacgacctgtaaaattgaaatcctcgtttctttcacaaccacttcgtcttctccgtttctcactagactcacatcgcgcctccatgtcgctgttacccctctagtttctaccatacccacatccccttctccgtttctcgctagactcacatcgcgtctccatctcgctgcattcccctgtgcgttctccaacgatcaaatgcatgttagcatactcttgtgcgtgttgcacgtgccactcttggtctcacacacccttctaatatcgaaacccccaagatctcttttggtgctaaggatgttgatgtgacggaatggaaaggggacattctggcagtgggtgttacggaaaaagatttggctagagatgcaaactcgaagtttgagaatgtgattttgagcaagattgacttcaaagttgggtggtttatttagctgaagcctcttctgaagaggatttctctggcaaagttggtcagtcaactgttcttagaattacaggacttggatcaaaaagggttggattgattggtcttggtcagtcaccttccactcctgcaccttttaagagtcttggcgaggccgttgtggcggctgccaagtcttctcaagcaagcagctgttgctcttgcctcttctgaaggactctccgcacaatcaaagcttagcactgcttatgcaattgcttctggggctgtgctgggattatttgaagataactagatacaagtcagaagcgaagaaatcaacacttaggtccattgacattattggtcttgggactggacctgaactggagaagaaactgaagtacgcagcagatgtttcttctggaattattttcggaagggagcttgtgaattctccggctaatgtgctcacaccaggggtgttggctgaagaggcagctaagattgcttcaacatatagtgatgttttcactgctaaaatattaaatgctgagcaatgtgaagaattgaaaatggggtcctatcttggtgttgctgcagcctcagcaaatcctcctcattttatccatctatgttataaaccactaagtggacctgtcaatgtcaagttagcattagtcggaaaaggtttgacttttgatagtggtggctacaacatcaagacaggacctggctgtttgattgaacttatgaaatttgatatgggcggttctgctgcagtttttggagcagcaaaagctctaggtcagatcaaacctcttggagtggaggttcattttatagttgcagcttgtgagaatatgataagtggaacaggtatgaggcctggagatattgtcacagcttcaaatggaaagactatagaggttaataacacagatgcagagggtaggcttaccctggcagatgctctggtgtatgcttgtaaccagggtgctgaaaagatagttgacctggcaacattaactggggcctgcataattggtcttggatcctcaattgcaggtgtgtttacaccaagtgatgacctggcaaaagaagtttttgatgcttctgaagcgagtggggagaaactatggaggttgccgttagaagaaagttactgggagtcaatgaaatcaggagtagctgatatggtgaacactggtggtcgaccaggtagtgctattactgcggctcttttcttaaagcagtttgttgacgagaaggttcaatggatgcatattgacatggctggtccggtgtggaatgaaaagcagcgctgtgcaacaggatttggtgttgctactttggtggaatgggttttgaggaacgcatcttaaatgcgaactgaaatgaaatcttgttcaattgtagtgtgatatatatactaataacttatctgaagggatataaaaggtgtgtgccccgaggcagattttagccatatttcagtgtatttaaaatgtttttattaggatgcatcatgtttcatgtgtgtggccaacataaatgttcttgcaacatatctatgttagaattaatgtctcatgtgagagacatgtgacttataaaaaaaaaaaaaaataaataattaataattaagaattgccttattctatgcctttataaaaaagtaatcaaagggattcattcttggggctgaagaaaggaaagaaaaaaactcgag

SEQ ID NO: 98715 - DNA, 438 bp, Glycine max
  Clone ID: PAT_MRT3847_60152C.1
cttggaacctttgggctgatttatgtgcttgtcgtgagaagatgatagaaggggggagccgagccgagaaggaaaggtcgaagaatatacagagagagagagaagcgtagaaaaaacgagatcgcctgacttacggttcgcccctcctaagagagaacggaagtggaaccggtttcctccggccggacctgttactattggaatctctactattaaatccctttccggctctctcgaggaggaagttaaaaagctgaaacctgcttaggtatataagaggcgatcccagaacggaagacccgtagcggtcccgtataccgcaccagacgcgcgaagagagtccccgcccgcaacaaacgaagagagacgccgcacatatcttacgccttcacccttaccccggccggccatcccaacgcgaccgagaaacctacatcg

SEQ ID NO: 98716 - DNA, 258 bp, Glycine max
  unsure (1)..(258): unsure at all n locations
  Clone ID: PAT_MRT3847_60153C.1
gtcgcangcacgcgtacgtaagctcggnattcggctcgagcnnttnntnctccttcacattctccattccacacaacatannaaatnaaaaaanatacngaanncgcacagctatntaccnnancancntnnnnatctcngatccggtggangttgntatagncnnnnagcngnggnanggcncngtgnctgtcatgannnngntnnngggttnaanncanagagngannntttgnnnnnnnnnnnnnnnnngngnnn

SEQ ID NO: 98717 - DNA, 251 bp, Glycine max
  Clone ID: PAT_MRT3847_60154C.1
aaatgaagccttagcaattgagtgaattgccattcattgattggtcgattgattgaggtattagttaagattcaaactcattgtaccatagtttgccttgtccctcctccattttttaaacattattccaccctcatttatgctcttaaatactcaagagccttgtgatgatctctagagtgaatttctcgtagattttaatcatagtatttgatttaaaggaaaggatttgtttccttctaataactcta

SEQ ID NO: 98718 - DNA, 1454 bp, Glycine max
  Clone ID: PAT_MRT3847_60155C.1
tacggctgcgagaagacgacagaaggggactctgttatcaagtgatggcgatgatggcggcgacgacactcacactgacaccaccgagatggtcgtggcgtccaactcgtcgttccttttgccggcaaatgcatccagggctgagaggtttgggaatgtacagaaatggtgggagcaatgaattgaatgtttctgcctgggatgataagccctttgaaatgcttccgagcggtaacaaggcttacttggatgagcaggatgtggtgacgtttcttgatcctcctaaggacttaatccctttcgacccatcttcctataatcccgctgcatacctatggaaaaaaattgaagatattcctcaggaaaggcgacatcgacttctccgattgttgaaacctagacttgtatcaattgcttggcagattgctggtacacgattcgatgatcccaagttagtaaagaaaagtgcatctaccttgctgtctagctccaccaacgatggtatcatgcttgaatgttataactgcacatcaagtggaggaccaatgtcaatttcctggatcaattcctttagaaaggctatatttactggcaaggatgggcaagcatatggacgaatcattagtggatcagttttgactgcatttgctgactcctttgctcccttgtactttacggtgagagaacttaaggaagtgatgtcaactgagcagccatgtgatttagcatatgaatttggggatggactacatgatatcaaagagctcccattaggctttccaagaccagttaaacatccttatcctttcaacgatcaaattgttgtgtatgttcgctatctaggacctggggtttcagtagggcaagcatggcaagaggggacaaagttggagcaagtcccacgtaagttatgtggggagattttaatggtgaaggattacacatcattacaagaagatcaatgaagaaagtggtcaggattgtcggtggaaagtgagtgcatttcagtcataatgggatacttggagttagagggagagggacactgcttttggcaatacgggccaagcgcggtgtcagctttaaagaagggtcccaagattgcacgattatggcagcattagcagtaacgtccaaggatcgtttggtatggcactatggctgactgttcccctgaatcctcagtcacaaaaagacaagtttcttaaaacatattcctactagatttaagctttttccataaccaattctctatcaaccttgctttggtattattatatgccagtgaagaattgtaggtccaatatttagccctgcataaaggaaaaaacatgcaatttttactctttattttcgtacgatgaagaaatgttgaggaatgttttttcagggttgtatttgtgttagacattaaatatagtgtaatactgtgacaatgaaggtccctgtttttc

SEQ ID NO: 98719 - DNA, 445 bp, Glycine max
  Clone ID: PAT_MRT3847_60156C.1
catcacaaaatgtcaatttattatgtcagggacaaaaaatacattattcaaaatccaaagactaaaaaaaattttttttaattttcagggcctacaaaattttttccctgaatttcagggactaaaacagtatttaaagaaaacaaaaaaaaaaaaaccccctggtggtttttcttttaaacaacttattttttccaacttaactttttttaattcccaccccccttcaatctcttctttaatttttccccccggtttttttccttggcccaaacaccgcttaggggagggaataactttttacaaacccgggttattttttgcccaaaagtttttttttattgggcggggggttaactttcctttacataaaatacaaccacccccattggggggggaaaaaaaaagaaatttgattttggccccccccttttgggggtgggaa

SEQ ID NO: 98720 - DNA, 214 bp, Glycine max
  Clone ID: PAT_MRT3847_60157C.1
tttttcggtttgttttttttttctttgtttgggggagatctgaaactcgtgcacctgcgctgtcacactctctttcctcctggaggtgtcctgggctcccgcggtcttgcttcggtgttttaagtgcttttatagtgtacactctctctctgggcgcacaagttttcggatgttgctcagctttccgtcgtgcatgggttcggggtcgctctcc

SEQ ID NO: 98721 - DNA, 329 bp, Glycine max
  Clone ID: PAT_MRT3847_60158C.1
atcttcaaactgggttcttttgaaaaatggggacccttatgaaagtttgaaacaatgaactttatcctttttaggggttcaaatgttttttttattaaaatgactcactccctgggaataataaatttttttatggaaaaagctttagtttattttggtttgggaaaatgggccccttcaggaaaagaaaaacccaaatttttgtcaggtgaagtaaacgctttaacatttcttgtttacaaaaatcggagatgactaacccctgccttttgatctcatttaccgggtaatttttgatctacagataaaaaaggggggtttatctttta

SEQ ID NO: 98722 - DNA, 256 bp, Glycine max
  unsure (1)..(256): unsure at all n locations
  Clone ID: PAT_MRT3847_60159C.1
gcccggggngggtttttttttttttttgggaaaccaaacattttcttctctttattctttacttcacttactttccctttatcatgatttaggagccttatcaattttcaatagttcaacctggggtccaaattttgtaaaagtacccaaccaataggaaacttttgaataaaaaataataaaggcaaaaccaaaaggcgggcatccccattttcacttaacctttaacatttaatatttggcgagatattccttt

SEQ ID NO: 98723 - DNA, 1012 bp, Glycine max
  Clone ID: PAT_MRT3847_6015C.1
agtcctgggcagggcatttgggagtgtctttgtttcccttcttgccctgtatgatatgagtgcttgattcgttgtcttcaaatcctgcaaggccagaggaagcaatcaactcaaacgacaccatgtctggaactatgtctccaaaaggttctttcaagaagaaagcaatcaatgcctcaaacatgctgaggaattctttgaccaggaagggtaggcgaagcagtaaggtcatgtccgttgaaatcgaggatgtccacgatgctgaggagttgaaaattgttgacgagttccgtcaagctcttattttggacgaacttcttcctgcaaaacacgatgattatcatatgatgcttagattcctgaaggctaggaaatttgatatcgagaaaacaaagcaaatgtggtctgaaatgctcaaatggaggaaggaatttggtgctgacaccatcacggaggacttcgaattcaaagaacttgatgaagtcttgcaatattatccccaaggccatcatggagtggacaaagatggaagacctgtgtacatagagagattaggccaagtcgatgccacgaagatgatgcaagtcacaaccatggatcgctacatcaaataccacgtaaaggagtttgagaggacatttgatgttaagtttgcagcttgttcaattgctgcaaagaagcacatagatcaaagtacaactatcctggacgtgcagggagtggggcttaaaagcttcagcaaacatgctagggaacttgttactcgccttcagaagattgacggtgacaactatccagagaccttgaatcgcatgttcatcatcaatgcaggttctggatttaggatactgtggaacaccgtaaaatcattccttgatcctaagaccacggcaaaaatcaatgttcttggcaacaagtatgacaccaaattgctagaaataattgatgcaagtgagttgcctgaatttttaggaggcacttgtacatgtgctgatcaaggaggctgtatgcg

SEQ ID NO: 98724 - DNA, 267 bp, Glycine max
  Clone ID: PAT_MRT3847_60160C.1
accgctcgtacgagctgttgaaaggggttttctgagggggaaatcttatttgtgactggcggggtaatcctcaggaaccatctatcatacatggtttttataaatatgatgaattgacaccggcttttgctagcacctacttatttttgatgaattaactttttctttatttatcgaacgcccggatagaacaaacaagttttttttgttctttcttcaacaaaatctgatctgatagtatacccctcagtcggataataacttata

SEQ ID NO: 98725 - DNA, 433 bp, Glycine max
  Clone ID: PAT_MRT3847_60161C.1
tagcttggtgtagaatatatggtataaactgtattgtggcatgaatgctgcaggaacttttgcccgatgcaacaattgagagtcctgaagatgctgtaatgaagcaacatatgagaaaagacgtacatgatctcctgaaaggcttgaacttaagggaaaggaaaatattaaccctacgctttggccttaatgataaccagcctaggtctcttcaggacatagggacacttttcaaagttagcaaagagaggataaggaagatagaaaaaaaagctctaacaaagtttaagaatgaagcaaccatctcaaagttacattattatttggatctgtagcatatctttgtcttcttctggtaagctgaaacagaatcttggtttcatctggctatgaaagatgggtacaaactcttgggccagaattgggtggatgc

SEQ ID NO: 98726 - DNA, 375 bp, Glycine max
  Clone ID: PAT_MRT3847_60162C.1
ccgattcccacatcttctctgttctgtgatttgctaccctttttaggagaatgattattgctcctcccgcatcatgaattccacttgctgggtagcttcttatgggccaaaccctggcgctcactattgatccgaacggctgtcccattaatgataacaactctaaccacttccaatgctgctgagacagtgggacggaaccaaacaagaacagaaatgttccagatgatgggtaccattaccctcaaggtcttcttcatatccattgcaaaccctagggtgataataatgctcggttcagctgctgcacctttgtaccagacgatttagaccctatttacgaacatctcaaaccgtgactggataattgctggg

SEQ ID NO: 98727 - DNA, 1017 bp, Glycine max
  Clone ID: PAT_MRT3847_60163C.1
caataacaacatgcgtggtccttcggcagattgggcccaggcccaggcccaaagaattgataacaatgatggaggacttttggggtctcttactggtgccaccttaaactacagaagcaatattgtttcggatcagcgagtcaaggttactaataattcggattttcatggagaaaaaggaccggaatgtgttgtggctgtacgaagcgaaggtatggtcgaatcgtggattaattgttcttctgattgagagcagaaataagcaaccatcaaatgggaaaagaatatatgaacaaagaaaaaaagggagattcataaatatattttcctcacacggtttaaagcaactgatgatggtagtatactaattcatgagagacagaatcttggtaattggtatcctcagcttaaccatgaccgtcaaattaattaaacacctttttcttcttcttttatttggttctttgtgtccattagaattatgcgtaaataactagcagctaccttgtctttctctactcctttattttattttatttgttttcttctcaaaatctcaattgtggttttgatcgatattatatacagctatatacgaattagaatcctggagggttttcgtttcgacgtacgtttgtttcatcgtaatttgtgtctctatttggtaaactagagagctacatacatacaatggcagcatcatatgatcagtttgtggttcgtgtcactgtatatggattttggttttgactacttgtgtgaaattatggttcagagaatgtacaatgtgcccagcatagaatgaacaacacagacaaaactgaatatgatttctcttttccttttgcgcgccaccttctattctctgacacacattatttatactagctagagaatatgtagccatgatgtgccagaagaaaatgctgatgtggccagttgaacaaataatcaaatgtattcaaattgaaatattattggctgaaaaatgataatgaaaaaagcgtccattgattt

SEQ ID NO: 98728 - DNA, 617 bp, Glycine max
  Clone ID: PAT_MRT3847_60164C.1
ccacgcgtccgtgtatttataccctttcttataaggtgggtcttgtctctaaatggtcttatgttcttcgtgttagcttgcatttgaagaggtatccattggtgcattaatgtgagcagtaaatgcgcatccaatccatgttgataaacctctcttcttatcttctttaagccatacttcaacaatggtcaaatcacttttgcttagagcaagttgtaacaccctaaaatctattataaataaatatgcactttttccattttgtaaattgatttttttatgtattaattaattcaattgcggaaacattttacttttaaaaaaacatgagtaaacttcttttttctttttattcctttatacatacaagttgtgatgaaaaatataaatcgttttgtaaaaacatatgcattccaattataaaccatacgctttttgaatgaagagaaagagaactgctataaagttaaactactaatatatatatatatatatatatatatatatatatatatatatatatatatatatacatatatatatatatatatatatatacctatatacacataatataaagatgatgattggaaggaccaacaatatatttggaacct

SEQ ID NO: 98729 - DNA, 211 bp, Glycine max
  unsure (1)..(211): unsure at all n locations
  Clone ID: PAT_MRT3847_60165C.1
caaaaaccgcggaagcagccatggncgaagcagaacacaacgatcccacctcgccggagcgcgaggaccaaaccaaaagcaacaaaaagnagtccgaaagagaaagactcaaagacgagagaacananngngagacgtggacttgtggccaaacaatgagtgagaggatcagagcacattgacacagntactganntngacgncttttttg

SEQ ID NO: 98730 - DNA, 146 bp, Glycine max
  Clone ID: PAT_MRT3847_60166C.1
acataaaaaaaactaacattttcacatcaaaaggggtaacttattcccttgcccaactaaacaaattaatacttcaatcaacagaccacttaattaacaaaatctcaccatctccaaaacaaagacaggtatcccattttccaatc

SEQ ID NO: 98731 - DNA, 179 bp, Glycine max
  Clone ID: PAT_MRT3847_60167C.1
cgtcgacccagagatgaaagactttacctagtccttactcactgtttgtgtttgcatcggaaggtagagaagattatttagaatattattgagaaagtgagcgcacttgtagagcgcctgaaaaacaaaagccttgaaaaacggataaagatgatcgaagggattagctccattagttt

SEQ ID NO: 98732 - DNA, 234 bp, Glycine max
  Clone ID: PAT_MRT3847_60168C.1
aaaattaaaaaacgactgtcaggtgtggaaggttcataatatatacacccccaaacatgtagtggttcgactccaccacgggtttaatgtccaattaacagggtacaagagatgaatgtatgctctggacacgctcaggcttataaaaaaaggagaacaccattttccagttttaaagggcgtgacatcttcatatgtggcgatcaaacagagaggggacttgctctgcaaaaa

SEQ ID NO: 98733 - DNA, 606 bp, Glycine max
  Clone ID: PAT_MRT3847_60169C.1
ctgattccatcctcccgctcctcctcttctcccaccaactcgccgccacactctccctctcccccaaacaccgcaaaaacaaacgcaaacgcgattttcaacaccccaatcccctcacccgcaccccggactccttccgcaacaccttcctcatgtcctcctcctccttcgagtggctctccggcctcctggagcccctcctcgagtgccgcgaccccgcccccctcttccactccctccacctctcctccggcgcccgcctcgccatcggcctctcccgtctcgccgagggccaggactaccaacaaatctccgcccgcttcgccgtctccgaccccgtcgctaaattctgcgtcaagcaactctgccgcgtgctctgcaccaacttccgcttctgggtctccttcccctccccttccgacctcccctccatctcccaatccttccaatccctctccggcctccccaattgctgtggcgccgtcctatgcacccgctttaatatagtagtcaacgccaatagcaccaccaccaccaccaccaccaacgacatagtctcagtttctcaaggtcgccgccaaatagtcgtcgatcctctttccggat

SEQ ID NO: 98734 - DNA, 250 bp, Glycine max
  Clone ID: PAT_MRT3847_6016C.1
attcaacaagccgcgacgagcgattttgattcaccgaaatttggcaatcgaagtttgtgcgttgataggaagccgttctcataggttttggatgcattaacaacaaaaaacaccttttgccaaaaaaggataacacataatattggtactaagtaatgatattaatatttactactaaaaataatatttctactgataatgatgcatatgggagtgatgtcaaggttttttaaaaccctaacaatgatgg

SEQ ID NO: 98735 - DNA, 397 bp, Glycine max
  Clone ID: PAT_MRT3847_60170C.1
ggcttctaccctacgattcttgcaccatcatgttgttacccctcatgtcaatgccatatccccatctctacgcatcttggattgcaccaaccctgaccagctcgatcgcaatgcacttgcacaacatccccctttagacgattttgatgttagccaaatctctcgccgcttagctctttctgagctcattggtgctcttgatggtggatggaacgccccctctgctgatgcattctatcgtgaagctgtcgatgtgtctggcaagcctgacacatacacttatttcctgcctatacgcctggagatggatgcagactatctatctctttcagtggatccccagcatacaccttgagtctctggtcaggttgctacatatgaggatccctttgactct

SEQ ID NO: 98736 - DNA, 275 bp, Glycine max
  unsure (1)..(275): unsure at all n locations
  Clone ID: PAT_MRT3847_60171C.1
cnttattctcgtggtgatatcaatatgtcttacttcaagancagacatctagaagantcaatggcatgcttccccttagccanatgtnatcggttncagatgagatcaaggnnatnagaacntgancaagtgtcagccaataatcatcctcagaatggagcttttgtgagtctgncatgacaggcttagtgacagggantctgaaaaagnnttgatccanacnnataacggggntaatagcagtcaatcaggctcatntgttcatcttaaganag

SEQ ID NO: 98737 - DNA, 1137 bp, Glycine max
  unsure (1)..(1137): unsure at all n locations
  Clone ID: PAT_MRT3847_60172C.1
gaaagcgattgtgcctgaactcagccaaagggtggccattttcctttcttttatcttctctctctctctctgtctttatactctcaccccaaataaggcaaagggcttgccccattgcacttccttacagcttagccttccctagcccaaccccataagcctctttctttttctctctcacccttgcatacgtttctttcactgtactttttgacacacacacctaagacttattcatcaacatcatcatcataggaagagtgcatagaatgagttcatcttcaggtcagagcagtggctatgatctctctttcaagatcttgttgatcggagattccggtgtgggaaaaagtagcctacttgtcagctttatttcaagttctgctgaagatctttcccccaccattggtgttgattttaagatcaaaacgctcacagtaggtggcaagagattgaaattgacgatttgggatactgctgggcaggaaaggttcaggactctaaacagttcttactatagaaaagcacagggaatcattctcgtttatgatgtcacaaggagagaaacctttacaaacttatctttagtgtggtctaaagaagtggaactctattcaactaatcagaattgcgtgaagatgctagttggaaataaagttgatagagattctgaaagggttgtgagcaaagaagagggtttagcacttgccgaggagttgggatgtctgttttttgaatgtagtgccaaaactcgagaaaatgtggagcggtgcttcgaggaacttgcactaaagataatggaagttcctagtcttttggaagaaggatctacagcagttaaaaggaatattctaaagcaacaacaacaaccccaagcatccgaatttggtggttgttgctcttaattgctgcaatgtgaacattgagtcataactagcgcatattggaatgttccctctgatccctgtatatgtaagcttctttcgtgatttcctattggtttgtttttctttgctaaataacttgtaccaatactaatggacaattggcaacaattagtgcctattagcttgtgtaaatttctgtgcattctgttaaaaaaaaaaaactattagctatcaagaaaaannnnngctt

SEQ ID NO: 98738 - DNA, 1125 bp, Glycine max
  Clone ID: PAT_MRT3847_60173C.1
gtggggggtgtgagcttaggacaagtgattgtgcctgaactcagccaaagggagaaagtgtgcccttttatcttctttctctctctctttacactttaacacaccaaataaatgaaaggcgtagccttgcctagcccaaccccataagcctctttctttttctctctctcacttgcatacgttcctttcactgtactttttgacacacacgtaacacattcatcagaggaagagagaatgagttcatcctcaggtcagagcagtggctatgatctctctttcaagatcttgttgatcggagattccggtgtgggaaaaagtagcctactagtcagctttatttcaagttctgttgaagatctttcccccaccattggtgttgattttaagatcaaaacgctcacagtgggtggcaagagattgaaattgacgatttgggatactgctgggcaggaaaggttcaggactctaaacagttcttactatagaaaagcacaaggaatcattctcgtttatgatgtcacaaggagagaaacctttacaaacttatcagaagtgtggtctaaggaagtggaactctactcaactaatcaggattgtgtgaagatactagttggaaataaagttgatagagatactgaaagggctgtgagcagggaagagggtttagcacttgctaaagatttggggtgtttgcttcttgaatgtagtgccaaaacaagggaaaatgtggagcagtgctttgaggaacttgctctaaagataatggaagctcctagtcttttggaagaaggatcaacagcagttaaaaggagtgttttaaaaccaaaacaagaatcccaagcatcccaaaatggtggttgttgctcttaaattgatacttgctggcgtggacattgaatcttcttaactagcaatcttggacaaatcttgtatatgtaagcttcttccttagtttcttctgccattgtcttttgattgcttaattacttgtattaccggaaggaggaattggcaacaatggtgtctattagcttgtgtaaatttgtttgcctatgaatgactgtatcatttatgtgttgctcccaagtcacaagtcaatcctgatactacaactacagatcc

SEQ ID NO: 98739 - DNA, 439 bp, Glycine max
  Clone ID: PAT_MRT3847_60174C.1
cccacgcgttcgttcctttctttctcaacttgttttcttctttggatattaagatacaatagcgcagctgcattgtttaccaaccatcaaaccatcctaggtgatatgctaagtgattgtaaatctgattgtcaaatgtagtgatgagaatggagaagccaccaatctatggtgcagcatcagattgcaaaccactaaccacctttgttcagacaaactcagatgcattcagggaagtagtacaacgtttaacaggtccctcggaagcaagtgcagcaaaagaaggagatgcaaaaaaggttgcaactatgaaaaggacaacctcaaaactccatgagagaaggaaatacatgaagccaaaagttgagattgttaaacccacttttaattataaaacaggtgcatgtttgtcaccctctaagtcaagaagtctagcttt

SEQ ID NO: 98740 - DNA, 122 bp, Glycine max
  Clone ID: PAT_MRT3847_60175C.1
ctgaggatgtagaaaagtcatcctcaaaatggtttatatcaaaacatgcagtggtttctgggactaggctcgtgggcatctgacaatggattacagacgggtctggtgcagaatcttcagct

SEQ ID NO: 98741 - DNA, 380 bp, Glycine max
  Clone ID: PAT_MRT3847_60176C.1
cgttccaaggaaggtttcccgtcatcactgtatgacgtcctccttgctttggggggggggggggggggggggggggggtggggggggtgggggccgtacaaagatttctacctcacaaagaatgaaggacagtgccggagattatagagcggtaaacacatatcgcaaaagtaaaagcggcaatcgccgcaagaatagttggatgcgttgaggttaggggggaatgtagatcgaatggaacgggatcaagccaggggatacacgcttggtgaacccggataaaatagggtaggaagaatcggggcaagttaattaatattttttcaaaagtcttgcgcccagcatttgactagcatgtattatgtagcgagttttaaagc

SEQ ID NO: 98742 - DNA, 318 bp, Glycine max
  Clone ID: PAT_MRT3847_60177C.1
ggggggaaaacgggtctgtcatgcccgggcattaacattcaaaacggggaatttttttaaaaacatcacacccaaccccttttggtcctatggggttacaaaaaaaccaaactttgggaaggggaaatgaaacctttaattcaaaaggccaaacccccctgggggaaaacaattgaaaaaaaaaaggttggttcaaaatcgtttcaaaagggaaaaaaaaacaaaggggcatcgaaattccccctcccacgaaaaaaacaaaaagggaatgacactttgaacttggacccccgtctaaatttttttgacccgaattcc

SEQ ID NO: 98743 - DNA, 455 bp, Glycine max
  Clone ID: PAT_MRT3847_60178C.1
gacgtatgatgcacgcttgccctcagccgtgagttcggatttagcttgcagggtcccacttacttaacagcaaaacagagcgagatacagactagatagacatacagtgtctcactctctatattgatgaccacgggtcgaaggttataatggcccaatatgatcttctatttacatggaagtcattgtaatacgtggaccctagacatggttttgaagcaaactttatatgtctgactttatgcatagatcaagcatgacacatgaaggagggttcccttgctataccagaaacaacaccaacacggtgaaaagttgtctgaaacaacaccaccaagggccacaaccactataataagatccggtgtcatacttgctaacacattattccactcttctactatgacgccttttgatgctgacagctggaagagacaactcaacagcgaagcata

SEQ ID NO: 98744 - DNA, 490 bp, Glycine max
  Clone ID: PAT_MRT3847_60179C.1
gtcatcactgtatgacgtcctccttctttggggggggggggggggggggggggggggggcatggtaaaacgaacccattgggaggtgggataatatgaataaaggataataaaaggccctaaggcgcggaaagccacagtagtgatgggacagaaaacaaaacagaaaataatgacaaaaacaataaagtactagttgcaaacataccgtggcaacgcgaattaacacccaaaaaggttggctgagttgtatgtaagggcaaaaccgagggggtgtaatagaaccgacgttatttgtttgacgcaggccatgtaataagaccttaaagttgaaagacatagattgctattaagcggagccaggtaaaataccaaaaagagaaaggtacaatgggtataaggcaacttacaacccccccgaaaaaatgccgatagggggggaaccatgtatgacaaaaagcaacgggggataaaggatgccactggtttta

SEQ ID NO: 98745 - DNA, 254 bp, Glycine max
  Clone ID: PAT_MRT3847_6017C.1
tgcataatgggcaccaccaagagataaaaaaaaaatgattaaaagctaaggcagggagcaaagcacactgcaagattctacttcttcttcgtgtttcgaaagcgaaggggaaaaaaatacatagcatcaatcatataattagaagtcgaagaagtagcaagatcaattaggtatttagggtcaccaaagcacgatcagcgaaattttcaaggtcaactctcttttccttcttcccattttgcccttaatttttc

SEQ ID NO: 98746 - DNA, 292 bp, Glycine max
  Clone ID: PAT_MRT3847_60181C.1
ggttgggttctttttaaaaaaaacaacggactttttgctcgctgaaattgtaggtgaagttcttttcttttttggggcccccggctgtattgtgggtttcatatttgccaccccgcaagagcacggcaaatctttctcctcctggggaaaattttttgcacttttctttgcaaaaaacgggttctttaactttgtggcccttttgggttcgggactcttagaggggggggccaaaatatttttgcgcccccttttctccaaaggggaaagggtttgggttaccctctccttc

SEQ ID NO: 98747 - DNA, 804 bp, Glycine max
  Clone ID: PAT_MRT3847_60182C.1
gggcgtgttacatgctgcacccgttcctccttctatcagggggaagaacaaacattcaattcatggcggctgcaaagcttcaagctttatggaatcacccagctgggcctaaaaccattcacttttgggcacctacctttaagtggggcatcaacattgccaacattgctgatttctcaaaaccacctgagaaactttcctatcctcagcaaatagcggtcacagctactggaattatctggtctcgttacagcactgtaatcaccccaaaaaattggaacctgtttagtgtaaacattgcaatggcagggacaggcttataccaactctcacgcaaattgcggcatgattattcctcagaggcggaggtgaaggccgtcacaaaagaatgatgttaaattttttaaaatctcgaaagttattgtgtacttggatgcagatgctcaggctgtaatttccgttatataattgtattcttacttggtagttcatttgtacttttgcaagtttcaaactgtcaaaagcattctcacttgtgtgttttttccatctgtatttgattggggtaaaataagggaatcaagataagtgggcaaccgaatacaactggtccctaatgggcgtctttgatatttcttattatcattataaatcacaggtcttaaagcaatcacacttgcagttcatctgccacttaaaactggttagcattctaatgcaccacggtatatgtgctttttagatagcttaaatattgcctagatttcgaatggctgaaattcaattcctgttaaacttgtaaaa

SEQ ID NO: 98748 - DNA, 565 bp, Glycine max
  Clone ID: PAT_MRT3847_60183C.1
cttttttttttttttttttttttttttttttttttttttttttttttttttttttttttttttttttttttttttttttttttttttttttgggccgggcaaaaaaaaatgggatggaaatcaaaaaaaaagggaaggatgggacaaaaaaaaggcatcgacaattcatgggaggaaacaaatgggaagctgggggaattggaacaaaacaggccttctaacaactaggaaagaggttacaaacccacccgaaacccccccggggcaattgggggatttcccaggggaaatttaaaggtttccccccaaaaggggaaggttaggcttaaattatggaaaaataaaacccactgggaccaaatttttgggcaggaaaaaaaaacaaaagggacttttatttggggaaaaaaaaaaaaggacttacccccccaaaggagccgcaaaggcccaaggaaaaatttcagggggttcaagggaggaaaaccggacaaacggggcaactttttaaataaaaaacctttgggggggcccccaccctggtgaaggagctggcccgaacactggg

SEQ ID NO: 98749 - DNA, 1226 bp, Glycine max
  Clone ID: PAT_MRT3847_60184C.1
ttcacttggagagttgggagagctcattcactcatcactgccaatgacaaaacaaagttctaggttggagggtaaggtggctcttatcactggagcagcaagtgggattggtgaagagacagtgagattgttcgctgaacatggagcacttattgttgcaacagatattcaagatgaacaaggtcaccgagttgctgcttcaatagggtcagagagagtgacttaccatcattgtgatgtgagagatgaaaaccaagttgaagaaacaatcaatttcactttggaaaaacatggtcgcatagatgttttgttcagcaacgctggagtaataggttccttatctgggatccttgaccttgatctgaatgagtttgacaacaccatggccacaaatgttcgtggtgtagctgccacaattaagcacacggcacgtgccatggttgctaaaagcacccgtggatccatcatatgcaccactagtgtggctgctactattggtggaacaggtcctcatggttataccacatcaaaacatgctcttctggggttggtgaaatcagcttgtagtgaacttggtgcttatggaataagagttaatagcatatcccctttcggagttgcaacacctcttgcatgcaaagctttcaactttgagcctgagcaagttgaagctaatagctgctcacaggctaatctgaagggtgttgtgttgaaggctaggcatatagctgaagcagctttgtttcttgcttctgatgatgctgctgtttacatcagtggtcacaacttggtggtggatggtgggttctctgtggttaatagaagttattctttcacaccagcttaattacatgtagagccaaaaaaacatagttttgtggctggttggcattaatttccctagccttcatcaagttgagaacatgatgatgtcatgcagtgcgtcaaattaccttgttactgggacttttttttcatttgcactctactaataattctgcaatgtctcttctttgtttgtattttcaaagcataaattcatcaaccttgtctgcttgtgactcaaaagcaagtttgctttctgtgtacttttccttatcttgcgtttaggttcttagctcaactgtttcactccctcttttttttgtcccccatttctattaatttgtatttcatgttttgtttatatatattcttatgtttcaaactgtgttgactacaaaaaa

SEQ ID NO: 98750 - DNA, 238 bp, Glycine max
  unsure (1)..(238): unsure at all n locations
  Clone ID: PAT_MRT3847_60185C.1
caaaagcggttcggttagggtttagtttttttttnatattatttcgtgtatctaatttttcatcagtaatgtnnattttngaggcggcgagntggcgcagattcaggtgcagcatcagantccgntgtcggntcctcctccgaaacggcgtgggntaacgcnccgaacaacccgaaccaattcgttagangtcgnggtacgtcggtnatcttgagcagaatgtcaaggagcacgcant

SEQ ID NO: 98751 - DNA, 189 bp, Glycine max
  Clone ID: PAT_MRT3847_60186C.1
cttgtgggtggaggaaggaacgagaaaccaaagaatctcttgtttcgtctctgtatatagatgggtgtgtctgtgtcccattgtgagcaaggaacgaccgactcccctacccttctccttatcctatatataccattcccatcactccctatgccccttcaattcacttcctatcccattctcttattc

SEQ ID NO: 98752 - DNA, 607 bp, Glycine max
  Clone ID: PAT_MRT3847_60187C.1
gatttcccacgcgtccgacttgatccagcatttggattgttagatgagcacacggaattgtctggcagcaccaatataatcagttcagagattcaaccaatagaacaggaagaaatacaaaaatttatcagttcttactgtccacaattcctggggaactttcttcactgtttgagaaaaaataatcatccattacctgtctcatgaaaagaagatgattccaagatttggcatgtcacttatatgggaccacttttttcccgttccagtgatcctgaaagaaaatttggtcgtattttgctccaacacatatcagaaccacctagtccaggtcctgcagttggatcacctacacacagtttagcgccatctcctgaatccagtctagcaccatcatctgaacccagtctggccccatcaccctttgctccaacgcctctagttcatagacctctgcataattctttgccaccaacatcatttttcccaaaattgacaccaccagcagcttcagaaatttctgctcctccaccttctgacattaacaaacaggaagagaagcatagtaataaaaaaacagttgttctcgctgtagttataactgcat

SEQ ID NO: 98753 - DNA, 411 bp, Glycine max
  Clone ID: PAT_MRT3847_60188C.1
cccccccccgaaattaaaaaaggcgggtgggtaaaggggccccaaaaaaagaaagggggggaaaggttccctccccaccgtttttataggggacaaacaaagctgaaaaaaaggcggggccccaaggggatctacttttagcccccaaaaagggcacagggccaaacaggaaacttaaaagttttcccatttaaaaggaaaaaaggggggcccacccgtataagggttcgaaaaattcacccttcccttgcttataagggttagaggcccttctttggaaggggcccaaaacggaacaggactcgaaacatatggaaaggccaccaggttccttgaaagggaggaagcgattggttccatgttttgcccagttttccttaaaacccaagggtaaaaaaaaataagggcctt

SEQ ID NO: 98754 - DNA, 394 bp, Glycine max
  Clone ID: PAT_MRT3847_60189C.1
ggactggcttgatatgtttaggctatgctatatgttagatatagtgcataaggaagacactcattcaggagcataattaaaaagaaactgaaacttcatgcctgcatttgaatttccaatgaagcataacaataatattatggtatatgaacattttgataccaaaatgacttctttttcaggcataccttgctttctttgtcatcaatgacctacaaatggcccaatcagccaaagctttggtaatctacaaattttgtccattttaagttcattgtagttcatttagcttcaaataatttgaagtttgaatgatggcatggctgattacactgcctgatgatgttttacataggttcctgctctcatatacatctgcagctttgttgtgtcc

SEQ ID NO: 98755 - DNA, 1430 bp, Glycine max
  unsure (1)..(1430): unsure at all n locations
  Clone ID: PAT_MRT3847_6018C.1
cccacgcgttcgagagaaggcaactctcaacgagacgcattcataagttaattaaacattcagcgacatattttaattacacgtaaaacaaaaacaaaactacaacgaattcttggattcagagtcaagcgaggcaacgcatcgcaacgagattctccaagctctgcatccctcggcgatgccgtccacaacctactgtcttgaaggagaacaaattaaatctccttcaattatgaaacaggatgttgcacaagataacaccaactcatattcaaagaattcaatcccaccctacatgaaggctatctctggctcacttggagggattatggaggcttcttgcctgcagcccattgatgtgatcaagaccagattgcagcttgataggtcagggaattacaagggaatactgcattgtggtgccacgatttcacgaacagaaggggtacgagctttatggaaaggattgacaccttttgccacacatttgaccttgaagtatgcacttcgaatgggttcaaatgctgtacttcaatcagcgtttaaggaccctgagactggcaagcttagtggttatggacggatcctttctggctttggtgctggggtgcttgaggctattattattgtcactccatttgaggtggtgaagataagattgcagcagcagagaggtctaagcccggagcttttgaaatacaaaggtcctgttcactgtgctcgaatgattattagggaagaaggcttccgtgggctttgggcaggagttgctcctactgtgatgcgtaacgggacaaatcaatctgccatgtttactgccaaaaatgcttttgatgtacttctgtggaagaaacatgaaggggatgggagagttctcctaccgtggcaatctatgatttctggattccttgcaggcacagcaggtcctatttgtactggtccatttgatgttgtgaaaacaaggttgatggctcagacgcgagaaggcggtggtgtactgaaatataagggtatgatccatgccattagaacaatatatgtagaagaaggacttcttgccttatggaaaggtctgttgcctcgactcatgaggatcccacctggacaggccattatgtggggtgtagctgatcaaataattggtttgtacgagaggaggtatcttcatcattcaactttgtaacttttttttttctttgcattattttttgcttgctccagacattagttccattgcaaggctacaaaaatcattttagcctctatctacagtttgttgattcaaatttgttgggtggaccattaggggtccatacttacatttagtgtaacttgacattattagagtccgtactttcatgtggcctagactactaaagaagtattctcaaaagttcaataatgtagaactactagtaagcnagctcttt

SEQ ID NO: 98756 - DNA, 403 bp, Glycine max
  Clone ID: PAT_MRT3847_60190C.1
gaaagagataagttcagatttcttatataacgtactttatactttaattttaatacaagactaattaattaattaattaatgtagagtatatatgattaacaacttgctacggaatattgtcatcttcagagtagtttttagagctgtggccaaacagattaatgctttcattggcattagtatcaccttgggattgggatggcttgtaagaataccatctggaccaaaagagatagttgaggaagttgaggaagcttagggcagctagtaaccaatagaaaaagtcaagcttgtctttgttgagatcgttgtcatggagccaaccaccagttgaagaagaggaactgatgttattcaccatagaaaccaatagtgagctcagataaaagccgaatgagtaag

SEQ ID NO: 98757 - DNA, 203 bp, Glycine max
  Clone ID: PAT_MRT3847_60191C.1
ggggggggggggtgggggggggacctgcatttttgggaaccagaaccctatattaggagctcgaacgacccctgcccccagcctaaagcttcgaacctccagagcggccgcccttctttttttttttttttattgcatatacttatctgaacctggaacatacctcattgccttcattcactttgcatttggatcaggctaaa

SEQ ID NO: 98758 - DNA, 498 bp, Glycine max
  Clone ID: PAT_MRT3847_60192C.1
gagaaaagctgagggtgtgcagagcgctgtcatgggcgaggatgaagagacacagaaacgggggcatctgagctcgggccgtctgcagccagagtgacagcatctgtacatctggtatcagagtggatgcgcgcaggccaacaaggaagactcctatgttgacacgctgactacacatgccgcatgaccgatgccactcatatgcagggcaatggtgccgaacatatttgaggaaaagctgagagtcaggcctgagatgaccctcctcacaaggcagctattgaaaaagacgcatgtgaggcacctgaactccagagagagagtgaacttcagcctgtgtgatcagcaccatcatctgaactatgaccaacttctgctacacattctttatcatgtgcccttagtcccactgaatcacaacagagaccatcgccttccaaggctgagagtgtgcaagtgccgagaggagacatacgaacaccttctgatggtacaacc

SEQ ID NO: 98759 - DNA, 408 bp, Glycine max
  Clone ID: PAT_MRT3847_60193C.1
tttgttttcattggacagatagcattttcccctgctcagacagatccaagaaccacatgtactcactctagagatcctgtgtactctttttctcgttgcgtgtgttctgttgctcacacttaacgcgtgttctttttgattcgaatgaaacgcgaccttatcttctaattgctctgttttatcagtgctcttatatgagccaacggtgctgattctttcccgcgaaagcttgctcggcgctggggcagaagacatttgtgaatacccttggacaagatggctttggggaaatacgctcgggtagatggtggaagatcctcgagctggtgccctacggtgactgaagccccgcttggggctctatgcttggctggacatcggaagacgacattatcattagatggccct

SEQ ID NO: 98760 - DNA, 460 bp, Glycine max
  Clone ID: PAT_MRT3847_60194C.1
acggctgcgagaagacgacagaagggtgattaactaaattacaaaataaattttaaaaaagtttgtgaaaagaataaattttggaacaatataatctacttggactatatcaaaagtcagaacgaccgggtatgtttgaattgccaatctcttgctccaattctcttcgagattcatcccattgttgcgtttcaatatccaaccttttgatttctacaagtccacgttcaactgcaaaagggataaagtctaaagattatgttcgaactagaagcattaacatatatatatttgcaagggaaggttattaattcgctaaccacaacataatagtaaagggagtatttcgtaattagaagtgaaaattaagttttatttatgcaagtaaattacaatggatgggaggaaaggggtgggcaataccatcaactgcgtcttgtgaggtaggagtcattgagtt

SEQ ID NO: 98761 - DNA, 576 bp, Glycine max
  unsure (1)..(576): unsure at all n locations
  Clone ID: PAT_MRT3847_60195C.1
gnnannnnnnagtccacnnnnatatatatttgattgactgatctatcaacaagaagttggaccatagaacagaattttgttcacagaatcagattctgttttagtgaaaatgtttcttgaagagaactgcagagaactaaaatgttatcagtctgtcatattgtccacacaggacttctttcacaggtaataataagtgcatacatttttaacactttctcccaaccagtggagactgaataaagcatcagcatgattttgcgatagtaactagtttatagtgttgatgaacagtttaatccagcagaatataagagtaattcatgtatatctctttaatctacagatttaacaaatttaagctttacaaagcagtcaggtttcctaataacaagtttccaaagtcatcaatttaagccaccaaatagtaagtatatacgaagtcatcaaccatcaaattccaaatagtctttcaaaattcagtctatcaccaaaaagattacgtaacctcaattatctatccaccaatagtaagtaaatctgaaggaagtgaagcaggatcaagttccctcgtgc

SEQ ID NO: 98762 - DNA, 129 bp, Glycine max
  unsure (1)..(129): unsure at all n locations
  Clone ID: PAT_MRT3847_60196C.1
cgcacncntncgctcactcacaagctcagactgatctgaaaaacatcttaagagagatggcttatcaagcctggatcattatcaaaccttatggcgtgctaacaaaaatttttctctaccaaaattaaa

SEQ ID NO: 98763 - DNA, 228 bp, Glycine max
  Clone ID: PAT_MRT3847_60197C.1
gaagctgggcggctggggcaccggaccggcctttccggaatgacccacgcgacctacgcctctttcgacttgaagtgaaggagatggctctgggaagaggctgcacgggtgtgctgcgactatggctctagctgaggcactatgagatggaccaatgccgactactacacacttagtgattgtaacgcctggacctgtatcactgcctgctggatgaacagacagtta

SEQ ID NO: 98764 - DNA, 190 bp, Glycine max
  Clone ID: PAT_MRT3847_60198C.1
tgtgcagtttgttgaacatattttcataaaatcttgcctctttcttggtgtactccttcatcgtttcctttagagtcccgttctctcagctgacatccctgtggttaggttcaagctcaaaagctttcttgatatcaaattcagccaaatctgaatcagccaactggatttattcttgggtccttttata

SEQ ID NO: 98765 - DNA, 1119 bp, Glycine max
  Clone ID: PAT_MRT3847_60199C.1
gaaagatttgacagcaatggcaaaagctggaaaacttgacccagtcataggaagagatgatgaaatacgaaggtgcatccaaattctctccaggaggacaaagaacaatcccgtgctaattggtgaacctggtgttggaaagactgctatttctgaaggactggctcaaagaatagtgcacggagatgttcctcaagctttgatgaaccgtaggcttatatctctcgatatgggagcacttattgctggagcgaagtaccggggagaattcgaggataggctgaaagctgtactaaaagaagtgacagaatctgatggtcagactatccttttcattgacgagattcatacagttgttggggcaggagctacaaatggtgctatggatgctggtaatctcttaaaacctatgcttggtcggggtgagttgcgatgtattggtgcaacaacactggacgagtatcggaagtatattgagaaggaccctgcactagaacgccgtttccagcaagtttatgttgaccaacctactgttgaaaaccatatttcaatacgggggggactgcgggaaaggtatgaactacatcatggagtccgaatttctgacagtgcacttgtggaagctgcaattctctcagatagatatatcagtggaagatttttgcctgacaaagctattgacctggttgatgaggcggctgcaaaactgaaaatggaaatcacttctaaacctactgcacttgatgagatcaacagatcagtcctgaaactagagatggagagactctctctcatgaatgatacagttgtggatgctgcaattctctcagatcgatacataagtgggaggtttttgcctgataaagctattgatctggttgatgaagcagctgctaaactaaaaatggaaattacttcaaaacccactgcacttgatgagattaatcggtcagtcttgaaactcgagatggagagactctctctgatgaatgatacagacaaggcttctaaagatagattaaatcgtcttgagaccgaactctctctcttaaaagagaaccgggacgaattgactggacagtgggagcatgaaaagtctgtaatgactaatctgcaatc

SEQ ID NO: 98766 - DNA, 459 bp, Glycine max
  Clone ID: PAT_MRT3847_6019C.1
atcccaaacccaattaagtgaaatttaactagaaaattgcactttacacaaagtctctgttgaggagaaaatttaagtaatactaaaaactgaaaaactcctaactaatataggtcatacccaacaaaacaaaagttgatgggtcaaactggtacaaaacattggagacccaccaaatcccttcttctaatgaccatatccttagaccgcaccgcactttggaacacgcacaattccacagcatgctgtttcaaccgctccctcactgtttctcccaatattttctctcttttggggtacacacattcacggtggtacaagtaggcccataattgtaaataataataattcacaatgaccaaaacaccctcaagatcattggtggaaagcatcaaacggccggtgtggaatgggagctgcggaagcccacgggccattgggcatgggccaagcatgggc

SEQ ID NO: 98767 - DNA, 283 bp, Glycine max
  unsure (1)..(283): unsure at all n locations
  Clone ID: PAT_MRT3847_601C.1
gccccggaagaaccggggggacccacgcggccgccttcctgntcgacgacggcgacagacgacagaggggggcaagcagaacacacagggggggggaacaccaaggacagcccgagggggaggcaaaacacagaccgaagaaggggaaaaacacagcatgcaccacccctcggaggcacgctcccgacgatgcaagcatgaacacacccagggcgcaactacggcgaaacccctcccaaaagacaatccccacctgaaagaaacaggctgagagagatacccc

SEQ ID NO: 98768 - DNA, 368 bp, Glycine max
  unsure (1)..(368): unsure at all n locations
  Clone ID: PAT_MRT3847_60200C.1
acgagattgattgaagagatcaaggaaaaaatatactcttctatggaggaacaaaaagaaaaagagtaggagtgaataatgccatcgacacaagaagtctctccgtcatgaaccaattacttcacaaggtgaagttaggtgatgatacctgaatgattttatatagcaatagcccacctactttgtgctgaaattccaatttcttattagaaattgtgagcagaggcagaaagtctcaaactgtagtccacttaggctagggctctcacacctagtcattaatcaactatcttaagctattaggtgaagacatatgattatatgaatgattttatattatatctctatcactgtatgactgtccanna

SEQ ID NO: 98769 - DNA, 564 bp, Glycine max
  Clone ID: PAT_MRT3847_60201C.1
ggggaaaaaacgctttgccttatcgaacgatcctgttggttttgcttttgagctcattatagacgtcccccctgactccattgagtcaagtagtgcttctcgttgctgattaaaagcgctcatttaaaatttatgaaaagactttgcccttgaggttgataaacaagactgatttacctgaatacaagcttactatagatatgcttgagtatgcataggataatgagacaactgggttgaagcttacatataacttttgcgtcactgaatacaccaaggcatatgctaatgcacagggtgatattggaactgctgatgcatacaagagcgctgaggatggcaacgtatcacacaagagctcgcatgtaagactactcgacgacagagaccaggtcctggacttaacacagagagcacttgattcttaaatcctgaaggatggagaactgttatggttgaaaacaacattattgtcatgaactggactaaacagttctgactttctatacatactaatgctattatctgaataatggataagataatgattattattgaaactgt

SEQ ID NO: 98770 - DNA, 288 bp, Glycine max
  unsure (1)..(288): unsure at all n locations
  Clone ID: PAT_MRT3847_60202C.1
ttcaattttgcntttctctgcctaaaaggtgaacttcttctctgcttcttccgtgagtcgcgcgttatgatttgaattttgtactttcaatcttttttgtggatggggttgttttcatttttgtgttttgctttctgagatcagctcaaaattttcatttttcttttttgtggggggtttgattttnctttgnagttttttataatttggggaacttttaggtttcttggatccgaagttttggttganaattccggtttcactgtttctgactttnagggttccgtt

SEQ ID NO: 98771 - DNA, 465 bp, Glycine max
  Clone ID: PAT_MRT3847_60203C.1
acggaagttgcgttatctgggattttgaaacccggggcattgctaaagagctacgagataatgaatgttcatctccaataaccagtgtctgttggtcaaagtgtggtcatcgaattcttgtatctgctgctgacaagtcattgttgctgtgggatgttatgagtggaaacacaacttcgcttaaagtttctatcttggagatatccaataatggaccaacccctacctcacgtaacaagtgtgccgatggaattacctccttctcaccaactgctgcatgttttagtaagtacggaaacctggtttatgtgggaaactctaaaggggaaattcttgtaattaactatgtagatggtgaggtgcgtgccatggttcctatacctggtggttctgtggtgaagaacattgtgtttagcaggaacggacaatatcttctaacaaactcaaatgatcgaataatcagga

SEQ ID NO: 98772 - DNA, 193 bp, Glycine max
  Clone ID: PAT_MRT3847_60204C.1
gtcaatttgaaattaacacgtaccaaagatgctggaatcatcggaggaaacatgggtcacaagataaaggggaacttggtgattatgcgaaagaatgtgttggatatcaacagcattaccagtgttaagggtgatatcggcaaccggcattaacattatttggaggaagtcgtcgacaccgttacctgatttg

SEQ ID NO: 98773 - DNA, 240 bp, Glycine max
  Clone ID: PAT_MRT3847_60205C.1
ccccaaactaacattttaacaatgggtacaaatttatgccatatttattatctttctatcaatacgatatccggagatgtgtctgtgcacctacacacttaccttttatgcacccatctaagattacccaatatcgtaggaactcttaagttccaacattaattcaatcgagcgctgacagtggtattattctgcaagaacatcagcgaagataaaaagaggacgataaaacctgtcgtt

SEQ ID NO: 98774 - DNA, 799 bp, Glycine max
  Clone ID: PAT_MRT3847_60206C.1
tggctcgaggcttttgtcgtccagttcttgcactgttggctgttgcctctgttttcccttgcttgctttacttcagtctctctctgtctcactttacgttcgagcttcttgctacgatgaacgcgcccatcatagaccccttacagggagattttccagaagtgatagaggagtatttggaacatgggtgtatgaaatgtattgcctttaatcgtcgtggtacacttcttgctgctgggtgcaacaacggaagttgcgttatctgggattttgaaacccggggcattgctaaagagctacgagataatgaatgttcatctccaataaccagtgtctgttggtcaaagtgtggtcatcgaattcttgtatctgctgctgacaagtcattgttgctgtgggatgttatgagtggtaagaggataacaagaatagttttacaacaaacccctctacaagctcgtcttcatccgggttcctctaaaccatctctttgcttggcatgccctctctcatgtcctccaatgattgttgacttgaacacaggaaacacaacttcgcttaaagtttctatcttggagatatccaataatggaccaacccctacctcacgtaacaagtgtgccgatggaattacctccttctcaccaactgctgcatgttttagtaagtacggaaacctggtttatgtgggaaactcttaaggggaaaatcttgtattaactatgtagatggtgaggtgcgtgccatggttcctataccttgttgggtctgtggtgaaaacatttggtttagcaggaac

SEQ ID NO: 98775 - DNA, 529 bp, Glycine max
  Clone ID: PAT_MRT3847_60207C.1
cggacgcgtggggagagggacgaccttgcactcttctattctgccagtccttttcaacagaaagacaaagtggtcacaatttcttcagcaggtgacattgaagtgggcagcaatgcagcaaggatgaaaaatgatatatcaactgacagctccaaagattcagctggttccacggatttgatatcaggcagagcaaaggaagatttgcatcgtgggcacagaagagcagctagtgccagtgctgatataggctcatggagcatgtcaatccctaatgaatgaaaagcaactacagaacaactatggatcggctcatacaaattgcctttgcgtaagatagtgaaaacatgaattttccatggctccttgtgatctaagactagaacgaagtggaaaaatggagctgtatcttgggcaggcactgaccaacacgatgttgaagaggctatccctctgaatacttctcagttgagtcagggcttagaggaatgctttgaaaggacaagagttgcttaagacatgtgatgag

SEQ ID NO: 98776 - DNA, 517 bp, Glycine max
  Clone ID: PAT_MRT3847_60208C.1
gcttggggggggggggggggggggggggggggggggaataaacccaacatggggttaaggctgacgaaaaaagttacagagaagccgggctagagaaatagacgataagcgcagccgaaatagaaaacgacggttataaatggcggagttttaggattaatggggtgcacgcgcaagcgcccggaggctgttatatacgggtaacagaaaaacaggatggtaaatggcgtgcggcttgattagtacccaggctagagagtataaggccggcgcacccctcaagcaacccgaaagtatattgcaaagagtttgggtgtgttacggctaagatagtgttatctgcaacagggtctagcggccacgtgttagagctgaaacgtgttgggggccgatagcccggaactatagtaagcaaagttgttgtggtaactgggggtgggcgaaggacagaagtaaatgttatgaagcgtacctaaatgacggtagtgagtgtaacgacttaacgcacgggtaaggg

SEQ ID NO: 98777 - DNA, 495 bp, Glycine max
  Clone ID: PAT_MRT3847_60209C.1
ggctcgaggtggttttcatcgtcttccttttcttatatttctttttctttctgtctacgggggacgccgaaacaatggccggtaaaggagagggccctgctatctgaatcaatctatgaaccacctactcttgtgttggtgagaggcaacgtgaccgagtagaaatcatcgccaacgtccaacggtacagaacgacaccgacttacgtcggcttcactgataccgagcgccttatttttgatgccgctaaaaaccaagtggtcatgaaccccatcaacaacgtcttcgatgccaagaggatgattggtcgcagatgcagcgacttctctgtactcagtgatatcaaattggggcctattaaggtcattgatggtgctgctgacaagccaatgaatcgggttaactacaagggtgaagagaagccctttgctggataagaaattttttcttggtgctaattaagatgcgagagattgttgatgctcaccttggctt

SEQ ID NO: 98778 - DNA, 466 bp, Glycine max
  Clone ID: PAT_MRT3847_6020C.1
tacggctgcgagaagacgacagaaggggaccgaagaaataaatagagagttggttaaaagtaggaaatgaaagtgagggagagagaatggaggaagaggcagggatctaccgtctagcggaggacagcctccggcagatattctgcaggctgccactgagggaaataatgatatgccgctcagtgtcaaaattcttcctgcagctgctctcaacaccttcgttcctccaggtcctctccagctcccatccacccctccagctcctggccctccgcaaccgccaccacaccccttctcacacctctctccccctcttcgaccccgccaccaaatcatggctccacttccccctcgacttcctccccttccactcccctccccccgtcgcctcctccctcggccttctctacctctgggcccacaacaacttcaacttcaactccaagtccctcatctgttgttaccc

SEQ ID NO: 98779 - DNA, 227 bp, Glycine max
  Clone ID: PAT_MRT3847_60210C.1
aaaaaataaaaaaaaaaaaaaaaacaaaaaaaaaaaaaaaaaaatcaaaaataaaaaacatacaaaaaacaagggtcggcccccatctggtgtgttcgtcaacccgagatttatttcttgcccgtcctttgatggcttcccttctttccatattcagagtcgtattaaacctgggcgtaataatcggtttagctgttgaactgtgtgaaactttaatccgtttacat

SEQ ID NO: 98780 - DNA, 389 bp, Glycine max
  Clone ID: PAT_MRT3847_60211C.1
cttgcgtttttctgtatatctgcaattgccctgttacagcacagattgcattccaaaactgaacgctatataaacagcccaaaaacatttctggaggagatttttctggacagcaccatgtgaacgcatatgatcaaccaagaacactgccaaatgatggtggataatatgctgttgtcgaacctgggaaggacaaacaacttgccaagaagcatgctgtaataggcgatggaagacagagacatgctaaattggtaccataggacaacccgccagtgcaagctacagagcctgaaggaccactcaggctccatctcgtgtggaggttcatatatgaagagggagtagctcacgcagatgaatacgagtctggtagtatattgtccact

SEQ ID NO: 98781 - DNA, 404 bp, Glycine max
  unsure (1)..(404): unsure at all n locations
  Clone ID: PAT_MRT3847_60212C.1
ggcgggggggggggggnggcccgaggccgagngggaaggggggaggccaagaagaagccggggggggggcacaaccatttttttttgangngnnnccaagagccatgccgtgccccctaagggctgtggctctatctgctcttngngtgtgtntgtgtnngggtttatggtggatgagaacaggcgcagaagtaatgttgagttcctgttttggtatgagaaggctgttgcagaggaaataattgggaaggctgttgggttatgtttggangagaaagctgttggtggcggtgccgcggtgcggtgattgtcggggccgcaggggctagggtttgtgggtgttgggctgggtttgggcaatntggggagttggtagggggggtgggggggcggtggttgttggg

SEQ ID NO: 98782 - DNA, 1118 bp, Glycine max
  Clone ID: PAT_MRT3847_60213C.1
ccacgcgtccgcacaaacaaagagaaagaaccacaaacacattctcttaggctcttttttttattctccggccaccggagactcgccggaggaatggaggagccgaactccgattgctggctgccaccaggttggactgtggaagtgagggtgagaaagaatggtaagagagacaagtattacttccccccctcaagtggactaaaattcaattccaaggtggaggtatttcgctatcttgacaatgctcagaacaaagtcagcatccagaaaatctctcctaatgttatagttgagaaagctattgcggaagggttaccaccaggatgggtgaaaaagaccagaatcacaacaaatggagattcagttagaagagatacgtcaacaagtgtaaccgtgaaaccaacattatcaattagcatgggtcaaagctcagacatggacatgatagctaatgaccaacagattccaagatctgcaagttctgaagaatatatgtctgtgcccatctctgaatgtatttccaatcagtgtgtcgtgggcgccaaactgaccagttcagttctatcactggctaaaagttcagataaaaaacaagggaaggttggtgtagctcaaagcgcttcagtttctggttgcactaacaaagatgccgaagaaaagcaacttcaagaaaattcagagacaaaacatggcactgaaaaagcccaggccaaagatccccagtgcaaaaacaagcacaagaaagagatcaatttgcctcgccgtgcttcaaagcgtcttgctggaattaaggttgatcctgttccggaacttaaaataagaaatagagcacgccgtgttgcagttaaacaatcagaggaggaggaaaccatcacaaatgtagataaatctgccaacagcttgcttgatggtctagcaatacagaaattaaataacgaggatactgacaagactctagaagtgcaaagaagcgacaaggaaaaagaatgcttctctttttcgtctctggagaacaatgctactgtggaagagtgtgtgagagtcattgaaaatggagataaagttgatgctaagttagattacacccttgactttcccctcagagaactactaac

SEQ ID NO: 98783 - DNA, 890 bp, Glycine max
  Clone ID: PAT_MRT3847_60214C.1
gtctctcttaaatgcgccagctacacttctgatgagacattgcacatatcaacctttgtggtgacatgctccttaatttgggtttgcatgattaggttagaggagagcaaaggcaattatgttgcacaagattatgctgaattctgccacttggtgtttcttgcagattgtcgtggtcgtcctgagttttcattaccttcaacgtactttgggaattgtctaaccacttgttttgtggctatgaagaggagtgagatagtgggagaaaatgggatcattggggtggcaaaggctattgaaaggcaaattagagatttgaagagtgatgctttgagaaatgctgaaaggttgatgtcatattatagagagttagggaaaccaggaaaatctgtgttggtagttgcggggtcaccaaaattgggtgtgtatcatactgattttggatggggtaagcctaagaaatctgaagcagcgcatattgaatcgtcaggatcaatttctctttctgattgtagagatgaaaacggaggaattgaggttggattggcacttgaaaggattcagacgaataattttttcaacatcttagaagagcaactcaataatattaataaattctaagggaatcgttcacgttcttacacaaccggtattttcacgtttttttcttcttttctttgtttggtgggtcagtagtttttttcggtgttcttataaatatttcatttttagagtgatgtgcttgtagttcttaataagcacggagactaagtggagggagtgacgcctctgctacttttggcactggctttgcttttattgtggttgttgtacatgtaatttttgcgttgttatccttactaagttgctgcaatggtgtttttcaaaaa

SEQ ID NO: 98784 - DNA, 752 bp, Glycine max
  Clone ID: PAT_MRT3847_60215C.1
ccagcgtccgcacaaacacattctgtggaagtgagggtgagaaagaatggtaagagagacaagtattacttccccccctcaagtggactaaaattcaattccaaggaggtatttcgttatcttgacaatgttcagaacaaagtcagcatccagaaaatctctcctaatgaatctagattatagttgagaaagctattgtggaagggttaccaccaggatgggtgaaaaagaccagaatcacaacaaatggagattcagttagaagagatacgttctacattgaccctgtaaatgggtatacattctgctcaatagaagatgttgatcactatcttgaaactgggaagataggaaggaatgaattcacgtcaaaagataaagatggcagtgatatggagttaaaagctgacaaatctccttcaagaagtgtaaccatgaaaccaacattatcagttagcaagggtcaaagctcagatttggacatgatagctaatgaccaacagattccaagatctgcaagttctgaagaatatttggatgtgcccatttctgaatgtatatccaatcagtgtgtggtgggggctgaactgaccaatttagttatatcacgggctgaaagttcagatcagaaacaagggaagtttgggttagctcaaagcgcttcagtttcaggttgcactaacaaagatgtttgagaaaagcaacttccagaaaattcagagacaaaacatggcgctgcaaaggcccaggcc

SEQ ID NO: 98785 - DNA, 559 bp, Glycine max
  Clone ID: PAT_MRT3847_60216C.1
gaccatcggggttctaattccgcaactaacctgaacgcagcagctccgcttctgagcgaaagaaggacatttgtttcaaattttcagtcacattcagattcaggtattcaatatttgtcgaaaatggcttcaatttctccttcttcaagcaatacttcgccgagtgctgctgatctgacgaagcaattgaggctccatgaagtcgccatcgccgagctcaacaaccagccttcttccagagctgtgtaccagagagatgggaacatattttttcgtacaaccatccaaacagcaactgcaacggagcagaaacaacttgaatcagcccaagcgaagctaaaaagtctgaattgatggtttgggagtaatgaagcagttgtaataaggatatattttagtttgaaacttcatttttgtaaattgtgacccgatagcttttgtaaattgtgacctgattgtgtgggcacttgacgatcccaataagacattaatgaagtctaatggtccctttaccaaaatattgtacgttcattggttaatttagttattaatattaaat

SEQ ID NO: 98786 - DNA, 272 bp, Glycine max
  Clone ID: PAT_MRT3847_60217C.1
tagcagccacccatattgtgctgtgaggtcaacagtacccagaagaagtgcgtataggggcaggtaactttgcattgagggaatgcgctgaccgctcacaccctatgactgtctaaccttatgagcagtggtctccctggaactactatgctcttaaggatgtctgagaggaagcccatgaaaactcttactatgcgaccaatgttattcgcgagtgcttccgcaagaagatgcttccatttttagagcctttaacgctaagactggtgaca

SEQ ID NO: 98787 - DNA, 335 bp, Glycine max
  Clone ID: PAT_MRT3847_60218C.1
gcgggaaatatgactgcttcaaaacaaaataaacctttccctgaatttcccatgttaaaaataaattttggccgctcataacaatctcaaaaaaaaaaaaatctcctttgttttggacacaaaaacgagaccatttttcactttcaaaaatgacatccatttggccggtctggtctactttgttctactaaaaaaacctattttattcccatccagttgggtgaccaaagtgacttccttaggcgggaacaggaattgttgtgggagctgaaaaagattaaccccaattcttttattgaacaacaccgggatgttttgggctgtctccccccaat

SEQ ID NO: 98788 - DNA, 150 bp, Glycine max
  Clone ID: PAT_MRT3847_60219C.1
aggcgtaagaccacgcgagcgtacgctaatacgacagatgaacatcatagggagtcctgatcctgaacatcaatatagaactctacattgtcattactctatcactacaataacctgagctcgacacctcaagccagacgctcagaacag

SEQ ID NO: 98789 - DNA, 189 bp, Glycine max
  Clone ID: PAT_MRT3847_6021C.1
atcaaattttttttttaagaatgacacaccaagaaagcgtcatttcccatatacaatcttttaatattttaattcagaaattgtttatgtttcattccataaaaaaatcgtgttgtcaggataccacagaactgattttcatatctttagcaccgcctaattaaaacacgaccataaaatggcacacag

SEQ ID NO: 98790 - DNA, 642 bp, Glycine max
  Clone ID: PAT_MRT3847_60220C.1
tgtttccaggagtaaacctcatgctttttaaataagagtatttcatgtagtctaaacaacataaaatagtaaataattcttacagttacaacttacaactgacaaggtcaatgtcatctatacactccaaacggagagaaataatatacttctgagagtcagagaagactcctttattctgagaaacaattgaaattgcctgtttgctgacaatattgtagcatccttttaaaatgaactaatgcccttgtatgtcttcatggctgttttcctccaaaagtggggcctgtttgccctttgactccaagctgagcccagcatcttcaatatctttggctttcccccataatacagaataaaacccaacaacaatcacggtagcacctatcagacttccaagatagaatgcatccccgaggaagagaacacctaaaaccactgatatgagtattcctaagggcttgaacatggaaacaaaaaccggtcctgtctggtgcaaacaccaacaaataataccaacttgaaatgcagagccaaagactcccgagtataaaactgcaagcaaccttagcttagggtccaagctgcaaacactggtggctctttgcacaaccaaacaggtcccagggtattgaatgggcc

SEQ ID NO: 98791 - DNA, 452 bp, Glycine max
  Clone ID: PAT_MRT3847_60221C.1
acaaacggaaagccaagaataaacaggtggccagctgaaaaacataggggccaagatgtggactgtgactcgcgacaggatgagggattctacgcatccaagaaggaatttggtgaaagtggaaacttctgtgaagttagaaaaaacttttaatatcttaatcagagccgcgaactttccgcagcttcggcatgctaaatgacggcgccattgacggcattggcacttatttttcgggtacgggccatcttcttcatttaaactgaactgactttaatagacatgatcagactcttcatgcacggtgtcctcatacgaaggaactccatcctacaagaaaggtcctttatgtgaaaaaacaggacccctagagccagcccgagttcatttgacaactttgagccacaaatacgaccatttgtcacagcccaaccaagaaatacacggggcct

SEQ ID NO: 98792 - DNA, 413 bp, Glycine max
  Clone ID: PAT_MRT3847_60222C.1
atcaattctaggatctggtctgaagcgcatgaagagattgcatgttcatttctgttgtggtgtaccaacagatggagaagtaattagtggtatgaggcaggatgtcaatgttctgatctttctggacgttagaaaagcattagaagaaagtatgaagctttacatttctgacaacaaggtgatcttgacggaaggttttgatggtgttgttcctccgaagtattttgaaaggatagaatcatggccgagcagacagcccatttctttttaaagttcttttacaattttgcttttaggttcacaatacgttgaggattatttaaataaaataaaaaatgtctaaaaaattcttaatattataaaataatatataatatcataaaattataaaaaaaaaaaaaaaatacaaacaa

SEQ ID NO: 98793 - DNA, 1196 bp, Glycine max
  Clone ID: PAT_MRT3847_60223C.1
gagcttgactgtacaattgcgtgtgttccaatttgaaattgaattagaaaatggtcttatcctgcaattcatttggagtaataaaaggtgagggatgagagtggttcttttcttttgctcgttaaatcgaatgatttgaattcgacacgggcacagtaaaaaagggtttagttgtgttcgaaattcgaaattccagtcgcaaggcatgtgaaaaactaagaaaaaatggcttcgaagccaactccatcttcagccatgtggattcgttactcaaagatctggcaggagaccggtcacagcctgatccctcaccttactgtccgcaattccataccctaacccttatgcacgactggttggaagatccactgtcgcaagccggatatgattggagtcatttgcctcattgtagatgatgacaaggtccttctgtgttggacgagtcttcaactaccttctgtcgtgtggtgccttcatgatggttatttggcctttggaggaggtgctgttgagagtgccatgaagggtacgcgggaagatcgcgtatcaaaatccgaagatggtgactgtctagaaatatctctgttagtttctggttgatttggtttagtggttgtgaagtgataacgggtatttttgggtgttctgaagtaattttctttgaatgtgtatcaatggatttgcatgatgactgttgtgcaacaagtatattagtaatttgctttacttgttctttcattcttgcagctgatggagtggtttgtgatcactcttaaattcgagattggaacttctaccatatgttccgtaataagtgtgaatgttgctctgtgcattacatatgatttggtatgctctgcatgaattagaatctgcaccttatccccatttatgtcctcatgacacacttcggttaacttgtttgctgcattttcgtttcattgtcaagacatgggcacgatcttcaactcagaaagctccatttttagtagaacttggtgatttttactcgttttttttctcttaaccacacatttatcctcttgtataccgaggtcagttcaagactcagtgtgcaggcaatggcatttgttattaggagcaatctattttccaaatagatactattcaacttaatagtaaaatagaaggtttaaaacaaaaaaaaaaaaaaaaaaaaaaaaaaaaaaaaaaaa

SEQ ID NO: 98794 - DNA, 355 bp, Glycine max
  Clone ID: PAT_MRT3847_60224C.1
gaggggggatattaaaatactattattaatgggacacaattgagttcaacacaaacccaacttattttcaagggatttttttaccaaccccttaaacattaaagttctttaaaagttttgggaacccattcaacatttcacaacgagcttaaaaccccccccggagacggaggacaaggtgaagggttgattccttctggatgttggaatcaacgagggtcctttcattcttgaactggttgccaacaaaaattaacctttgctggtcccgggggatgccttccttggcctgaatcttggccctcacattggcaatggggtcaaaactctccaccttgagggtaatagtcttacc

SEQ ID NO: 98795 - DNA, 434 bp, Glycine max
  Clone ID: PAT_MRT3847_60225C.1
gtaattaaaaccgaaggacaaataagagagacagagaaagacaaggaaggaggaggaagcgctttcagaaccgctgtttagtaatagaagcgcttattaccaagacccagaagccaaaacgtgattccgtggttggacaaatggtgctgtgttttccctcaacacccaagaaactggccatgaccatagcagtctccctctctggcgcttccattttagctgttgggatgcacctttcttatgtcaatgttgaaccccagcgagctcgaaccagagatcgcgatgcttttgtcatggagacattgaacaagaagtatggttatacttccgcatatgagaaattggctcgcaatggttcttctgttgagagatcacaggaatcctctatgagagagaattatgctcgggctcgcaatgatctggtcaaagagact

SEQ ID NO: 98796 - DNA, 2748 bp, Glycine max
  Clone ID: PAT_MRT3847_60226C.1
gatgaaatctatgctcaaatgactctgcaaccactgaattctgaaagagaagtttttcccatatctgattttgggctaaagcacagtaaacatcccagtgagttcttctgcaaaactttgactgctagtgacacgagcacgcatggcggcttttcggttccacgcagggcagcagagaagctctttcctccattggattacacaattcaacccccaactcaagagcttgttgttcgagatttgcatgataatacctggacatttagacatatataccggggtcaaccaaagagacacctgctcacaacaggatggagtttgtttgtaggctcaaaaaggcttagagctggtgattctgttcttttcatcagggatgagaaatcacaattgcgagttggcgtgaggcgtgttaatcgtcagcagacaacactgccatcatcagtactttctgctgatagcatgcacattggtgtgcttgctgctgcagctcatgctgctgccaatcgaagtccattcactattttctacaatccaagagcatgcccctcagaatttgttattcctctggccaaatacagaaaatctgtatttgggactcaggtctcagttggcatgagatttggcatgatgtttgagacagaagaatcgggtaagcgcagatatatgggtacaatagttggtatcagtgatgtggatcctttaaggtggcctggttctaaatggcgcaatattcaggtggagtgggatgagccagggtgtggtgataagcagaacagagttagtgtgtgggagattgagactcctgaaagcctttttatctttccttctttgacttcaggtctaaaacggccattaccatctggtcctttggaaaatgagtggggaactttgttaacaagacccttcataagagttccagaaaatggaactatggagctctcaaactcaattccaaatctctactcagaacacatgatgaaaatgctttttaaaccccagctgattaacaataatggagcatttttatccgccatgcaacaagaatctgctgctacaagaggtcccttgcaagaaatgaagaccactctggcagcagaaaaccaaatgctgcttaaaaatctacatcctcaatctatccctgaccaacctaatgccttaaacatgcaatcactgttgaaaaatgatcagcctgaaaaatttcatcctcttgccaaaattgataatcatcttccttctgggatagttattgacaagccaaaattagaatgtgaggtattacctgaccgcgtgattgactatccttccatggaagggtgcaacaatgaaaaggtggcagtaaatcctgttaaccagcaaggcctagcaacccaattgccattccataatcaaaaccagagtccactactccctcaatccagtccatggcctatgcaacctctgatagaatcctccatgccccatcctcaaatgattggtatggctcaagctgattctgccatggtaaatggcctgtttcctcagcttgacattgatgaatggttggcgtatgcttcttcccaaccttttgctgggcagaacagaccaactggacctttttctgacttgcaagaacataactcacttcagcctcaagtagtgaatccccctttaccttcaatgaacaatgaagtatgggatcattatgtcaagaacttcaagttcttatctcaagcagaccagcttacatccatctgtcagccagggatgtatggcctcaatggcgtaccaagctcaaataatttgagggatctttccgctgagagcaataaccaaagtgagatttgtgtcaatgttgatgctagcaacagtgtaggcaccaccatggttgatccttctacttcaagcaccattttggatgagttttgcacgatgaaggacggagaatttcagaatcctcaagattgcatggttggcaacttgagttcaagccaggatgtccagtctcagataacctctgctagtctagccgagtcacatgcctatcctcttagagacatccctgacaactccggtggcacttcatcaagccatgttgattttgatgaaagcagcttcctgcagaataactcatggcagcaagtacctgcacccatccgaacctacacaaaggtgcaaaaggcaggttccgttggaagatcaatcgatgtgactactttcaagaactatgaggagttgatccgtgcaatcgaatgcatgtttggactcgatggcctgctgaatgacactaaaggctcaggatggaaattggtgtatgtagattatgagagtgatgttctacttgttggtgatgatccttgggaggaatttgtaggctgtgtccgctgcataagaattttatcaccttcagaagttcagcagatgagtgaagaggggatgaagcttctaaacagtggagctttgcaagggatgaatgtttgaatatcaggtggtggctgcatccaatgtcactaagccatgctttgtgatgttcttgtacaaggcaatgtttgaaaagcaaaggcatatgttgtggaagaagtcagtattattaacttgtatggaacaaaccttgaagatggaagagagtttgagttttattatcacacagatcaaaagttgtaagatgatgttccaatgagtcaagggtgttgcataccttatgttgtaagaaattcttgctggcaagtggacatattatgctttattattactacgcattgggacctttcc

SEQ ID NO: 98797 - DNA, 2378 bp, Glycine max
  Clone ID: PAT_MRT3847_60227C.1
cgaagtccattcactattttctacaatccaagagcatgcccctcagaatttgttattcctctggccaaatacagaaaatctgtatttgggactcaggtctcagttggcatgagatttggcatgatgtttgagacagaagaatcgggtaagcgcagatatatgggtacaatagttggtatcagtgatgtggatcctttaaggtggcctggttctaaatggcgaaatattcaggtggagtgggatgagccagggtgtggtgataagcagaacagagttagtgtgtgggagattgagactcctgaaagcctttttatctttccttctttgacttcaggtctaaaacggccattaccatctggtcttttggaaaatgagtggggaactttgttaagaagaccctttataagagttccagaaaatggaaccatggagctctcaaactcaattccaaatctctactcagaacacatgatgagaatgcttttgaaaccccagctgattaacaataatggagcttttttatctgccatgcaacaagaatctgctgctacaagaggccccttgcaagagatgaagaccacacttgcagcagaaaaccaaatgccacttaaaaatctacatcctcattctatccctgaccaacctaatgccttaaacatgcaatcactgttgaaaaacgaccaacctgaaaaattgcaccctcttggcaaaattgataatcatctgtcttctgggatagttattgacaagccaaaatcagaatctgaggtattacctgatcatgtgattgactacccttccatggaagggtgcaacatcgaaaaggtggcagcaaatcctgttaaccagcaaggtctagcaaaccaattgccattccataatcaaaaccagagtccactactccctcaatctagtccatggcctatgccacctcagatagaattgtccatgccccatcctcaaatgattgatatggttcaagctgattctgctatggtaaatggcctgtttcctcagcttgacatcaatgaatggatgtcatatgcttcttcccaaccttttgctgggcagaacagaccaactggacctttgtctgacttgcaagaacatacctcacttcagcctcaagtagtgaatccccctttaccttcaatgaacaatgaagtgtgggatcattatgtcaagaacttgaagttcttatctcaagcagaccagctaacatccatttgtcagccggggctgtatggctcaatggcataccaagctcaaacaatttgagggatctttcagctgagagcaacaaccaaagtgagatttgtgtcaatgttgatgctagcaacagcgtaggcaccactgtggttgatccttctacttcaagcaccattttggatgagttttgcacaatgaaggacagagaatttcaaaatcctcaagattgcatggtgggcaacttgagttcaagccaggatgtccagtctcagataacttcagcaagtctaactgaatcacatgcctttcctcttagagacatccctgacaactcaggtggcacttcttcaagccatgttgattttgatgaaagcagcttcctgcagaataactcgtggcagcaagtacctgcgcccatccgaacttacacaaaggtgcaaaaggcaggttctgtaggaagatcaattgatgtgactactttcaagaactacgaggagttgatccgtgcaattgaatgcatgtttggactcgatggtctgctgaatgacactaaatgttcaggatggaaattggtctatgtagattatgagagtgatgttctacttgttggtgatgatccttgggaagaatttgtgggctgtgtccgctgcataagaattttatcaccttcagaagttcagcagatgagtgaagaggggatgaagcttctaaacagtggggctttgcaagggatgaatgtttgaatattaggtggtggctgcatacaatgtctcactaagccttgctttgcgatgttcttgtataaggttaacctcaaatggctttatcgtccaatgtttgaaaagcaaaggcatatgttgtggaagaagtcaggattattgacttgggtgtcatgtgatgtattattattaactaaaggacactcgttatttgaaacatttcttaaggtatggagcaaaccttggagatggaagagtttaagttttattattacttatcaaaagttctaagatgatgttccaatgagtcaagggtgttgcataccttatgttgtaagacattcttgctggcaagaggaaatattatgatttattattaatacgcattgggggctttccaaaaaaaaaaaaaaaaaaaaaaaaaaaaaagcggccgctctacaggatcca

SEQ ID NO: 98798 - DNA, 369 bp, Glycine max
  Clone ID: PAT_MRT3847_60228C.1
caagggcccacaatccgttcctagctgcattgccctcgccaacatttgtagcccctgaaggcacccagctgaaaaaggaagccctttcctccccagggcaggggacacagggactagtccaccgaagacaagctctttttgttggtatataaagcgcaattgccgggtgaaaccgaacaaaaatggcccttttgagattttgaggggtacaaacagccggttgggctgaccttagtacacaaagccagggatttttccggaaacatgcttcctcctcgccttttcggggcccatgatacccgccctgggggtgaggatgatgtccccgaccgaacgagcaggcttgaccaagttgacccagttttcaat

SEQ ID NO: 98799 - DNA, 382 bp, Glycine max
  Clone ID: PAT_MRT3847_60229C.1
gggggggcgggggaacaaaaatatataaaacctttgggaaccctttcccaaattcaaccaaggatccaactttacaaaaaaagggggggaaggtttaaaagccaaaaaaaatcccaaaagttttaccctttggtcggaggggttaacccccattaaaaaaaaaacaaaaaattttttcgggggaatcccccccctcaaaaaaaaatctctccctaatttgaaaaaaaagcggaatggcctttttccccctgaggacattccaaaccccatcactagttaaaaaaaaaaaacccttgtttgtttgaaaaaaagccccaacttgacaaaaaaaaggtttaaaacaaaaccgaaaacccttttgttaaaaaaatttgccccaaaa

SEQ ID NO: 98800 - DNA, 133 bp, Glycine max
  Clone ID: PAT_MRT3847_6022C.1
cttttcctatttccctaaccatttaatcatccggaatgcttttatcaaacaataagctcttttttctaatccatcagattccgatcataaacatctccttcctaattgccttaaaagctgtcttacttcaaca

SEQ ID NO: 98801 - DNA, 434 bp, Glycine max
  Clone ID: PAT_MRT3847_60230C.1
gtcctttgagaggctgatggtagagctagcagctcatcatcttctcagtttgtttttgcaacaagttcagacttgttagtattggttccaccttttttttcctcatcctgtcatacctgaaggagccacaacatgtaaatctgtaaggtgctctttgtatagcagatgggatcttggaggaccaaaaagatcctgctcttgcaattgtagctgtaatggtgggggcactaccaaatatttgattgtagttggagtgtcagttgccatagctgtagatttttttatgtcaaaattttagaagtcagttattgtacagagggaacagtggaaaaacttggattattacatttgaatggtgttaatcactgaatcacaatgtattactgaaggtttaatgtttctcatattttggtgaaataagcatttattgaatg

SEQ ID NO: 98802 - DNA, 1688 bp, Glycine max
  Clone ID: PAT_MRT3847_60231C.1
gcacgaggttccatctcatatataagagaacggccggaattccctagccgacccggacgtgcagagccttcagatttagctacctctattattattattactcattactcatttctcgtaccaaacacaacacaacacaacacatcacactcttctctcttctcttctttcttatcccattacaatgcccggtagtttagaaccgttggatttgggtgttcacataccctaccacttcagatgcccaatctcgctcgaactcatgcgagacccagtaaccgtctgcaccggtcaaacctacgaccgcgccagcatcgaggcatgggtcagcaccggcaacagcacgtgtccggtcacacgcgccactctcacagacttcaccctaatcccgaaccacacccttcgccgccttatccaagagtggtgcgtcgctaaccgcgcttttggcgtcgagcgaatccccactcccaaacagcccgcagaccctgccttagttcgctctctcctcaaccaagcttcttccggttctgcccctgctcacctccgcctttcttccattcgccgactcagacaactcgctcgcgactcggacaagaatcgttccctcattgcctctcacaacgttcgccagatccttctccctatcgttttcaacaacggttctgatgagttgaaaaacgaatcgctcgcgctactcgttatgtttccgcttggtgagtcggaatgtgcttcgctcgcatctgattctgtgaagattggctatctatcgcggatgttgacgcataactcgttcgacgtccgagtcaactcggccgcgttgatcgagatcgtcgtcgccgggacgcactcgccggagctacgcgcggaggtgagcagtgtcgacgaaatctacgacggagtggtggatctgctccggagcccgatctcgcacccgcgcgcgctcaagatcgggatcaaggccttgttcgcgctttgtttggtgaagaatacgcggcagaaggcggtggacgccggcacgccggcggttctagtcgaccggctcgcggacttcgagaagtgcgacgcggagagggcgctggccacggtggagctgctctgccggattccggcgggatgcgaggcgttcgccggacacgcgctgacggtgccgatgctggtgaagataattctgaaaatctccgaccgtgcgacggagtacgccgccggagcgctgctctcgctgtgttcggaatcggagcggtgccagcgcgaggcggtggcggcgggcgtgctgactcagcttctgcttctcgtgcagagcgattgcacggagagagcgaagaggaaggcgcagatgctgctgaagcttcttcgggattcgtggccgcaagattccatcggaaataattctgacgattttgcatgcagccaggtcgttgtggttcccttttgaccgttttttaatttttctcctccagtaataattatagtggaaaaaaatgtttagatttcgagaaaaagaaagcttaattagagagtcttttttgtttgtttagattggtaaataaataggtctgtaatgtaattctgtatttaattatttttctttcttctctttgtttttgtatgtaacgattattgtgaagaacgaaagcaagcaaaaatgtttcatcaaaaagaaaataataaaaagaatataaaaagaaaag

SEQ ID NO: 98803 - DNA, 447 bp, Glycine max
  unsure (1)..(447): unsure at all n locations
  Clone ID: PAT_MRT3847_60232C.1
cgcaaaggaaacccccccctttaattgggtccgttggggggaaagcccaaccgggtggggcccttccaaaaggggtccttttccccaaaaaaaacccctggggaaaaaaaacaggggcttttaaatttttttggccccccacttttcccaccacaaaaccctttcgcccccggtcccccccttacttttttaaaaaaggttcccccaccttttgccccccagaaggtaaaaggggcctgtttttggtttttttaccggggcctttggccccatttcccccttggttccccggggccccctttgggcgccccactttgggcttgcggaacacaaccttttaaaaaaaaaggccttggttaacggcaaagggggggcacacccccctaaccccctttttngggaaaagggcttgggcgggggggaaaaggccccggcggtttttggggc

SEQ ID NO: 98804 - DNA, 739 bp, Glycine max
  unsure (1)..(739): unsure at all n locations
  Clone ID: PAT_MRT3847_60233C.1
ccacgcgtccggaagaatacgcggcagaaggcggtggccgccggcgcgccggcggtgctcgtggaccggctggcggactttgagaagtgcgacgcggagagggcgctggccacggtggagctgctctgccggattccggcgggatgcgcggcgtttgcagcgcacgcgctgacggtgccgatgctggtaaagataatcctgaagatctccaaccgcgcgacggagtacgccgctggtgcgctgctctcgctgtgctcggagtcggagcggtgccagcgcgaggcggtggcggcgggcgtgctgactcagcttctgcttctcatgcagagcgattgcacggagagagcgaagaggaaggcgcagatgctgctgaagcttcttcgggattcgtggccgcaagattccgtcggaaactctgacgattttgcatgcagtcaggtcgttgtggttcccttttgaccgattttattttttgtaacaatctccatcattttagtgaaaaaaatgtttagatttgaagaaaaagaaagcttaattagggagttttttttttttggtttagattggtaaataaatagatctgcaatgtaattctgtatttaattattatttttttctctttggtttgtatgtaacgattattgtgaagaacgaaagcaaaaatgtttgatcagagagttgtanatttttgtaagatggaaaaaatttatcaatatagagctaactttttctgttttct

SEQ ID NO: 98805 - DNA, 264 bp, Glycine max
  Clone ID: PAT_MRT3847_60234C.1
gaaacggcatgatttatgtgtgaagggtgatgcgcgcaagagaaacaatggattgcaaagagcatatccccatgctccgtacggtggtactcaccgtctcttggttgttgttaatcactctgccatactgtgaagccgcatacaattattcggaatgcaaagagcaaacatacaaatgcggaagtctgatcaacatatcgtatcctttctggggacacgaccagcgagactctgaatgtggtggcggtgacctattcgagctca

SEQ ID NO: 98806 - DNA, 245 bp, Glycine max
  Clone ID: PAT_MRT3847_60235C.1
agtgcaatcacgaggaccataccatagccggaccctctgaccgtcgagtgctaataggcagtcagtgcagacctataaatgatatcctgccaactcttcgtataacccgggaattcagggctggaccctgtacgcggcctagatgtccccatagtgaatgcgtaatcagctacagttcccgtggtcatgcatgcctaaggcttgaaattgaaatccggtgacgattcaagacaagattcgatcac

SEQ ID NO: 98807 - DNA, 845 bp, Glycine max
  Clone ID: PAT_MRT3847_60236C.1
tacggctgcgagaagacgacagaagggcggtgtcaagattgtgaagttggaagatgcaacacagtctttgttagatggcttaaaagctgaaggaattactgtcaatgttgaagaggttggtgactacaagcttgaaaatgacactgggggccatgttcccttccaaaggaatgaagatactcgtcactcaattgatgctcagtctcttagcaaagggaataaggatgctctaggtgcatcagggttcaaattggaattggaaaatgagatcataaacctagatgatgatgatgatgatgatgatgatgatgatgatgatgatgatgggtgtacatcaaaaggattgcatggaaagaaagtcatttctcaaattattgcagaaaatgaacatccaagttcatcggatgcaatccagcacaaaagcatttttacagaagcacaaaggtttgaagcaatcaaaagaaaatgtttatctgacacgcagagttctacttccacatcttctgatgacgatgattcatttgagtttgacgaaggtaatccccccaagagaagaaaaactgccccagacagttttggagtaaactctttgccaagttacttcctcactcgcaaaatttagagcaggaggttcccagccaatcttatatgcaaaagtttggattagtttttagttttaaaaatatacacatgttggaatcgtatattgcagatatggtagtcccagtatgtttgtatttatcaaatgtactttatttatctgataaattctatgttatctactatatgtgtttaattatgtacggatgcataacgatatatgtaaagaaactgtgcattcccat

SEQ ID NO: 98808 - DNA, 780 bp, Glycine max
  unsure (1)..(780): unsure at all n locations
  Clone ID: PAT_MRT3847_60237C.1
attttctttactcaaactttctttcatgacaacctaacagtataagagggggaatttataataagcaagcgtgtgttgagattaaataacacggaaatatgaaaactcagaaactgtgactcattcctctttgactccgattccgcattgcattttccttgtgttacactctcccttcctcttttctttaatcattcgtcttttcaaaaccttaaaccatactaccacatatatattaaaaaaacaaactactataacctattgaaccccccaaatcaactactattccttaatttcttaaatccatggtttcttcctccgaccaaacacactattgagctaattaagacggaaccatgtcgccgatgaagttctgggttacgcagcccaacaaacaacacgccgtgaagctgacccaattgaagctcgaattaggcctcttcggagccaggctcggcgccgcaaacgacaaggtcgcatttgaaataacagggattgcaaccaagaaagaaaaatcaaagccaaaaacgacacctctcccactcgttcccttctcaaaacgacgacacactcactgtcacaccacatgctcccgtagattcctcagttccaaatcaccctctctcgtatgggacgcacgcgacctctgcggtttcatctnctcctcaaagaccactccctcgatgtttgcgacatcgcatttcatgtcttatatggagagggagaatcgaaagcgaaaatgacggccgtcggaaaagtcgaaatgagcgttgcggttgc

SEQ ID NO: 98809 - DNA, 384 bp, Glycine max
  Clone ID: PAT_MRT3847_60238C.1
ggctcgagctatgcccatcagcttttttttccaaaagcgtgaggggactctactaggccacagtgtctcttacacacgagtcaagctgatgcaagtgatcatgacatacaaacgttggggggagggcactacccagagaatgccacgctggaaacatggacaggatcaggtggagaacatagactacactcactggcagatgaatgctattggtcgaggtgctaaccccaccataaacagccagggcatcagatacaacgctcctactaaaccttttgccacggaggtgactaagagagtgaaatcagccgaaacccaatggaaggtgggttattgtacgccagtggaagatttgggactgaatggggcctattataactacat

SEQ ID NO: 98810 - DNA, 765 bp, Glycine max
  Clone ID: PAT_MRT3847_60239C.1
ggtccggatccccgggtcgacccacgcgtccggacttgcagtaaggaacgtgaagcaactcaaatttttggtcctcttaacggtaaattaaattagggtttgagaagaagagagtcttagcactctccaatggcgacgagggtccaccaattcttcgacgaactcgaagcgaagaaaaccattctggcgaaatgcaccgacctcttcaccaccctctccacccacttctcctccctccaacactccatctccgaaaaatcccaatccctcgattcaaacctacaatctctcgattccctctccaaagaaaccctcgaatccctccaccgccgtgagacctccatccccgagcgcgagtccgccgccgccgcccgcatcgaggagcagagggaggccgcgctcgccgacctccgcgccacgcatccacctgaccccgacctctccgccacgctcaaatccctctggcggaagatggacgcccccgcgctgctgcgcttcgtggtgtccaagcggaaggagtcggcgtcgctgcgggcggagatagcggcggcgatggcggaggcggtggacccggcgcggctggtggttgaggcggtggaggagtttctgaagagcaaggtggccaagtccggggtgacggataagaggtgggcgtgcgggcttgtgattcaggcgctgatggtttcggagtcggagtcgagggaatattcaagaaggatctcggagagaggccgttccggtgtggaaatgtggaaggagcatttg

SEQ ID NO: 98811 - DNA, 155 bp, Glycine max
  Clone ID: PAT_MRT3847_6023C.1
aaaacgactgaagtattgcacatccatatactctataccctagcaacgactgatataaaaagcctatatattgcgaacaccctattaactgggctttggaccagctattgcaaacgacgcctgcactggcacctgttgcagaggcagaggcccac

SEQ ID NO: 98812 - DNA, 897 bp, Glycine max
  Clone ID: PAT_MRT3847_60240C.1
gcaggagaacctatagctaaaacaggtaatagtggtcactggactactggtgctcacttacatttccaagtcgaaaaaggtagacataatgatattactaaccaaaatactgtaaacccacttaagtggctcaaaggtcacggtggcggaaaagttggtggtagtggttctgcaaacgcacgtagagcaattcaaagagcacaatctattttaggtggacgttataaatcgtcttatattaccgaacaaatgatgagagttgccaagcgtgaatctaacttccaagccgatgcggttaacaactgggacattaacgctagaatgggagacccttctaaaggtatgttccaaatgattggatcatcttttagagcatatgctaaaccagggcacggaaacatcttaaacccaactgacgaagctatatctgctatgcgttacattgtaggtaagtgggttcctattatgggaagttggagaagtgcatttaaacgtgctggagattatgcttatgctacaggcggagttattaatacatcgggaatgtatcaacttgctgaagggggttatccagaaattgtaatccctacagatccaagcagacaatcagatgcgatgaaattgttacatcttgctgcgagtaaaattagtggaaataacagaaataaacgacctaaccaattacgtacacctagtgttactagtaatacagttgataacgcagaattgctactacaaatgatagaaaatcaacagaaacaaataaacgtgttaatggaaatagcacgaagtaatgaaaatattgaaaaacaaccgaaaggtttttcagaacgcgatgtaagtcaggcacaaggttcaaggttaagactcgctgcttatagccagggaggtttataa

SEQ ID NO: 98813 - DNA, 403 bp, Glycine max
  Clone ID: PAT_MRT3847_60241C.1
ctgtcagattggtgacattgcattgtatgctcgctcataccgcgcgtactcacataagacttgcttgtgagaatctgcctgcatagtattcctatactacagctgcaaactgtagcttatacaatgtagcacatgcatactgaaagtctgtgctctccatctcgtctactgtgatcgaatggtatgcaatgttgctgtcttgtgatattataaacttctttgattgcctctagctaaacaaccaccgccgacttgatctctgatgaagggcatacctctagcgaggccacctcttccactggatgcttggcttgtgcttgcagcctcgttgatcggatggctctggatagccacacatctgacccttgattataaatgtaacctatcctcctttggcaggacc

SEQ ID NO: 98814 - DNA, 410 bp, Glycine max
  Clone ID: PAT_MRT3847_60242C.1
aaaagaaaaaatggcgaacggtttattttgaaagaactcccaaggttttacaggacctccccccgttttccctttgggctccaaatcccccccagaggggtgctcttctacccgcccacaggttttagccccccccctggggggaacaacctccatcccaacttaaattttgaaaaggaagggggtccactttttttgccatctttgttggaaaaaaaaaaaagccccccccccccgttctttgcttttaaaataggaacgactcctttcccataaggaaccgatttaactgcctcttgatcacaaaagaactcccagaaaataaggaccgccccccaacaccagaaacacctcttttgtgtacactccccaattttttcaaaaaatatcccccactttttgtctttccc

SEQ ID NO: 98815 - DNA, 740 bp, Glycine max
  unsure (1)..(740): unsure at all n locations
  Clone ID: PAT_MRT3847_60243C.1
aactgttggatggcatttgattattgttttttactgattttgataatgttccctaaagtgaagtttttctggctcacagatgtcaacttttaaaaaagctattgaagatatggctgctgatagtctacgttgtgttgcgattgcatatagatcatatgaaatgaagaatgttccaactagtgaagaagaactttctcactggtcattgccagaggataatcttgttttattggctattattggcctaaaggtgatatttcctctacaaattatattgtcatggagttgggaacccatgaataagagagttggcacatagaatgaaaggaagaaagaatggaaaggagctgttattgatatatgaaacttcatgaatagagctaatgcccagttcacaattgttatcttctcagatgatccctcttgccttacatccattatctatctttctaactaactgctgtaactgtcaaacctatatatttttgtttgtcctccctttagttgttatacattgtcatctttgttatgttaccagtattaatacgtcatgaatgtattcttgtctgatatgatgttactcacattttttcctttttttttagttttctcttgaatctcattagcgccattattactnatatttgttgcatgacttccacacgctaatttctatcatttcaatatggtcttactattttgccttatgctgattatgcattgaaatggcaggatccttg

SEQ ID NO: 98816 - DNA, 158 bp, Glycine max
  Clone ID: PAT_MRT3847_60244C.1
ggggggtggggatgggttaccatcgatctatatatgttgctttcaatattgccagaaagcatgctggccaatatagaaaagataaacacgagacaaaggatgaagatgaaagacgatgctttgttaattaccatttggctatttactccctagagaac

SEQ ID NO: 98817 - DNA, 169 bp, Glycine max
  Clone ID: PAT_MRT3847_60245C.1
acagggcataaaagggctaaaaaccctgctttgctttatcccaaatttctattcattaaaaattaaccggaagcccttggttatattccagttatagaaactacaaacataaactctgtcccgtgggtaaacccgacaattctcccccgtaccctgtaagcgacccact

SEQ ID NO: 98818 - DNA, 264 bp, Glycine max
  Clone ID: PAT_MRT3847_60246C.1
cgactttgaagggggaaaggtaatagggacatactttagagggaggatgggatagtctggaaaaccaattgggtggtgatgggtaagaccccaagaaaggaaccaacttaaagaatggaacattatttgagactaaagatgaataattcgggaataacattcttacattaattaccctgagactgaatacattcttggaagacacttataccagcgaggtgagagtttatcaatcccttgagtaagcttgttaaataaatatgt

SEQ ID NO: 98819 - DNA, 168 bp, Glycine max
  Clone ID: PAT_MRT3847_60247C.1
aagaaagtgaaagaccactgcagcaaacacagcccctgccagaaaggagggacctgtgtgaacatgccaagcggcccccactgtctctgtccacaacacctcactggaaaccactgccagaaagagaagtgctttgagcctcagcttctccggtttttccacacaaca

SEQ ID NO: 98820 - DNA, 586 bp, Glycine max
  Clone ID: PAT_MRT3847_60248C.1
gcttgacaacttttcttatagggaactatctattgaaaagtgtgacagcttgtcatgtttgccaagaatgatactagctgccaattgtcttcaaaagttaactcttggaaatatccccactttgatttccttcccagctgaaggctttccaacgtcattaaaaactgtgagaacttagaatttctgtctctcgaatcatggcacaaatacacatcacttgaatctctgtatattggcgatagttgtcactccctagtgtcctttccatttgattgtttcccttccctacaatatcttcatatctggggttgtcgcagtatggaagcaattactactcgcggtggaatgaatgctttcaaattatctcatcttaatgtcacggattgtaaaaaacttaggtcacttccagaacaaattgatctccctgcccttcaagcgttacacttttatgagctcccagagctaacatcattgcccccaaggtgtttgccttccagtttacaatcactttctgttaatgttggaatgctatcatctatgtctaaacatgagttaggtttcctattccaacgcctcacttctctgt

SEQ ID NO: 98821 - DNA, 435 bp, Glycine max
  Clone ID: PAT_MRT3847_60249C.1
ggctcgagctactaccggacgttttagacttcttcaaggatgttgctaacctagagccagcagcaaaggtgctggacttctcaaaggctcttcaggtcattatgttgataggcattggactgacactgacttaaataatttgatccagacgcaattgaagtttttggctgaggagatgcaagctataaacaaaggattagaaaaagtggtacactgaactatcaacctatgaaaatgatgggcctatatcaaaaactgtctgcaaggtatagcgtcatgccttaaacactattgacttatcttttcttaaattgcccttgatcattttcattgcttcaagattcatatatatatatatatataaggaatgatagagttactcttcatcctcagcattcattgtcttggactctaatcgataagattagtgactta

SEQ ID NO: 98822 - DNA, 407 bp, Glycine max
  Clone ID: PAT_MRT3847_6024C.1
aaagcgggaatcggatgagcttgactgattgaagcgagggaccttttagtttataacggcgacggacacgggagcgttatgtgatgcaaaacaaccaggaaatgctcgcatcggacggaggtgacacacaccacactcaggccttgttggaaccactgcattatatatccgtgaccaaggtaggctctagagacagtgaggcagggaccacaagggtcaacgaccatccatacgtataggcaaaagtgttgtttgggaatagacgtagtgctcataccaggcgagcgacatgcggacacgctggtctgggagaaagaatatccagatccacattctgcactaccgatagcaacggatgtgcatccagaacgtacgctacactgctagctgtacacggtaagtaaatc

SEQ ID NO: 98823 - DNA, 225 bp, Glycine max
  Clone ID: PAT_MRT3847_60250C.1
aacatactgtctttgtcaatttagtattcgtagtttcttttttggttgtgaccaaccctatttatttttacgtcacaaaccagttaatatgataacaatatactttggggcgaagtcagttgatacaaaaccaaaaaacaccagaacttatctgaaaaaatataaaacaacaacagaccgcaggatgaccaaaaaactcgagacatgcaaccacccgacaagaca

SEQ ID NO: 98824 - DNA, 278 bp, Glycine max
  Clone ID: PAT_MRT3847_60251C.1
tcccctgtctctatctgttgcgcattatattgtactttcctttctccttatctcccatccgatggcgccgcacctctcgtcgcttcagtgtattgtgcctccttgtgtctaccatgatatccttacacgctctctacaattgcgatgcctacatattttgcttgcagaataggatctacgagcactgatagtgactggggggaggctgacttggagcgccctgcttaccattatcagtgacccgggctattctagactatgctaatgagtttaacttt

SEQ ID NO: 98825 - DNA, 276 bp, Glycine max
  Clone ID: PAT_MRT3847_60252C.1
cggctcgaggcgctctctctccaaaaaaaaaaaaaaactggcaaatttgcaaaattcttttaaaagcctttaaacggaaaccctattcataaacccctagttttaacttaattggttcccctaaatggattggttttcccctttggaaaaccctaattctttcctggttatggaagagggatttggggaagaggaattgggggctcatagaccatttggtaaagggtgcttcgggggcttcggaggcggttgaattatcctgggttctggtggaag

SEQ ID NO: 98826 - DNA, 577 bp, Glycine max
  unsure (1)..(577): unsure at all n locations
  Clone ID: PAT_MRT3847_60253C.1
acagcactgttaagacgctgccagattggtggttgccaatgcagtggggacacagagataaaccttgtatagatcttacccaaccaaacaaggcatatacagtataatggtcttataactgacatagaaagaggagagagaaaaatgaaacagaggctatgttataccaattttctatacagtgtacacaaaatcttttcctcttacaacttgtgcatctcacaaccctgcctttatcatttctctggcattgatgacacattaaggactcctctttaatgcacttaggatctttcttgctgatgtttggcatcacggcttctgtattgactttaggggccctgagactatagtgtttctgaatgccacttcctggagaatccgcaggcaactcaccatcatcttccttaagcgtctttctttttcttccgtgcctcctatcanntaccccaccattttcaccatgnnntttgtcttgaacatctttctccnnnaacaaattgtcctctagcatctcctnnnttttcatnnnntccttcnnnttcttactttttctgccatgctnnnttgccgcaac

SEQ ID NO: 98827 - DNA, 773 bp, Glycine max
  unsure (1)..(773): unsure at all n locations
  Clone ID: PAT_MRT3847_60254C.1
tncnccacttgagaaagtcacgactcttagtccgcccgaacatcaatttcgtttccatcacgtctgaatcaatttgattctcggctgcaaacaatgagttacaaaaagaatttacattacatggcatcaagttccagataaaaccagataccaagtacaaagataaaaaaaaaaaaaaaagactcacaacagagttccatctacttccaaaagaagaatctgtaacatcaattgtcaagttcgaatccgctaatagattctcacatgcttatgcttgtacattctaattccacttattcaatccctaattatgtatgtccacgaaacgaatgggttagtgggggaaatatcacacacatgcatcctaaattctaacgagttagcagtgcataacagaagaaaaccaatcgaaaattccaatagtaccccttcagcgtttccaagcgtaaacgagcagagagaaaccaacaggaacgaccaactcattctcctccacactggaccattccaagacggaggagcttccaccgaaagacccaccggaagacgacagcgaagaagaggaccaagtcttgccccattccgaagcccccaaattccacagcgcaaccaggttgttcctatcccccccgaccgcctcaaccccgccctcctcgtgtttttgtccatcagccaggtataaagatcccacgagatttgcacnnncacgccgtcaacctggacccnntcgttccctctgaacttccacttcagccnnnnnanctnnagcacct

SEQ ID NO: 98828 - DNA, 232 bp, Glycine max
  Clone ID: PAT_MRT3847_60255C.1
accttattcatttcgatggcttcatgtctatgacgttggtaggggacagagaaatttcaaccccacatcagacccaaggatattaaaccttgtagagcctgtgagagagaaatacacaagccagacctatctttagggaggactgctatcagattcaggactgctaagacacgtgccagaaatatgcgttgaaatgggaacattcacccggcatgcggactgaggatgtctt

SEQ ID NO: 98829 - DNA, 311 bp, Glycine max
  Clone ID: PAT_MRT3847_60256C.1
ctcaatagatgttattctcactcctagatacattcattcataatctttttcttactttcttgtgtgtgggactgtgggtgtatccattcatccgcctcaacattttcatctccattacacttgccttttgcccaacacttatggatgccgagcaaaatggtctgatataatttgacatacatgccattgcattacatggcatgtttcacgtcattgcaatatgctggtgttctgatgctgccagagttaacatcagggattcctataattcctacatcaggggaatgaatactgaagtattatcctatctg

SEQ ID NO: 98830 - DNA, 406 bp, Glycine max
  Clone ID: PAT_MRT3847_60257C.1
aacgtgatagtttttttatagggtcaccaaaatgaaatccctgggccgaccttttataaccccctgactggaaaaacccttttgttcccctgtttaattgccttggaggacatccccttttcccctcttggcgaattacccaaaaggcccgcaccatgggcccttcccatgagttgcccattatgaatggcaaatgggacgccccctgtaagggtgcattaatcgctgggggtggggttgttacccccttattgaccgttactcttgccatttccctaccccccggccgtttggcttcgttcctttccttttaggcggctttctcggggtttcccattaagggtttaaatgggggtctcccttaagggtcccgattaagggctttacggacccatggccccaaaaa

SEQ ID NO: 98831 - DNA, 346 bp, Glycine max
  Clone ID: PAT_MRT3847_60258C.1
ctcgaacagtaccagagcaaagagtcaaaatcacactatcccaatatgcaaaacgacaaaggccaaggcgtctcgcacgccgcagagtctcggttgcctcagaaggtgcaagaaaaggctccctcaagcctcgaacaccagatccccgacgccgctcacgacaccaacagcaacaaagacactggcaaggtgtcgcatgcgactggcgactcaaaggtgccgcagacgctgcaggaggggctacctgcgaaggtagaaaagattgtcccaaacgccattcacgacacccgtggggctgatatttagatgagcgttataagaatgattggagtcgttgcatttgttg

SEQ ID NO: 98832 - DNA, 2071 bp, Glycine max
  Clone ID: PAT_MRT3847_60259C.1
ctcttcacccatcaaaaaaaacactcaatgaagggagttacagtgaaagttgaagaaacaatggcgtatgctaatgctgcttcaactagcccaacaacatcttcaaacctctccccgcaacccatggaagggttgcacgaggtgggtccccctccgtttctcaccaaaaccttcgacgtggtggaagacccatccaccaacgacatcgtttcgtggagcagatcccgcaacagtttcgtcgtttgggactctcacaagttctctaccaccatcctgcctcgctacttcaagcacaacaatttctccagcttcgtacgacaactcaacacctacggttttagaaaaattgatcctgacaagtggtagtttgcgaacgaagggtttttggcggggcagaggcaattgttgaagacgataaagaggaggaggcacgtgacagtgacacagacacagtcacacgagggaggaagtggggcttgtgttgaattgggggagtttgggttggaaggtgagatggagaggttgaggagagacaggacagtgttgatggctgaaattgtgaggttgagacaacaacagcacaactcgagggagcaattgggagaggttgaggagagacaggacagtgttgatggctgaaattgtgaggttgagacaacaacagcacaactcgagggagcaattgttgtccatggagactaggttgcaagccactgagaagaaacatcaacagatgatgaattttctggctaaagcactcaacaaccaggcttttattcagcagtttcttcaaaggaatgctcagaacaaagagttgcaaggtgcgagaagaaagaggagactaactgctaccccaagtgtggagaatttgcagcaagatcatttcgctttgtcaattgaagaaggatcggctactattgagtcacagatggagtcttttttctatttgggggagatgggtgattctgattgagaggacttgctgaaacaagacttggttgctggggtccctgaagagggagttgtgattggtgatttttcaaaagttgctgttcctgtggaggatttgattgcggatgctgatgagtggagtcctgaagaggaagttgtgattggtgatttttcacaagttgatgttcctgcgtagtggtaaggaaggattttcattatctagggggttcagataaaactttccctggatcacatgggttatcttgggtccaaaccgtagtggaaaggaaggattttcattatctagggggttcagataaaactttcccctttgaaccgtggtggtattatttcataaggcttcattgtttttttgttgatatttgtcgtttgataatttctgtgattgtaattgatgtagaatattggatggttctatatgcagcagcgaagatggtaatactagttgaagaagtggtcgacagatattgcctcattatccgtatcctttgtaaagaatatgatgttttgtgaatagctgagtattcgttgtgctagtgatgatgctatttttactcttctgttgcccagtttataactacattgtacatttttgcagggtaggttactcaaaagcagatgttcaatggggtgtgatcgactgggaaaagaagtagtattagtctaatcataatttgttggattctcaaattttcagtgttgagggaggttgtagtaagatcatttgattgattcttgtacggtggctgattccatagtggaacatcaattaacaattctttgcttaccagtcatctcacctgatttaatagaggaataagcattcgtctcccttttcaacttttattttgttcaattatttgtaatcattgagttctgttgctctttctgttaaaaggttatgttgggtacttttttttttttttttttactgaatgttgggtaatttctgagatattactccatctctatctatgaacatttcaattcttctaattaccaagtcagtccttaagttcatgtaaaaaaaaaaaaaaaaaaaaaaaaaaaaaaaaaaaaaaaaaaaaaaaaaaaaaaaaacaaaaaaaaaaaaaaaaaa

SEQ ID NO: 98833 - DNA, 185 bp, Glycine max
  Clone ID: PAT_MRT3847_6025C.1
gaagttggggtggggaaaaaaaaaacatagtccattatgaaccgtaacttttaaaccttggtgtggctaacgcgagagggttcgattaagttgctagtcgatgtttttttcctgtacctcgaactcgttacactcggaaatcccgtttgttttcaaaaccgacttcgcaagcgtgaccaccacgc

SEQ ID NO: 98834 - DNA, 498 bp, Glycine max
  Clone ID: PAT_MRT3847_60260C.1
tgtttcttcaaaggaatgctcagaacaaagagttgcaaggtgcgagaagaaagaggagactaactgctaccccaagtgtggagaatttgcagcaagatcatttcgctttgtcaattgaagaaggatcggctactattgagtcacagatggagtcttttttctcagctgcgtgtaatgatccgttagaatcaaacagtgaactcaaagacccaatattgagttcagttccagttgcaagtgggagtaatttgggggaggtgagtgattctgtttgggaggacttgctgaaccaagacttggttgctggggaccctgaagaggaagttgtgattggtgatttttcacaagttgatgttcctgtggaggatttgattgcggatgctgatgagtggagtgaggatttgcagaaccttgtggatcacatgggttatctcgggtccaaaccgttcatgaaaggtaggattgttattatttaagttgcttatttcaatctttcat

SEQ ID NO: 98835 - DNA, 360 bp, Glycine max
  unsure (1)..(360): unsure at all n locations
  Clone ID: PAT_MRT3847_60261C.1
gcccttattgttctgtcctttactgtttgtctaattactggtaattanttgagcanttttacatttcagcttgctcagaagatcaaacagcgctagtnaatatatactttgaggtcagcaacangagcatattattatttccgaccgcataatggggtagtagtagaattcaacacgtggcgaggtggcttaagcgaaaaacgacaatattttactatgcagacccacggttnttcttatgcttatgcctttcagcgggtggcctggcttctggtcctccccanctgtacnnagccagtcgatagaccagtnggggagtgnnttggagaagtggtttcgtcaaacatcnnntgagcaccg

SEQ ID NO: 98836 - DNA, 193 bp, Glycine max
  unsure (1)..(193): unsure at all n locations
  Clone ID: PAT_MRT3847_60262C.1
ttctcttaataattaatgancaaaaatgccctttgtggcctgttaatagaggtatatcatcacaataaaacattaaataatgtcatgtattcccaattaagcaaaaattcctctcttttttttcagtaaactacatctccacctaataattatatgtgttccctcctgctccttaaaaatattccttaattcc

SEQ ID NO: 98837 - DNA, 2637 bp, Glycine max
  Clone ID: PAT_MRT3847_60263C.1
gtccaaccaagccttcgttacggctgcgagaagacaacagaagggggactcgaagtgtaagcactgagcagttgaggaaatgggaacccttgggagagcgatctacagcgttggtaactggattcgagaaactggacaggccattgatcgtctcggttcccgtcttcagggcggttactacttccaagagcagctctctaggcatcgaactctgatgaacatatttgataaggctcctgttgttgataaggatgtatttgttgcgccaagcgcctccgtcattggagacgttcaacttggaagaggatcatccatttggtatggagttgtcttgagaggtgatgttaacatcatcagagttggaaatggaactaacattcaggacaactctctggtgcatgttgcaaagtcaaatttaagtgggaaggtgttgcctacaattattggggataatgttactgtcggccacagtgctgttatccatggttgtactgttgaggacgaggcttttgttggtatgggtgcaatactacttgacggtgtagtagttgagaaaaatgccatggttgctgctggtgcccttgtgagacagaatacaagaattccttctggcgaggtatgggcaggcaatcctgcaaagttcctgagaaagctcactgacgaagagatagctttcatctcccagtcagctaccaattatactaaccttgcacaggtccatgcggccgaaaattcaaagtcctttgatgaaattgagtttgagaaggtgctacgaaagaagtttgcacgcaaagatgaggagtatgactctatgctgggtgttgtgcgtgagatcccaccagagcttattcttcctgataatgtcttacctgataaagcagaaaaagctcttaaaaaatctggtatttaaaagcagtgtttttctattccaatcttgaaatgacatcatgggactctattggacggctgcgataagttcacagaaagtcacaaaccgaaccacttattatctctctctctctgtttcgctttcaccgaaagaataacttgactttcccgaactccacctgagaacaaagatcacccttaattcgcaggcgcgtcttgtgttggacaacaaccacaagatgattaacttcgaagaaaccgagttggcgactcggcctaccctggacaacgactcagcactcaagggataagtgctgtccaagagaggcttcgttctgaaactgcttctcttgatttgaagcttagtctttcttcttgcattaacgactctgcctcggattcaccctcatctatgtctacagagaagcccaaagagaacaagactaccactgatgaacctcctcaagctaatgatccagcaaaacccacctgcaaaggcaccaagtggtgggttggccaccagttaggtcatttagaaagaacatagttcaaaggaacagcaatgaagaagaggcagagaaggagcacgaagaatgctttcgtagaaggtgagcatggatggtgcaccgtatctacaaaagggtggacataaaagttgtacaagaagctaccgatggagctgtcagatgcgctggtctaaagatgttcagttcctttacgatttgaaaagtgtgggtcccaagggatgaaggattttatgaatgaggacctaatggctctggactatgtacccacatatgaagacaaggacggagactggatgctcgtcggttgatgtgccctcgaggagatgttcgttgaatcatgcaagcgtcttcgcataatgaaaggctccgaggcaatcggtcttgcgccaagagccgtggaaaagtgcaagaacagaagctgaagaagtgatttcatctgcgtcacaaggaagcaaattgactcgagcaagatcgagtctaatataggaataagagtttaattatcatgtgcctttgttatcttttttgtaattttcttatatgtgtattatatgaatatgagaaaatagttggaaattcgttagggacacgaaataatatagaagatgtttatatgatcccgtttttgtttccaaagtaaaaaatgtgactttgtctattcagatgctagcttgattatcttatgtgagtattaatggtatagaagaattttttgcaattccatggatgagggattctttacattcccaataattcctaacattttctgcgatagaattgtagctccttacggtccaggaagcaattgttccataaattccgaactctgttgtctaatttgggaaaggcaagtgccatgtaggatatcgtatgctgatctttagtgtttgatgtatccaatgcaagtgatttcacattccccccccttactttttttatgttcaagttgttgttcgtcaacttggtgcataagttctcgttgacatctttattaatgaggacactgacgctaatgtttttgttttaccacctgcaaagtcagttcttcttctccttatgctttcccttgatttcaattccatgtgtttcttcccatagaaaatttggttctttttttttttttttttttgttggtatgaaaagttttagtttgagacaaaaatttgaggattctatattctgctatgctgctggcaactactcatcactcaagggaagtgct

SEQ ID NO: 98838 - DNA, 828 bp, Glycine max
  Clone ID: PAT_MRT3847_60264C.1
gcaggcaatcctgcaaagttcctgagaaagctcactgacgaagagatagctttcatctcccagtcagctaccaattatactaaccttgcacaggtccatgcggccgaaaattcaaagtcctttgatgaaattgagtttgagaaggtgctacgaaaaaagtatgcacgtaaagatgaggagtatgactctatgctgggtgttgttcgtgagatcccaccggagcttattcttcctgataatgtcttacctgataaagcagaaaaagctcttaaaaaatgaggtatttaaaagcagtgtatttctattccaatcttgaaatgacatcatgggactcttatggttttttgcaaattcatggaagagggatttttttcattcccaataatacctgacattttctgcgaaagaattgtggctccttacgatccaggaagcaattgttccataaattccgaactctgttctctaatttgggaaaggcaagtgccatgtaggatatcgtatgctgatctttagtgtttgatgtatccaatgcaagtgatttcatattttccccccttactttttttatgttcaagttgttgttcgtcaacttggtgcataagttctcgttgacatctttattaatgaggacactgacgcctgggtttttgttttcagtgtggatacatgcatcttcctttttgcatattttctagccaattgaaaaattacagttaggataatgattatttcatggagggtgaaaggcttcccttgtgtagttcccagaaagaatagaagtgggccatctaaaaagtagtaaaaacgaacttatgggtccttttc

SEQ ID NO: 98839 - DNA, 586 bp, Glycine max
  Clone ID: PAT_MRT3847_60265C.1
taagtggctgaggaaatgggaaccctggggagagcgatctacagcgtgggtaactggattcgagggactggacaggccattgatcgtctcggatccctcctccacggcggttactacgtacaagagaattcggctcgagctcgagccgattcggctcgagtacggctgcgagaagacgacagaagggggaagcactgagcagttgaggaaatgggaacccttgggagagcgatctacagcgttggtaactggattcgagaaactggacaggccattgatcgtctcggttcccgtcttcagggcggttactacttccaagagcagctctctaggcatcgaactctgatgaacatatttgataaggctcctgttgttgataaggatgtatttgttgcgccaagcgcctccgtcattggagacgttcaacttggaagaggatcatccatttggtatggagttgtcttgagaggtgatgttaacatcatcagagttggaaatggaactaacattcaggacaactctctggtgcatgttgcaaagtcaaatttaagtgggaaggtgttggctacaattattggggataatg

SEQ ID NO: 98840 - DNA, 1233 bp, Glycine max
  unsure (1)..(1233): unsure at all n locations
  Clone ID: PAT_MRT3847_60266C.1
aactggaaacattgacattatcattaagcaggcaatagaatggacaaagtcacatatttttacctggaaacaaaaacgggatcatataaacatcttctatattatttcttgtccctaacgaatttccaactattttctcattcgtataatacacatataagaaaattacagagacacataataataataattataattaaactcttattcctaaaagagactcgatcttgctcgagtacatttgcttccttgtgacacagatgaacaaccaagccgattgttgtggccgaaccctaaaatcacttcagcttctgttcttgcacttttccacggctcttggtgcaaggccgatagcctcagaacctttcattatgcgaaggcgctggcatgattcaacgaacatttcccagggcacgtcaccgacgagcatccagtctccgtccttgtcttgataagtgggtacataatcagagccgttcaaaaggtctatcaatttggtctcattcataaagtccttcatcccttgggacccacatttttcaatcgtgaaggaactgaacatcttagccagcgcatctgacagctcctggtagctcttgtacaactttatgtccacctttcgtagatacggtgcaccatccatgctcaccttcacgaaagctgcttcctcttcattcttgttcctttgaactatgttctttctaaatgacctaactggtggccaacccaccacttgtgcctttgcaggtggttttgcagggtcgttggctcgagaaggaggaggaggtgcagcagtggtagtcttctctgtagacgcagatgaaggtgaatctgaggcagagtcatcactggaagaaagattaagcttcaaatcaacagaagcagtttcagagaagcctctctttccaccactgcccttgaccgttgttgactcgttgtgatcactcgcagacccgccagggaggccgagtcgcaactcggtttcttcgaagttaatcatctcctcgtgcttgtttttcttttctggttcttctgcgtccaacacaagcactgagtcagaacaagtgcgtgcgtgcgtgcgtgcgaattatgggtatctttttctcaggtggagttggggaaagtgaagttactcggtgaaagcgaaacagagaatgagaaaatggacggacgcgtgggcggacgcgtgggcgtacgcgtgcggtcgaaaaggaaattccggaacgngggagt

SEQ ID NO: 98841 - DNA, 249 bp, Glycine max
  Clone ID: PAT_MRT3847_60267C.1
gaaagatctaaaatcagacacagttcttattctccgttcgaacatattaccatcatttctccaaaaactggaaaaggatctggcagaaattcacaaaatagcttatgttgttgatgcatatgtctcttatgggagatccgatgatttgaatgaaaaagtcactattgcatcatcaggaagactagatgccattgcaagagcacggcctattctttccgcaatgtgtgaaaatctcttcacttttgaggg

SEQ ID NO: 98842 - DNA, 365 bp, Glycine max
  Clone ID: PAT_MRT3847_60268C.1
aaaaaaaggcctttttcctttttatctttgggggaaaaacctttttctaataggtttcaaaaccttacacctagtcttggatctttaaaaacaggcttataaaaaatagggggcctcgaaaagggattgaaaagaaaaccgggaacccccttaaacaagtcctgttggaaattcaaaaagcccatttttagggggagttccccattgtaaaaaatcacaaccttgttttgggaagggccatttggggtcccttaagctcaaatctggaaaacaacatccttccaaaaaaaaactttacaaaaaaaaacttgctttcggtcaaacaagttagtggccaaatttgaaataaaaaatggcgaccccgg

SEQ ID NO: 98843 - DNA, 354 bp, Glycine max
  Clone ID: PAT_MRT3847_60269C.1
aaaaaaccttatcttactaaccaaaaaaacaccaaaacttataactatagaatacaaaacaggcaaaaaagcctaaatcaaagacggaccgcattgaactgcatctcaaaactcatgattccttaacagcgtattctgcaactacctgcaccatgccttcaatgccacttaacaaacttctccatatcccaaacccaattctccaaaccctattctactaaacccaattagggcttcacaatcacttcaacactaaatatcacacaaacttttcaatatctccttacgcatgacgcatatgattatacaacaaagctagtctgttacgattacaccaattgagaaaacgctatt

SEQ ID NO: 98844 - DNA, 480 bp, Glycine max
  Clone ID: PAT_MRT3847_6026C.1
ttttttttttttttttttttttttttttttttttatccctccttttacattttttttttttgttttttttttttagggccccccccccctaaaatttttttaccccgcaataccaaaatggggttccgctggttaaaaatacccccaacaaaaaaaacttgttaaaaaaaaagccgcaaaaacctgccaaggtgggtaaagccaagaattttaaaaacaaatattttttttcaaggccccttaaggccgggaattttgggaatttttgggggcttccaaaaccttaaaaaacccttgaatgttaaaaccaaaatttccccccaaaatgttaaataaaaatgggtctttttggcaaaatttttctaatttaagggcataagaaaaagggcctttaaaaaaaaaatttttttttggagggaaaaaaaaaaattttttttaaataaaaacttttttacgggaatttttgccactttttcccct

SEQ ID NO: 98845 - DNA, 181 bp, Glycine max
  Clone ID: PAT_MRT3847_60270C.1
tgctcacgagcgggagagactatatatcgcgttatttggtctctgagtacctttttctcctcttgaggcattaccctttagtggtcactcggcagcctcacgtgagatccctctagtaggttcggtcgcgcagatccgctgcatgcgctacgacaagttcattcccttcagtcaacctttt

SEQ ID NO: 98846 - DNA, 155 bp, Glycine max
  Clone ID: PAT_MRT3847_60271C.1
agacaccaaaaaccaaaggttcttttttaatgggtatatgacactagccataatgttgccttttccctcaattattaacacaatggttaggaaacacacatgaaggcctttattcccactgtctcaaacacacctatataaagatgaaagcaacc

SEQ ID NO: 98847 - DNA, 2245 bp, Glycine max
  Clone ID: PAT_MRT3847_60272C.1
attgtggctcgggccagcgtcctcactgggtgtgtcctgtcctccccccgccctggcctttgttggagggggcctagggtgcactatcattgaaatgctgacaggaaaacctccttggagcgaatttgaagggcctcaagcaatgttcaaggtactgcacaaatccccagatctacctgaaagtttgtcttcagagggacaggatttccttcagcagtgtttcagaaggaatccagcagaacgaccatcagcagcagtgcttcttacacatgcctttgtacaaaatttgcatgatcaagatgttcaagttcattcccaagggcaaaactgtcccagaggagaccctggaccaggagatgattcacgtagacatagccccggtaacagttcaagaaatagccgtggtgtagggtcagcatccattcgtgcatggttttttaacaaaactcataatttaataggtgtcacttcgaaaaaatatgtttcggaggattctaatcatgtcacatcttctcgtgattctccttgctcgatgacagaaatgaacaatcctcagtctcccatgaaatctagtgcccttaactacatgactgtaaccaatcccagcaacatacccctcagtgctgttatgaaaatcatcaggaacatttgaagctaagatttcgattaaaacttggaaggatcgtgacagaagactggggcatatatttttcggaagttcagcaattatcacagcagggatttagaagctagacagtcttacacgttattgaaaaatatatcaacccgaagtgttgaaataaatgataaattcacattcatttgcagttattatgtacataataacaaggctaggttagttgaacctattaccacatgacagattcacatgtaaatttaattgattatatgatattttagtatttttttattttaaaggaaaacttatagggcgtggatcctcgggatctgtttatcatgcaaccaacttagagactggagcctcgtgtgcattgaaagaggtggatctgttccctgatgatcctaaatctgctgactgcataaagcaacttgagcaggaaatcagaattctccgtcaattacaccaccccaacattgtgcagtattatggcagtgaaatggttggtgatcgattgtacatatatatggagtatgttcatcctggatcacttcataagtttatgcatgaacattgtggagctatgacagagtccgtggttcgcaatttcacacgacatattctctctggattggcatacttacatggtaccaagactattcacagggatatcaaaggtgcaaacttgttggtcgatgcatcaggcagtgttaagcttgcagattttggggtgtcaaaaattctgacagagaaatcatatgaactttcattgaagggaagtccctactggatggctcctgagctcatgaaggctgccataaagaaagaatccagtcctgacattgccatggccattgatatatggagcttagggtgcactatcatcgaaatgctgacaggaaaacctccttggagcgaatttgaagggcctcaagccatgttcaaggtactgcacaaatccccggatatacctgaaagtttgtcttcagagggacaggatttccttcagcagtgtttcaaaaggaatccagcagaacgaccatcagcagcagtgcttcttacacacgcctttgtacaaaatttgcatgagcaagatgttcaagttcattcacaagggcaaagctgtcccagaggagacgctggaccaggagatgattcacgtaggcatagtcccagtaacagttcaagaaacagccgtggcgtagtgtcagcatcctttcgcgcacggttatttaacaaaattcataatttaataggtcctcagtctcccttgaaacctagtgcccataacctcatgactgtaaccaatcccagcaacatccccctcagtgctgttatgaaaatcatcaggaacatgtgaagcatgtcacagctaagatttcgattgaacttagaagggtcgtgacagggactggagcataaatttcttcgggagttcagcactcttagtggataagggcaattatcatagcagggatttagaagctagacagtcttacacgatattgaaaaatatatcaacctgaagtgttaaaagaaatgataaattcacattcatttgcagtaattatgtacataataacaagctaggttagttgaacctat

SEQ ID NO: 98848 - DNA, 278 bp, Glycine max
  Clone ID: PAT_MRT3847_60273C.1
ttctcctacgcttccgtttacgcggttgtggaaaaggacccagagagcaccttaaagcccactttatcagaataacattgaattatccattagtaggacagggaatgactgacaaccccatgaacgccatctttgttccttcttctgtccccgtagaggtttttctgtttgaggtggtgggcatcaccagttttggcagcttcattgaagctgccagtggtgaaaactttgcctgtggttcttcaaaagactactgactgttttcccccaagattggg

SEQ ID NO: 98849 - DNA, 598 bp, Glycine max
  unsure (1)..(598): unsure at all n locations
  Clone ID: PAT_MRT3847_60274C.1
cggccgcgccttcatgatgaggataacccttaacctgagttaccctgatttatccgcttccatggcaacaccttcactctcctaagaaatcaactatttctataaaacctccatcaatatctgaacaatgcactctccactccgctcgatcagtatctatctacctgccactctaacacaaaccttgcaaaccaaaatttactataccccttaaacaacaaacccttactacgacaaatgacacacattggattcccaacctcatcacgcacgacaacaatccgtttaattccccggaacccccagaaggggtcgcggcgcctccctacttagacaaccgccctatggagaccgacgacgaaatatccgctgcctacaatgagctaatacagncccacggtacacacggtgtaataacccctcggccacgaagagtacggtgatggacacaaatgtgaacaaagagaccggttcacgggtctctgtgccagagaaagagaaggtcatggacgggttcaccgagaggatggtgcacgtgacgagggccaccaacgtcgtcaacggagggaaacacttcatggtccttgccaacttcgac

SEQ ID NO: 98850 - DNA, 693 bp, Glycine max
  Clone ID: PAT_MRT3847_60275C.1
ccaggcgtccggcaatttcccatctttgaaatcggagaaatggacagcgacatttcccagtgggtgacggagttcctactccgcagctccgtccccgattccctaatccaaaaaaccctagccgccctccctctctctaccgcctccccccgcctcaagaaaaccctcctcctccgcaccctccaaaccctcctccgcacagccacactctccgaaaccgcgctcgacatcctcgaactcctcgcccctgtctccgacgcgcaccgccgcgcgtactgcgcagtcgccgtggagtgcaccgtcaagtacctcgctgcgtgccccgaagttatcgatggtgagtacgccggcgctgtacggcggatctggcgcggacgcgtggcggcgctgcaggcgcgccggagcgggctggtctctggggagttggtgcggtggcgcgatgagatagagaacgcgcttggggaggattccagggcggctcgcgagaggctggcggggttgaatagtcggagggacgcgatgaatgaggtgagggtgtatttgaaggaagcgtgggaaatgatggggccttcgtttttggaaacggttgcggcaacggagaagaagaacgatgaaggtgcctgtgataatggtagtggtaatggtaatgatgatgatcatgatgatggtgcatgcatggaggatgtggcaatg

SEQ ID NO: 98851 - DNA, 227 bp, Glycine max
  Clone ID: PAT_MRT3847_60276C.1
ccctcaaattcaaaaagtgctgcattgatgtcttgaagaaaacactagaatccataccatatcaagtccttgtaatacacttgttgtgaagttggcagttcaagagctaagtagactcaatataaaaatgaatttttaaattgattaatccagcgtaaaatgactaaccttgtgtttattagctactagaaattagaattctacttgctcattactcacatggaacc

SEQ ID NO: 98852 - DNA, 434 bp, Glycine max
  Clone ID: PAT_MRT3847_60277C.1
aaaaaggggaaaactagcctattaatttttttagcatattttaggaggaaccggggaagccaacccctccctaaagacaaaaaaatggaaattttataaattggaatcaaaaaacaggatggatttcttttccatcccgatgggggatagggggagaaaacagcatggttggaacatgttcatcaacggggggcttgtttggaccatccccatggcgaaaaaaaactggaaaagttctacccctgtggaaaaaacccctcataactgacaaaggaaaatggggggccatggaaaaaccatttacctcgggccataagttatctatgaggggccttaaaagttcccgggcaacattttcatcggaaatattatttggtttcaggaaacattggatgctacaagcattaccacctttttttggctcatccctgggg

SEQ ID NO: 98853 - DNA, 237 bp, Glycine max
  Clone ID: PAT_MRT3847_60278C.1
accacgcgttcggccagacaatggaccaaagctaatgtctatgtaacttcttttttgggcgtgggtgagacgatggtcttaggagctggtgttataaagatatagtgtttgttatttttcttatttttatgttactagtactggttattctattccaatataagcaatattatattttgaaagcataaatgattaaactaaatgaatttaaatcacccttaaagaaggttatgatta

SEQ ID NO: 98854 - DNA, 590 bp, Glycine max
  unsure (1)..(590): unsure at all n locations
  Clone ID: PAT_MRT3847_60279C.1
ggaattcggcacgagggtggctcgccatttccattgaaaagaagggaccaactgcttgattatattttaactttgatgggccgggatgatgaagatggttttgctgattacaatgatcttttgcgtactcaggcccttgctataagtgcctgcactactttggtctctgtggaaccaaagctaacagttgaaactagaagccatgtaatgaaggctacgttggggttctttgctataccaaatgatcctgttgatgttgtcaatccccttatagacaacttgattactcttttatgtgcaattcttctcactggtggagaagatggaagaagtcgagcagagctgctaatgcttatcttgaggcaaattgatcaatttgtctgttctcctgttgagtatcaaaggaaaagaggctgtcttgctgtccatgagatgcttctaaagtttcggatgatttgtgtcagtgggtattgtgcactgggctgtcgtgggaagttgtgcacataacaaagcaatggaccgaactctatatgggaaatttntcaaagctgccatctgcatttgtattaccaagtcgagaagctttgtgc

SEQ ID NO: 98855 - DNA, 983 bp, Glycine max
  Clone ID: PAT_MRT3847_6027C.1
attccttcactagccttttttacatcccaacttcatcactctcttcccaaaatacacttctctctcttaactccaacaagtttaacccctcttctcttcccccattaaaacctatttcaccaatccaacaaggtgctgctcctgcttctggttaaggttttggttgttgttcttgttagtgatcctcatggacgctgcatcggaggctgcggcggcggtggcggctccacaggcagagggatcaccggctgcggcggcagcgccgagccgctacgagtcgcagaaacggcgcgactggaacacgttcttgcagtacctgcggaaccacaagccgccattgacgctggcgaggtgcagtggcgcccacgtgatcgagttcttgaagtacctcgaccagttcgggaaaaccaaggtgcacatcgcggggtgtccgtacttcggacacccaaatccacctgccccatgcgcctgccctcttaagcaggcctggggcagcctggacgctctaatcggacgactcagggcggccttcgaagaaaacggaggtcgtcctgagtccaatccgtttgcgactcgggctgtccgaatttacctcaaagaggtaagagaaggtcaggctaaggccagaggaatcccctatgagaagaagaagcgcaagagaactgctgtaactacctctgtcacctctgccgccaccgttatgtctaccttaactggtagtagtcctaataatactattacaaacggtgctggcagtaccaccggtaacactaccaacggagctggtgttagtgtaccttctgttgctgctactgctacacctaatgttactgctactgccgtatagtataattttaataattttgatcatcttttcctattttcctttttatactgctattatctactatctatttttatttttaaggaaattaattgtggttacggtttatctatatgtagttatttagttatgacaattt

SEQ ID NO: 98856 - DNA, 120 bp, Glycine max
  Clone ID: PAT_MRT3847_60280C.1
catctacaaggggaatccctccaattgccttaagctgctgaacaatcctcaaacctgatggttagaacctactctctcataacaaatacctccttcttgctatcaaaccacgttcagtcc

SEQ ID NO: 98857 - DNA, 492 bp, Glycine max
  Clone ID: PAT_MRT3847_60281C.1
actaactataaaacatccaaatccatgagtaattagtttcacaatgaaatcctactttattacacttttgaaagacatgctttatatataaaatggttatcaacttatcatgcatcaagggaaatcataaactcccaaagcatactgctcacgctttctagcatcactcatgaaatttgagagtgctgagttatagaaagctcccttaattgcttaatactcattccaccaacacatgtagctgctttgcgccaagaaaatctctggagatactgcatagttcttgaccaacccataaacgtactcctcaaatataaccaatttcttcaatgtctcttccttctctctaacaacgttcaactacttgcatgaaaggagagcctcttcaacattggcccaaaagcaagaatcaaaggttaaaagtggcttcacattcttcttacttgtactgctgtaatcacttgatgcttttctagtcccttcatttaacca

SEQ ID NO: 98858 - DNA, 421 bp, Glycine max
  Clone ID: PAT_MRT3847_60282C.1
ggtaaaatggatccattgaccaaattgaaagaacgtgacaacaacttaggaaggaaagagcggggaggcagcatgagtggcagctccatatctgaacatcaccatatattgtggggtaagacacacttgccatagggaagagaggttaaggtggaattggtctggagacaaaaccgcaagaatgttcaaccatgagtgctttagaacaacatcctattttggccaaagggttaaatttccatgcaaaaaggtatgggagaaataacgggtttctaccttaggagaggttctggaatattaagccattcaaagcttctcatgccgaatcaaagttaatcactgggaaatcgccatctgtgcctttttctgtgcctgaaatttgaggcgaccgaagtagcttactggactatggcttgagtga

SEQ ID NO: 98859 - DNA, 790 bp, Glycine max
  Clone ID: PAT_MRT3847_60283C.1
aattcggctcgagatgagatgtatcaggtcaatttgattcttgataatttgcctgctattaggttcacacagaaagaagggtactttctgagatggactgggtaccctggtggtattaagattgaggatgcctattatgtgtttaaccatctcaagttcaatgttcttgtccacaagtacgaggagaccaatgtggctcgtgtgatggggactggtgaaggtgcagaactgatcccggttgtcaagcaggggtcttctgagaagcccggatacatggttgttgggtttgaggtgattccttgtagtattatgcataatgctgattctgcgaaaaccttgaagatgtatgagaagtatccatcgtctatcagatgcgatccagccactgtggcaatgcctatcaaggagggtcagcctgttgttttcacttatgaggtcacctttgaggagagtgacatcaagtggccatctagatgggatgcttacttgaagatggagggagctaaagtgcattggttttctatccttaattcgcttatggtgatcacttttcttgctggcattgttcttgtgatcttcctaaggactgttaggagggatctgacccgttatgaggagctcgataaggaggctcaagcacagatgaatgaagagttatctggttggaagcttgtagtgggagatgttttccgcactccgacaaatcctgctttgttgtgtgtgatggttggggatggagttcagattcttgggatgtctgttgtgacgatattgtttgctgcacttggat

SEQ ID NO: 98860 - DNA, 1248 bp, Glycine max
  Clone ID: PAT_MRT3847_60284C.1
accaccctccgcgctccacgctcgccttccgcctcattctcgagccccgccaccagggataatgccggaggcccctatggcgccagaggacgtacttcaggaagtggtgaaaatgggtttctacaacatgcagtggagttagtttgctgggattcctggtcatcacgaaggaatggttaacaataatgtagataataataatttctttggagatgattccaacatcattgagaatgatgttgttgatactatggattccggtttaaatcaaatgcattctttagaactcgcttcttgagttgtatgtgcttgctcttcaaacggtgtggagtccacagtttcttttcttggatctatgtgctgctttccttgcacagcggcccttgcgcttcagtctcgagcccatcctcgtgaaataatgactgaggttcttaaagctttgcaagaattaaatgtttgttggaagaagattggtcactacaacatgaagtgtaggtgggttgctggcattcctggtcaccacgaaggaatggttaacaataatgtgcatagtaatcattactttggagatgattccaacattattgagaatgatgctgtttctacttcaaatgtggtcaagtttgaagtgcagctttacaaaacccgggaagaaaagtatctgcttgatcttcaaagggtgcagggtccacagtttcttttcttggatctatgtgctgctttccttgcacagcttcgtgtcctctagagcgaagagcttaggctcaccagagacataaatatgccttgtgtttcatgtgaataagcttacattgtacatacaagtatcttttcggtccaagcttatcctctgttttctacccgtttatctgtgggtaaacattataatgagccaatcccaagtatgggatttgcttcgttaacaatggtgctcgactaggttttcctttctcttggtgattttaattttatcagtgtaatgaattatatggggaatgtcttaaaagaattagccccaactgacagtgatatatgtatggttatcaaccaaatgctgtaaacgactgttgccattggaagggatgtctaggctgcttctaacttttgcagattagtctttgttgtcctataaatgtaatttcatattactcgtgtatgaatgctatgtaacgactgtgttcatccgacgagccatttcgtagagtgcaaccgttcctatctcaattacttaacaaattttagatttcc

SEQ ID NO: 98861 - DNA, 248 bp, Glycine max
  Clone ID: PAT_MRT3847_60285C.1
gaacacctgttgaagaaaaaaacgccctcgccctcggaacccatgaaataccctaaggagggggcattctatgaagatacgatccctaatttgcagaaatcctctcaaaagacgctttgaaattcaacgctgaactgcaaccagagttcaagagcgacatctaccatgcattacacagcacaagagatgcgaagactaatgcccatgcagggactcttccggtgtttgatccttccacccatcacatt

SEQ ID NO: 98862 - DNA, 280 bp, Glycine max
  Clone ID: PAT_MRT3847_60286C.1
gaatcgggaaaagttgatgaagatggccggttcggttagaactgggggaaagggtaccatgagaagaaagaagaaggctgtccacaagacaagaaccacagatgacaaaaggcttcagagcaccctgacgagaataggggtgaatgccattccggctttagaaggaaggcaatatggttaggaatgacgtagtatacagtttctaagtccgcaagttcaggcatccgttgctgatgatactggggttgtcaggggatgttcacaaacaaagaaggagcaa

SEQ ID NO: 98863 - DNA, 371 bp, Glycine max
  Clone ID: PAT_MRT3847_60287C.1
tttttataaaacttattttacattaattatttggtagaatttattcgtttacacacaaacatcatatcataagataaggaaacaagcaacttattaggaacactacgtacgtaggtgcatatactagccagaaaacaaaatgatgattagagatacaatccaacgtgcatgtactaaattacacggttaaaggtttatatatgatggattcatagcagcattcaaacagttggataagaagcattggtagcaatttcacataaaacctttcttggcgacggatatctctcttcattcttatataccctttctcaccccatatagtgcccaatgaattttcaccagccaatacttggaccaccacgagcttt

SEQ ID NO: 98864 - DNA, 341 bp, Glycine max
  Clone ID: PAT_MRT3847_60288C.1
agggatcctcgcatttgtgattcagcacgtacagagaaccgtatggtgcatatcacagaagaagattatcccagaccactgcctaaccctatacattgtcctttctgcaatcattctagcgcacttgatgattgaagacttaaagatatagacatggctaatggagtgacagtggagggaaactataagcatgtataaaaagagtaaggtacatatatatgggaacagatatgaaatcaaaatgtataaatgtctctctctaaggattgtaataaacacatatgattaggacttgacataaaatgatcagatggtgactctatatatttatttgtacctct

SEQ ID NO: 98865 - DNA, 895 bp, Glycine max
  Clone ID: PAT_MRT3847_60289C.1
ggtccggaattccagggtcgacccacgcgttcgaaataaaacactcatacacacacaaacacttaaacatcatcaatatcgtatattcttgttgtgttgtttaagttgtaaaagaatgtctggggtttgggttttcaagaacggtgtggtgaggctggtggagaaccctgggggtgaggcagtggagggaagccgtggaggaagaaggaaggtgcttgttcatagagcaagcaacgaggttatcacctcttatgcggtgttagagcgaaaactgtattcacttgggtgggagcgttactatgacgaccctgatcttcttcaattccacaaacgctccaccgtgcaccttatttccctcccaagagacttcaacaagttcaagcccatgcacatgtatgacatagtggtgaagaacaagaacgcttttgaagttagggacatgtagggtagggacaagacaacatatatatatatatatatatatagggaccaaacaaaaaaccccccttgcaaggccttcggccagggcaccctgctactgtccagtgtcagtgtttgtgactttttgtactactaccactcattcctttaattgtgccctttcattttcattatttagctgctgcatccatgcatgtgttagtttttgaatgtttcattttcgacttgtggccatggagggtggaagtctgtgtccatttgattgtaacattaacttgggtatttggactgtctaggtaagtctatgttctgataaatttcatgtttatgtataggtatatataggtagggtctgattcgtcatttgtgaggactgggtgtcatttacgtgtgttcgatccgttgtaaaattttggtcattctgcaatcctataaatttttgagttttttctcc

SEQ ID NO: 98866 - DNA, 1947 bp, Glycine max
  Clone ID: PAT_MRT3847_6028C.1
tttacgcgtccgattggaaactacagtgatgggaatcttgttgcatctttattggcttataaaatgggagttacacagtgcacaatcgcgcatgcacttgagaagacaaaatatccagattcagatttatattggaagaaatttgaggataaataccacttttcatgccaatttactgctgacctaatagccatgaataatgctgattttatcatcaccagtacataccaggagattgcaggaacgcatccatgactgtactgagagacttataccgtgtttggtgtaacataacttgttgtctcaagattcctaaattatgcgtggtgacagcaagtgtcatggactcatggcttaccaaagaccactcagttatatgatgctatacctagtcatttcttttgtctcttgatatttctctgaaaggcatatgagctagttactattttgtttaagcatcctctctaggcatctcacatatctatccctggtgctaacctacattttccttgtaatctatatatacttttttttcagttaagctaatgttactcatttcattttcttaacctgtctttcaggaaaaatactgttggccagtatgagagccacgctggttttactcttcctgggctctatagggttgtccatggcattgatgtttttgatcccaagttcaatattgtctctcctggagctgatatgtcaatatatttcccctactctgaaaagcagaacagacttacagccctgcatggttcaattgaacagctattatttgctcctgagcagactgatgaatacattggtttattgaaagacaagtcaaagcccataattttctccatggcaaggctagacagagtaaaaaacataactggattggtagaaagctttggtaagaacagcaaattgagggaactggtcaaccttgtcatagtagctggttatattgatgtaaagaagtccagtgacagagaagaaattgcagaaattgagaagatgcatgagctcatgaaaaagtataacttagttggtgattttcgttggattgctgcccaaacaaatagggcacgtaatggggagctgtatcgctacatagcagacacacaaggtgctttcgttcagcctgctttctatgaagcttttggacttacagttgtggaggccatgaattgtggactccccacttttgctacttgccatggtggtccggctgagatcattgagcatggtatatcaggattccacattgatccttatcaccctgatcaagcttcacagctattagttgaatttttccaaaagagcaaggaggacccaagccattggaagaaaatatctgatggtggtcttcaaagaatttatgaaaggtacacgtggaagatttattccgaaaggcttatgactttggcgggagtttatagtttctggaaatacgtttccaaattagagaggcgtgaaactcgacgatatcttgagatgttctatatcctcaagttccgtgatttggcaaattctgttccgctagctaaggatgatgcaagttaactagctatataatttcaccaaaggcttgacagcagacataataagagtcatttatgtaaatataatagtctgcttctcgtgttttgaaatctagtgaggcgacctagaggagtttcatggaagacttgtcttgtctatgttaacttcgattatgtaagagatggcgagcactggttgttgaatttggatgtctcttgttttcgtttgattagtagtcatcaatgatatagacctggaaattacctgtgactgtgaggattgttatccttactgatgggtaagaataaagcattatgaatcaatggcctaatgatctgtattgtggcactgtataatgttaatgtatatgatgagacggtctagccaagccactgttgggttgggtttaacacttgc

SEQ ID NO: 98867 - DNA, 790 bp, Glycine max
  Clone ID: PAT_MRT3847_60290C.1
aaggcaggaactgtatcaataacattccaccttcatacaacaaacttgctttacaactgggtagtcaatgatacaccaaccaaaacccaaacatcagggcacgaatgcaactaaaatcactgttgagaaccatcaaatcttacactatcaagccatgaaacaactatttcaatagagggtctctgcctaggatcttggtttaggcatttacacgcaatggcaagcacctccaatagctgtttctcatgatccttgtgccaaattactggatcaaaaatttcctgctccttattctcagatttcatctgatacacccaaaacaccagatttctgcagtttttccccttgatgacttccacaggccttctaccagtaagaagctcgagaagaacaacaccgaaactatagacatcacccctgaaggttgccgtcagtgtctgactatattcaggaggaatgtatcctaaagttcctaccaaatcagttgtgacatgagtgtcatacggttgaagtagccttgagagaccaaaatcagccaaatgagcttcaaagttgtcatccaaaagtatgttgctagatttaacatctcgatgcactatgaatggttcacaccccttatgcaagtaagctaatccgcgagcagcgccttgtgcaaccttgagtcttgaatcccatttgagagctgaattttcatccacacactcatgcagccaataatccaagcttccattctccaagtatgagtatattagcaatctgtcattgccgtgccgacaataacctttcagat

SEQ ID NO: 98868 - DNA, 651 bp, Glycine max
  Clone ID: PAT_MRT3847_60291C.1
cgaagctcggaattcggctcgagcaaaatgaaggtcatcatcatcaattcatcatactcactgtcccaaattcctcttaggtcccaacccagtaactatgattccatcggaaaccgttaattttgctcgaaatttcgcagctatggtcagagttcgtggccctttctggtggaacaactctttcagcttctgggatgctcgtacctgataccctttgtgatgctcaagtagctgggtgtctctatggtgataactgtgaggatagggtgttggttgtgacggttgcttcagttgttgagccttttctgtcacctcaacagagagacaatattcctcagggtaggccagacttgatttctggtgttcggattgatgttatgacagaggaagccaatgaaaaatccaatcagggaactccttgttggcttgcggcagagcttttgtcattagttgatattcctgcttcatccaattgtctccagtcacttattgaagcatctttgggtttgccagagcatgaatgggaggaaagattgggcgtgggagtatccaacagtgcaagtcttatgtacaaatcacttactcgaatgcaaatttgggaagtttctttatctttcagggacttgctggatagtaaagtatctgccatga

SEQ ID NO: 98869 - DNA, 147 bp, Glycine max
  Clone ID: PAT_MRT3847_60292C.1
gtatgtcggaaaagcccagcaaaaatccgagcgtgaacaagaactgaaaggaccatctgagcacaacagaaaggaagctgctgacgaatatacaagtgagaacttgtatctcacgaactgggatgatacaatcagtaatgaacaact

SEQ ID NO: 98870 - DNA, 172 bp, Glycine max
  unsure (1)..(172): unsure at all n locations
  Clone ID: PAT_MRT3847_60293C.1
tttttgcaaagttgttttgattatnggatgattgggaaagtcttcttggggaccacccattgcccttccttaacaaaaaaatcccttggattccaattttcctggtttttccattgggatggcttgaaaatgggaatggttggaccaggccttgggccccagggatggattg

SEQ ID NO: 98871 - DNA, 2590 bp, Glycine max
  unsure (1)..(2590): unsure at all n locations
  Clone ID: PAT_MRT3847_60294C.1
acctcgagccgattcggctcgagcaggtcccaaccaggaaaaatggttctgtcggatgccgttaattttgctcggaatttcgcagttatggtcagagttcgtggccctgacccaaaagggttgaagatgagaaatcacgcttttcatcaataccgttctggtgaaacaaccctttcagcttcgggggtacttgtacctgatactctttgtgattctcaagtagctacgcgtcttaatggtgataactgtgaggatagggtattggttgtaacggttgcttcagttgttgagccttttctgtcacctcaacagagagacaatattcctcagggtaggccagacttgattgccggtgttcagattgatgttatgaccgaggaaaccaatgaaaaatccaatcggggaactccttgttggcttttggcacagcttttgtcattagttgatattcctgcttcatcgaattgtctccagtcacttattgaagcgtctttgggcttgccagagcatgaatgggaggttggttggtctttggcatcttacaataatgattctcaaccttccaaagatttttttcaaactcatcctcgggaaagattggctgcgggaggatctggcagtgcaagtcttgtgtacaaatcacttactcgaatggcaattcttagtgtttctttatctttcagggacttgctggatagtaaagtatctgccatgaataaaagaggtgattttcttctggcagttggatctccttttggagtcctgtcacctatgcactcttgtatcagcatctctgtaggatgcattgcaaactgctatcctcctcattcatctgatggatcgttgctgatggctgacatacgctgtcttcctggtgtgagccatttctctgttgcataatccattggtcatttatggaagtggttctggctctattttgacactctatctaccaggaatggaaggcagtccagttttcagtgagcatgcatgtcttattggtgtcctgatcagaccattcagacagaaggcgtatggagcggaaatccagctggtgattccatgggatgccattgtgactgcttctagtggcttgctgcacaagaggcctcagaacacacagaaaggtttatgtaatcaggagggcaacctttatgctgcaggaagtgtacctttttctgacactgacaaattagatgtttgctctaggaataaacacgagcatttatattttggtagctcgtcaccattaccaattgagaaggcaatgacttctgtctgtcttgttactattggtgatggagtatgggcatctggtgttttactaaatagtcaaggtctcatacttacaaatgctcatctgttggaaccatggagattcgggaaagaacatgtaaatggaggaggatatggaactaattcagaaaagatttcttccatgttggagggaactgcatatgttgttaacagagttgagagcaatcaagttagtcaaacttcaccgttgaagatgccaattctttatcctttcgctgcgaatgagcaggggggatataagtcgagtccaacttatgacaaccatagaaacatacgtgtacgtcttgatcatatcaaatcttgggtttggtgtgatgcaaaagtagtgtatgtttgtaaaggaccatgggatgttgccttactgcagcttgaatctgttccagatgatcttttgcctataacaatgaatttttctaggccatccacaggatcacaggcatttgtcattggccatggattatttggcccaaagcacggattcttcccatctgtttgctctggtgtggtagcaaaagtggttgaggcaaagactcctcaatcttatctgtccgttcagccagagcatctgcacaaccatgagcacttcccagcaatgctcgaaacaacagctactattcatcctggtgctagtggtggtgctgttatcaattcagatggtcacatgattggcctggttacaagcaatgcaaggcatagtggaggagcagtaatacctcatcttaattttagcattccatctgctgctttggcacccgtcttcaacttctcaaaagccatggaggatttatcacttctacggattctagacgaaccgaacgaatacctttcatctgtatgggcattgatgcggccatcatatcctaatccccatcctatgcatgatccacctcagtcggttacagacaataaaagtaaagagaagggttctcggtttgctaagtttattgctgaaagaaaggacattttcaatgctggaaagagtggagtgatttctaaggaagttattgctagtaagttatgatctctgatgaagtgacaaagtttacctaaatgaccatggcaaagctttgccaacatacaacttgtcaatgactacacttccgttgattaaaatctttggactgaaatcttctgccctagattgttagccaaagaaaatcaaggaaataaattttctagaatctctaaacgattatactagtacttaattaaagtttaaaactgattttacataagacagttacttttgttttgtacttnngttgagattaag

SEQ ID NO: 98872 - DNA, 445 bp, Glycine max
  Clone ID: PAT_MRT3847_60295C.1
ccctctttcaactcataccgcatcattcgctgcgctataaaacaaaccttcacgttcttctcctctcacatatttttcatagtctgtatatcttcttcctaactaagaaggtcctctcagcgggacgctaccacgtctcggcgtaaaagggagggcgctcaggttaaaaattataccatatcctacatacttgagttgaagtatgtaacgtgactgggtaagctgccttaccgtgctcagggtcagtttttattatttactggggattgtggtgcactcggtgctgattggtttgtcactggaagcttcggtgaaccgtgcaccattagtcctctcccattgctgcgcaaccttaattaagaaattaattaataaaaaaatttcatccaaaatactacaacagtagtaataactaataataagtctgcattcagtacaaacaatt

SEQ ID NO: 98873 - DNA, 175 bp, Glycine max
  unsure (1)..(175): unsure at all n locations
  Clone ID: PAT_MRT3847_60296C.1
caaaaaccaaaagggcactgactaattttcacaatcaattggatttaaggtggangncgcttccccgtcttcatggtcaatggctggacgtgatcccagcccagttttctaatgctgtggtctcgcactctcccacgtgcactttcctcggattcgctctaaatgagtccccagt

SEQ ID NO: 98874 - DNA, 562 bp, Glycine max
  Clone ID: PAT_MRT3847_60297C.1
gcacgaggaaacagggaaaccaaatactggctttgaagtttgaacgttagtatttgcagccactatgttccctttctctatcctaaacctcactgactcttctctcccctcaaattctccgcaaaacccaaacccatacgagagaagttcagtcagagaccaaaatcaccattaacgagaggcgcaagaataataagaagaagagaagagggttgcttcccttaagagatgcaaagaaaatcgagcttgagaagaagggaaatggaagagggttgagtccctacaaggatgtaaattgagacagatcaatcctctggttctcaagaacccttctacgtttcacgtcaaaccgaagcttccagaacctgacttcaatggcgagcgtgtagagcctaaggatcccagaaggtttcttcacaggaagggtttggaggatgtcatgcagttgttcatagttggagctataaccctagttctaagaccactcataaaaggtaaatggcttcctcagcacactgatgctgcatgtggagacctgtaccttgttgattctttggtgaaa

SEQ ID NO: 98875 - DNA, 474 bp, Glycine max
  unsure (1)..(474): unsure at all n locations
  Clone ID: PAT_MRT3847_60298C.1
cggggcgagcgacgcgtccgcccacgcgtccggatagtgtgagatggcagtttcttatatatattccagttgcacaagggggcgatgtgctattgaagggtggaaagcctcntgttgctgattttgttcatggtaaagatggactagggaacacattcctacccccacctaaaggcaatcaaaagggattcttcctttgcaagcaaagtgaagagaatagttatacttggtggtgcattctttgccttggggaatgtgaatcctgctgcagaagccaatatccatggagacccggaagccgcatatattgtgtttacctctggggcagatattgttgttattggaataaacattacaacccaagtccaattcacagatgctgatctcctcgaactgaaggaatctaaaggaaagtatgctcccttcttgagtgacatatgcaaattctatagggacttttatgtaaaatctgat

SEQ ID NO: 98876 - DNA, 1803 bp, Glycine max
  Clone ID: PAT_MRT3847_60299C.1
acagctatagatgagctatcgcacgctcgtatcgcgcgcctgcgtaagctgggatgactctaaccggcggccactgcgttcggtttttttcttgatccacttatgcccgttctattcggcctttctactcgcgtccgcacgcatccatagaaactcccttccgtacccagtcacttttttcgctttttttcgctcagttctttccacttacccttcgccgacctcctcttcctcttcctcttcctgcatttctccgcgtgtgtgtatgtgtgtatactctctcaagtacgcacatacatacacatccattcgtacataaatacttatatctcttcttccttcgccgttaattctctgaatccctagctcttctgttctccgatccgatcatggcctcgcttgtcaacaacgctaacggcgccgtcaatggttttcctggaatatcccagaagctcattatcgataccgaccctgggatcgatgatagcatggccattcttatggcttttcaaagtccagatgtggaggttctgggtttgacaaccatttttggtaatacaactaccgaactttcaacactcaatgctttgcttttgtgtgagatggcaggccgtgaagatattccagttgcacagggaagccatgagccattgaagggtggaaagcctcgtgttgctgattttgttcatggtaaagatggactagggaacacattcctacccccacctaaaggtgagaaaattgagaaaagtgctagtgagtttttggtagagaaagtctctgaatatcctggtgaagtatctgtgctagcacttggaccactaacaaatttggctttggcaatcaaaagggattcttcctttgcaagcaaagtgaagagaatagttatacttggtggtgcattctttgccttggggaatgtgaatcctgctgcagaagccaatatccatggagacccggaagccgcagatattgtgtttacctctggggcagatattgttgttattggaataaacattacaacccaagtccaattcacagatgctgatctcctcgaactgaaggaatctaaaggaaagtatgctcccttcttgagtgacatatgcaaattctatagggactttcatgtaaaatctgatggtgtccacggaattttcctccacgatcctgtaagttttgtggcagttgtgcgtccagatcttttcacatacaagaagggggtagtgagggtagaaacacaaggcatctgtgttgggcatacacttatggaccaaggattgaaaaactggaatacgagcaacccatggacgggttattctcctgttgcagttgcttggacagtgaatctcgaggaagttcttgattatatcagggagctggtgatgaaaccctgaagtataggcatttgtactacccttctgacagacaaaaagcattggaaagtgataggacgatagcttcttatttgcaaaaatatgcataaggtcattttctttatttcattcaaggtcacaatgagttcttaccccgtttaatattataaagttcatgtaccaatgaaattctctttacatgaacttatttgtgtttggatttcgctactcttatttgagaagaaagcagtcattctttacttttcctacctctgaacttgcatgttgcttcttagttcttactatggtattatagaatttcggtttgaaaatcgcactaaagacttcttcgcttgtaccaagaatattcataattccattattatctcagttctgaattctgaaatatatatgttaaaagttgtaaggc

SEQ ID NO: 98877 - DNA, 2623 bp, Glycine max
  Clone ID: PAT_MRT3847_6029C.1
atactgctgaacgggtattggaaatgatgcatctgctattggatattcttcaggctcctgatccttctacactagagacttttcttgggagagtaccaatggtattcaatgttgctatattatctcctcatggctactttggacaagccaatgtcttgggtttgcctgacactggtgggcaggttgtttatatactagatcaagtgcgtgcccttgaaaatgagatgctccttcggatcaagaaacagggacttgatttcactccaagaattctaatagttaccaggttaatacctgatgcaaaggggacaacatgcaaccagcggctagaaagagtcagtggtactgaccatactcatattttgcgagttccattcagatcagagtcaggaactctccgtaaatggatttcaaggtttgatgtgtggccttatctagagacttatgcagaggatgttgccagtgaaattgctgctgagttacaagggtatcctgatttcatcattggaaactacagtgatgggaatcttgttgcatctttattggcttataaaatgggagttacacagtgcacaatcgcgcatgcacttgagaagacaaaatatccagattcagatttatattggaagaaatttgaggataaataccacttttcatgccaatttactgctgacctaatagccatgaataatgctgattttatcatcaccagtacataccaggagattgcaggaacgtaagtaccgttttcatgatatatatggtttacttcatgattttgtgacaatgttaattcttttataatctcgcttgttatataactttcttttcttttacaagctccactctgactatttattttgcagataaaattatgatacaaatgattgccttttgtttaacaaacatatgctcccaaatggcacatctccattcttattttaactgttattggcttcttttcattgaaccttgcattacccatttggcattacatgtgtaggcatccatgactgtactgagagacttataccgtgtttggtgtaacataacttgttgtctcaagattcctaaattatgcgtggtgacagcaagtgtcatggactcatggcttaccaaagaccactcagttatatgatgctatacctagtcatttcttttgtctcttgatatttctctgaaaggcatatgagctagttactattttgtttaagcatcctctcttggcatctcacatatctatccctggtgctaacctacattttccttgtaatctatatatacttgtttttcagttaagctaatgttactcatttcattttcttaacctgtctttcaggaaaaatactgttggccagtatgagagccacgctggttttactcttcctgggctctatagggttgtccatggcattgatgtttttgatcccaagttcaatattgtctctcctggagctgatatgtcaatatatttcccctactctgaaaagcagaacagacttacagccctgcatggttcaattgaacagctattatttgctcctgagcagactgatgaatacattggtttattgaaagacaagtcaaagcccataattttctccatggcaaggctagacagagtaaaaaacataactggattggtagaaagctttggtaagaacagcaaattgagggaactggtcaaccttgtcatagtagctggttatattgatgtaaagaagtccagtgacagagaagaaattgcagaaattgagaagatgcatgagctcatgaaaaagtataacttagttggtgattttcgttggattgctgcccaaacaaatagggcacgtaatggggagctgtatcgctacatagcagacacacaaggtgctttcgttcagcctgctttctatgaagcttttggacttacagttgtggaggccatgaattgtggactccccacttttgctacttgccatggtggtccggctgagatcattgagcatggtatatcaggattccacattgatccttatcaccctgatcaagcttcacagctattagttgaatttttccaaaagagcaaggaggacccaagccattggaagaaaatatctgatggtggtcttcaaagaatttatgaaaggtacacgtggaagatttattccgaaaggcttatgactttggcgggagtttatagtttctggaaatacgtttccaaattagagaggcgtgaaactcgacgatatcttgagatgttctatatcctcaagttccgtgatttggcaaattctgttccgctagctaaggatgatgcaagttaactagctatataatttcaccaaaggcttgacagcagacataataagagtcatttatgtaaatataatagtctgcttctcgtgttttgaaatctagtgaggcgacctagaggagtttcatggaagacttgtcttgtctatgttaacttcgattatgtaagagatggcgagcactggttgttgaatttggatgtctcttgttttcgtttgattagtagtcatcaatgatatagacctggaaattacctgtgactgaggattgttatccttactgatgggtaagaataaagcattatgaatcaatggcctaaaaaaac

SEQ ID NO: 98878 - DNA, 1010 bp, Glycine max
  Clone ID: PAT_MRT3847_602C.1
cacgcgtccgctcgtactcacaaacaacataataccctcatccctcgagaaagtcgaggttaaccataccaacaacaaaacccccccttcttcggtcactcaccaccataattcattctatcatcctcttcgtgttttttttttcttctttcacgctctttctttcatcatcaaaacacttctccccaggtatgctgtgtaaaattaatcaatatttcaccgattaattgtacttattgattaattaattgattgttatgtggagattctttgtctttgattgggatttggaagtgagaaaaaaaggacaaaatgaaattcgggtctgcattcagagaatatctgcaggaggaacgggagtggctcgtggaccagaaatgtgcccacgttgaatatataaggttaaagaaagtgttgaagacttgccagaaagatacctcttcttctgataacaaggaccagttatgtcactgtcagtcttgcccattgtgtgatcaacagttcttctctgagttgatgaaggaagcatcagatgtagtaggatactttagttcaagagttaagaatctccttcatcttcatattgcaacaggaatgcagagatatgtattgcgtttgcgccagtgctttaaagatgataggcaagcccttacccaagaagggaggattctaattgagtacattgcaatgaatgctattgcatgaggaaaatacttaagaaatatgataaagtacgcagcagcttgaatggagagaatttaaaatctaggatgcatgccgaacacattgaaattttgcactcaccttggctaattgagttgggtgctttttatctgaattctagtggactggatagttgtgaccttgatggagtctatggtcgcttttcatgtgagctaaacataactaaagctgtaatgacattggttcttcccgattctattaatctcgagcatgatcttacttgtgcaatttgcctggattttgttttcaacccatatgctttgagt

SEQ ID NO: 98879 - DNA, 888 bp, Glycine max
  Clone ID: PAT_MRT3847_60300C.1
ctattctacttgcagatccatggagacccggaagccgcagatattgtgtttacctctggggcagatattgttgttattggaataaacattacaacccaagtccaatttcggtagtattgtgatcccagtttgttccaatttccggtctatcttgagctatttgctgttattctaagtcaggcacattgtcttttgatttcagatgctgatctcctcgaactgaaggaatctaaaggaaagtatgctcccttcttgagtgacatatgcaaattctatagggactttcatgtaaaatctgaccgtgtccatggaattttcctccatgatcctgtcagttttgtggcagttgtgcgtccagatcttttcacatacaagaagggggtagtgagggtagagacacaaggcatctgtgttgggcacacacttctggaccaaggattgaaaaagtttgtccaaatttaaaactattattattcactctaatttttccttataatttagtgctcaacataattggattcattcatgcaggtggaatacgagtaacccatggacgggttattctcctgttgcagttgcttggactgtgaatgtcaagggagttcttgattatatcagggagctattgatgaaaccctgaagtataggctataggcatttgtactacccatctgacagacaaaagcattggaaagtgatagaaacgatagcttcttatttgcaaaaacatgtataaggtcattttcattatttcactgaatgtcaatcagaactttgggcgtcaaggattcacaaccagttcttacgccgtttaatattataaagttcatgtaccaatggaattctctaccttctttgagaagaaagcagtcattctttacttttcct

SEQ ID NO: 98880 - DNA, 702 bp, Glycine max
  Clone ID: PAT_MRT3847_60301C.1
ccacgcgtccgggacgtaattacaaaggcaataaaagcttcgttgcactccacgccagccagccagccagcgaagccattaaatattatttcccttttcttcttccttcgctgaatccctagctgttctcttctccgatccgataatggcctctctattcaacaatgctaacggcgttctcggaaaatccgagaagctcattatcgacaccgaccctgggatcgatgatagcatggctatttttatggcttttcaaagtccagacgtggaggttctgggtttgacaaccatttttggtaatacaactactgaagtttccacacgcaatgctttgcttttgtgtgagatcgcaggccgtgaaaatattccagttgcacagggaagccctgagccgttgaagggtggaacgcctcgtgttgctgattttgttcatggtaaagatggactagggaacacattcctacccccacctaaaggtgagaaaattgagaagagtgctagtgagtttttggttgagaaagtctcggaatatcccggtgaagtatctgtgctagcacttggaccactaacaaatgttgctttggcaatcaaacgagattctgcgtttgcaagcaaagtgaagagaatagttattcttggtggtgcattctttgccttggggaatgtgaatcctgctgcagaagcacatatccatggggaccc

SEQ ID NO: 98881 - DNA, 592 bp, Glycine max
  Clone ID: PAT_MRT3847_60302C.1
gaaaacagcgatgaccagcaaaccagggacccttaccttacaacctgctgcactgcttcttggggctacatgtcaaggagtgtcggaattgacctctacagcgctgggtgcagcttgtcaaagcagatagctgaactactctgtgctgcccgcacactcagaggatgatcaactgcacacactcttaaagtatggcgtggtactcctttctatgaaactgaggacaagcatggcattaccaaaagctactatgtctatgcctcagcactcttgataaacgtcgcgtccaagaaacatgacaatgacgttattctccgactcccactatctataatggatacccactctcgcgagtaaaacccgaggatcgcggtactgtctcacactcactaattatagcatagtctctacacacagccttagtgcgtcgtgaaccataaaacactggcacagtatgctcccatgaaagattcggatgtaaaactgggagacgacaagacccacagagaaaacagctctaactggcaaagctagggccatcgagggtgcaaaaaatgccatagcacctgagcgtaaacgaggtctacctgtt

SEQ ID NO: 98882 - DNA, 322 bp, Glycine max
  Clone ID: PAT_MRT3847_60303C.1
ctgctgagttaatcgcgtcatggtggtcctactcgttgtttgaaactggagagcctttactcgtcaaaagtcctcatttcatgacctagctccaagcgttgctccacgacgctaaggtgttctctttctcaaagcttctttgttaattcatctctgttaattgaatgtatgaaacaatgcttatcaagagagtatctgttaattgaaattctggcaagactattgctagcttcattgtagtgctgagttttgggttatgctgctaaattaatggagtatctgctaattaaaatctctgatatttgaaaagttgaaacaatgc

SEQ ID NO: 98883 - DNA, 197 bp, Glycine max
  Clone ID: PAT_MRT3847_60304C.1
atccaagacatgtgaaggcatttccaccggatcatgcagcgttttgatcttctgccggtaatacatactcgaagacggcagaaactctcagccgattatcaatatccagataagaatctgacgctcccacctttgtccctccggccttcggcgggtggacatgcaagattctttcgtccaaaacccctaacccgggt

SEQ ID NO: 98884 - DNA, 556 bp, Glycine max
  unsure (1)..(556): unsure at all n locations
  Clone ID: PAT_MRT3847_60305C.1
caacngnganaagnnacacaggtancnaaancgacaaanatncnnnacncnanannanngacnacgangnanannncacacgnnncannnacnacnnancgnacatannncngccacnangagangaacncagcncanagacagggaccggagtnacgacnnanacannggagcgagacancnntacanncacncacgncnaccacncgagctgnggnnctncnacannagcntnangnagagctaanagagatgagagancacagngagangnagagatgnntcncntancgancgaggagnatagagngngcagctnncacaagtangctctaagnganntctagnantnncnnccngagagngnagnnnacannnncgnacanacacngaacancngngcgnctngngtngcanagngagctagcngaggagaggtgtgnnacaccgngcatgtnnnagcgtgannttcgcaggaccgantacggagagacgngacancccntagtacnacganagngatacgntcgngnanngnatgacangcgangngnnn

SEQ ID NO: 98885 - DNA, 313 bp, Glycine max
  Clone ID: PAT_MRT3847_60306C.1
gagctcctacctaaccatcatcaatcccactatccattcttacttttcacatcaccaccactactataaagagacatctcttactagaaaaatcatcccttacttttactacaaaataccatactattcactcaatcatatatcaacctcttcacctctttaatatccatatcttataattctctatcatctccatcatccttattatcacatactattaacattctactctaaatcaccacataccttacatatattatttattttatcacctttcacctaaaatccacaacttctttttatctatttaact

SEQ ID NO: 98886 - DNA, 409 bp, Glycine max
  Clone ID: PAT_MRT3847_60307C.1
gtatatgcaatgcaaatgcaagccatcttaacagcacttgttattgaagcaactgaggaatatgcacccatggtgatcaaataaacactgtgtgggcactttcatagggcaagcataaagacctaccaagctatgcatactctcatccatctatccaaagagaaacagccctaaacaaattccggttgaaatggaaagacagatgctatgagaagaaggatccatatgagagcataaacaaactagcacagcagcgttccatattgaaaggacaagctgtgcttgaagcacattctcatccttttgctgcagaaaaagatggcaaagaacatgatcattcacatatttctcacacactgtagaggagagcatgaattccttagtatatagtggctgcaaatttttgttc

SEQ ID NO: 98887 - DNA, 132 bp, Glycine max
  Clone ID: PAT_MRT3847_60308C.1
gagaatgcagcgtaaagacgaagatgttaacgtcagagccaacaacttctcagaaacgcaaccaatccgtacagcagctcagggtggtggcgacaaggcctacaaggacgtacccccacctcctttgtttga

SEQ ID NO: 98888 - DNA, 324 bp, Glycine max
  Clone ID: PAT_MRT3847_60309C.1
cccacgcgtgcgcacacacttggtactagccgtccatgcttcatggatccagatcactcttcatcttcatcaaaaggctcgccttctgcaaagttccatgccccacgcatctctttacaatcgagctctggtacccggttccaggatctgcaaacgaagctaagctttcctgctaattaagggcagatgtttgccatccggtacattagcatccagaacgcgcaggattcaggctacatgtaccgcacaaccagagacagcgtagaaggtgtgtgacatagtcaagaagcaatcggcactgccagatcaatcaggtgctactgg

SEQ ID NO: 98889 - DNA, 3191 bp, Glycine max
  unsure (1)..(3191): unsure at all n locations
  Clone ID: PAT_MRT3847_6030C.1
gaaacaatgaatgatcgctttttcaccgtctccaatgttattttcactattatataatttttgcacttaagtatgacacaagacatctccaactctcatgcttttttccacttgcaaactccaaattcactctgacagtttttgcagctaattaagaagaacttaacagacatataaacatagtgatcgttatgtctacgcaaccaaagcttggtcggattcccagtatcagagaccgagttgaagacactctctctgctcaccgtaacgaactcatttctctcctctccaggtatgtggctcaggggagagggattttgcaaccccataatttgattgatgaacttgacaacatccctggcgatgatcaagcaatagtggatcttaaaaatggtccctttggtgaaatcgtcaagtctgcaaaggaagccatagttttgcctccttttgtggcaatagcagttcgtccaagacctggtgtttgggaatatgtccgtgttaatgtctctgagctcagcgtggagcaattaagtgtttctgaatatctcagcttcaaggaagaacttgtagatggaaagattaaatgacaattttgtattggagcttgattttgagccatttaatgccacatttcctcgtccaactcgctcagcatccattggcaatagtggtcccatttctcaatctccacctttcatctattatgtttcgcaagaaggattccttgcagcccttgcttgatttcctccgagctcacaaatacaagggccatgctctgatgttaaatgatagaatacaaaccatttccaaacttcagtctgcattggccaaggctgaggattatctctctaagcttgcacatgatacactctattcagagtttgaatatgtattgcaaggaatgggttttgagagaggttggggtgatactgctgaacgggtattggaaatgatgcatctgctattggatattcttcaggctcctgatccttctacactagagacttttcttgggagagtaccaatggtattcaatgttgttatattatctcctcatggctactttggacaagccaatgtcttgggtttgcctgacactggtgggcaggttgtttatatactagatcaagtgcgtgcccttgaaaatgagatgctccttcggatcaagaaacagggacttgatttcactccaagaattctaatagttaccaggttaatacctgatgcaaaggggacaacatgcaaccagcggctagaaagagtcagtggtactgaccatactcatattttgcgagttccattcagatcagagtcaggaactctccgtaaatggatttcaaggtttgatgtgtggccttatctagagacttatgcagaggatgttgccagtgaaattgctgctgagttacaagggtatcctgatttcatcattggaaactacagtgatgggaatcttgttgcatctttattggcttataaaatgggagttacacagtgcacaatcgcgcatgcacttgagaagacaaaatatccagattcagatttatattggaagaaatttgaggataaataccacttttcatgccaatttactgctgacctaatagccatgaataatgctgattttatcatcaccagtacataccaggagattgcaggaacgaaaaatactgttggccagtatgagagccacgctggttttactcttcctgggctctatagggttgtccatggcattgatgtttttgatcccaagttcaatattgtctctcctggagctgatatgtcaatatatttcccctactctgaaaagcagaacagacttacagccctgcatggttcaattgaacagctattatttgctcctgagcagactgatgaatacattggtttattgaaagacaagtcaaagcccataattttctccatggcaaggctagacagagtaaaaaacataactggattggtagaaagctttggtaagaacagcaaattgagggaactggtcaaccttgtcatagtagctggttatattgatgtaaagaagtccagtgacagagaagaaattgcagaaattgagaagatgcatgagctcatgaaaaagtataacttagttggtgattttcgttggattgctgcccaaacaaatagggcacgtaatggggagctgtatcgctacatagcagacacacaaggtgctttcgttcagcctgctttctatgaagcttttggacttacagttgtggaggccatgaattgtggactccccacttttgctacttgccatggtggtccggctgagatcattgagcatggtatatcaggattccacattgatccttatcaccctgatcaagcttcacagctattagttgaatttttccaaaagagcaaggaggacccaagccattggaagaaaatatctgatggtggtcttcaaagaatttatgaaaggtacacgtggaagatttattccgaaaggcttatgactttggcgggagtttatagtttctggaaatacgtttccaaattagagaggcgtgaaactcgacgatatcttgagatgttctatatcctcaagttccgtgatttggcaaattctgttccgctagctaaggatgatgcaagttaactagctatataatttcaccaaaggcttgacagcagacataataagagtcatttatgtaaatataatagtctgcttctcgtgttttgaaatctagtgaggcgacctagaggagtttcatggaagacttgtcttgtctatgttaacttcgattatgtaagagatggcgagcactggttgttgaatttggatgtctcttgttttcgtttgattagtagtcatcaatgatatagacctggaaattacctgtgactgaggattgttatccttactgatgggtaagaataaagcattatgaatcaatggcctaatgatctgtattgtggcactgtataatgttaatgtatatgatgagacggtctagccaacccactgttgggttgggtgtaacacttgctaaatgaccttgaatttttaagtttgaaaataacacttctatcatgaattaatataataaaatagaagaagtcataacatacaaatatttaaaataaaaaaaaaaaaaataaaacatttaatggccaaaaaaaaattaaaaaaagcctacctctancgnccaata

SEQ ID NO: 98890 - DNA, 445 bp, Glycine max
  Clone ID: PAT_MRT3847_60310C.1
aagggcacaacacttgggtgatgaagaactttaatttgcatttgcatgtgaaacatgtggcatgcgttgtgactacttttgagtttactacacagaatagtactgggttggttttaaggtggcatgagctgagttggaatgctttaattatagaaagattttggcacacctcatgcctaaaatactttttgtggttcttgtaatactttttatggttcatctgtcatgttatttctaaaaaatttatacataaattttaatccaatgctaagaaatagtaagaaattttaaaaaaatctccatatttatatatatatttttattataacttaattattattcaaataaaataattaattcattttttagtttttatctatataaataataaatatgaataattaaagaaaattttaaatatcaattaaaaaaatgattgagatcc

SEQ ID NO: 98891 - DNA, 433 bp, Glycine max
  Clone ID: PAT_MRT3847_60311C.1
ctcacacgtcctcccacgcgtccgatggtcatagaccacacctaattagggacacacaccgggggaacgaactagacgactcaattctcattgaatggctaaggacgctttgaaatcaccaacagcagacactactccctttcgtggttaccaagacgaggaagatgacgatgaccttcatctacgcgagccttgtgccaagagaaaacgctcaaaacgacctagttataagtcggacgaagagtacttggctctctgcctcatgatgcttgcacaaaacggtaacaacagcaacacacaattactcgctacgtcacagtcacacaaagaagcatcaccccagatgtaactatgacacacgtgctctatttgcatcaaggctttgtcttattaccaaacactcagtggacacaaggtcaaccaccgcaaggac

SEQ ID NO: 98892 - DNA, 288 bp, Glycine max
  Clone ID: PAT_MRT3847_60312C.1
cttttaataaaaaacatttaacatgtttataatctcacacaattccactctttaaaatggctgtataggacaaaacaatttgcgtcccaaagggattataaccaagcttaagcaattgcaccccccacacttaattggttatcatcaaggaatagcgtagctgaatccttgaaacaaaaaccctttacggaaaacacattttatgctcaaagaaagtattatcaagtctgaatctttatctctttccccatgtacgttcagcatctgaagtctgaatcacgcgtgcat

SEQ ID NO: 98893 - DNA, 233 bp, Glycine max
  unsure (1)..(233): unsure at all n locations
  Clone ID: PAT_MRT3847_60313C.1
gactaacgaagcgagcgaacaacacacgcagggcggcggaggaangacgaaaaaccaacggcgagcagggccaaggagcgggccaggcccgaccacagaaggacaagacacgacagagcaagcgacggagagaacacaagaacacggcgaaggcaaacgcacaagcagcggcagaaaaggccaccggaagcacggacaagacgggcgaaccacacacgaaacgccagccacca

SEQ ID NO: 98894 - DNA, 250 bp, Glycine max
  Clone ID: PAT_MRT3847_60314C.1
ctcggaattcggctcgagcgtaaaggccctagaggagagcgaaggtcgtttggaccgaccaactcttgaggacatggatattgctgtgcgcactcatctatgtcaatggagagaggcatttgtgaatgaggttaagaagtattagggaactcacagagtcctttgacgcatataacaatcaacaacacggttgacatcctggtccaatgcatgagaatctctggtgttaccgtgatatactgaagtcaaa

SEQ ID NO: 98895 - DNA, 2538 bp, Glycine max
  unsure (1)..(2538): unsure at all n locations
  Clone ID: PAT_MRT3847_60315C.1
cagggccggaattcccggctcgactccggcagtggggagaagccatttttattgcggtcagcagaagagcttgaaccttttcttgtaggtacaaatacgaggcaaggatgcaggcaatgaccaagccaacttacactgcaattgttcaacatgccaagaatggaaaacctgccctcgtatttgtacctacaaggaaacatgtccgactgacagctgtggatctgattacatactcaggtgcagacagtggggagaagccatttttattgcggtcagccgaagagcttgaaccttttcttgacaagattactgacgaaatgttgaaagttactttacgtgaaggagttggatacttgcatgagggcttgaacagtcttgatcatgacattgtgactcagctatttgaagctggctggatacaagtctgtgttttaaacagttccatgtgttggggagtgacattattggctcatttggtagttgtgatgggcacacaatactatgatgggcgggagaatgcacagacagattaccccgttactgatcttctgcagatgatgggtcatgccagccgtcctttggtagacaattctggaaaatgcgtcatcttgtgccatgctcctcgaaaggagtactacaagaagtttttatatgaagctttcccggttgaaagccatcttcaccacttcttgcatgataacttgaatgctgaaattgttgctggaattattgagaacaagcaagatgctgtagattatcttacgtggacattcatgtacaggcggctcacacagaatcccaattattacaacttgcaaggagttagtcacagacatctttctgatcacctctcagagatggtggaaaatactttgagtgatttagaagcgggcaagtgcattacaattgaggatgatatggagcttgctcctctcaatcttggaatgattgcatcctattattacatcagttacacaacaattgaaaggttttcatcatctgtgacttcaaaaactaaaatgaagggtcttttggagattctgtcttcagcttcagagtatgctcagcttccaatacgacctggagaggaagaggttgttcgtaagttaattaatcaccagaggttttcctttgaaaaccccaaggttacagatccgcatgttaaagctaatgctttgcttcaggcccatttctctaggcaatttgttggtgggaaccttgcattggaccagaaggaggtgcttctttctgcaaatagactgcttcaggcaatggtagatgtgatatcgagcaacggttggctgagcctggccttacttgctatggaagtcagtcaaatggtgacacagggaatgtgggaacgcgactccatgctgcttcaacttcctcatttcacaaaggatctggctaagaaatgccaggagaacccagggaagagtatagaaactgtgtttgatttattagaaatggaggatgaggagaggcaaaaattgttgggcatgtcagatttgcagttgttggatattgcccgattttgtaaccgattccctaatattgatttgtcatatgaggtgctggacagtgacaatgtgcgggctggggaggttgtcactgtgctggtcactcttgagcgggattttgagggaaggacagaagtaggacctgttgacgctcccaggtatccaaaagccaaggaggaagggtggtggctcattgttggtgataccaaaaccaatctgttgcttgccattaaacgggtttccctgcagcggaaattaaaagccaaactggaatttgatgctcctgctgatgctggaaggaaatcctattcgctttatttcatgtgtgattcatacttgggttgtgatcaggagtatggtttcaccgttgatgttaatgctgatggcggtgatgaagatagcggcagagactgaaaagtttcatgaagcttcgaatgcgaaggacaatattgtagcactgctgaaagattgtatcttattctggctaaggaagagataattgtagcagtaggaagtaacacctgtagctggaggctcactatttgcagcattaggaagtggataggttgcttattgaagacgctggagcccttttttgattttgcttcggaatgaacagtaagttgtgtcatcgaaggacgaaagcagagtttactattgtggatgttggagaactaactataatatcttaatgcttgttgtacggcagattgtatagatgtttgtattgcttttcggttatctaagttaattgttcccacataatcagttcttctcgacatagaagtaacatgcaccagctctttttgaggatcttactgaggatgtattttgggatctttattggttacttccatgtactagacgataccttgaagttagccataaaaatcaactatattttctttcctttgaacgaaggaaatcctattcgctttatntcatgtgtgattcatacctgggttgtgatcaggagtatggtttcacaattgatgttaatgctgatgggtgtgatcaa

SEQ ID NO: 98896 - DNA, 788 bp, Glycine max
  unsure (1)..(788): unsure at all n locations
  Clone ID: PAT_MRT3847_60316C.1
cccaccctgccgtctcgcattcatatatatatgcatgtgttctgaatagtctattcttcattgcaagttttccgcacaactctttcacctcttgttttccccaatccttttcgcctttgtctgcgaatggcgtcgttcgatcaggcacctcccggcgatgtcaaatccggtgacaaaatcttcaggaccaagtgcgctcagtgccacaccgtcgaaaaaggtgccggtcacaagcaaggacccaatctgaatggtttgtttggaaggcaatctggcacaactcccggatattcctactcttcagctaacaagaacatggctgtgacttgggaagaaaagacactatacgattacttgcttaaccccaaaaagtatattccagggacaaagatggtatttcctggtcttaagaagcctcaggaacgtgctgatcttattgcatatctgaaagaatccactgcacagtgattatgcactttcatacattcaattttgcagcgtgctttcaaatttctggagatttaattttcggtcatttagttctgtcatgcaggaagtgctgtatctttggctaataatgtaggctacattggtctgcaatgctattttgttcattttgcattgcttctgaaaaaaaaacagccgaatattggctatatctcttgaaaattgaaacattcttatcagcatttgatttaattggaccacagttcattattatgcttagctgaattcatcattttcgttttactttggtttnnctnngctgaatatgttccgggagggtt

SEQ ID NO: 98897 - DNA, 504 bp, Glycine max
  unsure (1)..(504): unsure at all n locations
  Clone ID: PAT_MRT3847_60317C.1
accttctattccaaggngcagagagaaccagacatgaagacaaggtatcagctaatgagcaccacaaccaaaggggaaggtgtacaaggaaaagatctcgcaacggttaaagacaaagcagcatgagctgctggtggctgggacatcaaagtacacaccaactccaaaggaggaatcaggttcgcaaaaaagaaaagggggaaatggggaaaatttcggaaggaaggccaaccatggccaaaacggtaaacagccccaagagaaaaaaaaggcagaaggaaaaaaccccccagagaaaaaaaacccgctccaaaatggaaaaaaggcccccctaccaaaggacaaataggggaggggaaaaaccccaaaaaaaaaaaaaagggggcggggaaaaaaactcaaaaaaaaagtcccgaggagggggagcaggaaaaccccaaaaaagggaggcccaaagggaaaaaaaaaaaaaccccaaaacaaaaaggggggaaggcacaaggg

SEQ ID NO: 98898 - DNA, 873 bp, Glycine max
  Clone ID: PAT_MRT3847_60318C.1
gcctcggattccggctcgaggttgattggcttttgaatattaggcagaggcaaatcacataagggagtgccccaaacggtccaacgtcaactcaaaaagttagggctggctttggaggcccgtggcaaacgcgttccaatttcattgttattctcaaaagtgaaaagtatataaatatgaatgtgttctgaatagtcctttcttccttcctttcactctcaatccttttcgcctttgtctgcgaatggcgtcgttcgatcaggcacctcccggcgatgtcaaatccggtgacaaaatcttcaggaccaagtgtgctcagtgtcacaccgtcgaaaaaggtgccggtcacaagcaaggacccaatctgaatggtttgtttggaaggcaatcaggcactactcccggttattcttactcttcagctaacaagaacatggctgttacttgggaagaaaagacactatacgattacttgcttaaccccaaaaagtatattccagggaccaagatggtatttcctggtcttaagaagcctcaggaacgtgctgatcttattgcatatctgagagaatccactgcacagtgattatacattttcatacattcaatttttgcagtgtgctttcaaagttctggagatttaattttcggtcatttagttctgccatgcaggaagtgctgtatctttggcaaataatgtaggctacattggtctacaacgctattttgttcattttgcattgcctctaaaaaaaacagccgaatattggctggtgtaacaaattatctctttaaaattgaaacattcttatcagcatttgatttaattggacctcagtttgttattatgcttagctgaattcatttttttta

SEQ ID NO: 98899 - DNA, 329 bp, Glycine max
  Clone ID: PAT_MRT3847_60319C.1
cctcccacaatataggatgatgatgatgtctaccatgtggatgcgggtcaacctatgaggccggggcggggcccttgcagcactaacaacgtactcaggacagcgcatgtggtggctctatcaacccaaattggctgtagagcactgctctttgtcaccaggcgacatgggatggccctacacaggcaccctgtggccctttgtatacgcttgcatctccatggtccctgatggcttcatcttcgacttagtctacagcatttggacaaactgctatgtacactaccatgattactggaaagcccgggataattgagacagcacccgaa

SEQ ID NO: 98900 - DNA, 459 bp, Glycine max
  Clone ID: PAT_MRT3847_6031C.1
tgggcactcgcttggtggtggtactgctgtgctgttgacatatatgcttagagaaataaagcagttctcttcatgcacttgtgtcacgtttggcccaggcatgtggttatactaattagtacttcttaaatttacatctaaagttttaattttttcgagattattgggtaactgatttaattggtttttattatgattgaattgatcatcaaatgatttttggtattaaccagatgtagaattactagcgcgttatgcagatgtaattgtagtctgacaaactcaaattttgggtagctaggatgcataaatggttctgtatatatagacgaatgaaaaatgtacaagagttcagctacatgaaacacatttgttttgaaataattgtgtacataagttctgcatatcttatttaaattttttattgggaatgaataagtgatagatataaaaattcat

SEQ ID NO: 98901 - DNA, 464 bp, Glycine max
  Clone ID: PAT_MRT3847_60320C.1
tgaccgttgtagaatgcataatattataagacggtcacatgtccgcaatcgtctttgaatgtatggcattctacgactgtcacgtgcaaatgaccgtgttagaatactcaatagtctacgatagtcgcgtgcgaagaccgtcttagaatgctatgcattctacatcggtcacatgttaacgactaaatgaccatgttagaatgctcaatagtctacgaaggtcgtgtgcgaagaccgtcttagaatgttatgcattctacgtcggtcacatgttaatgactgacgtagaatgcatagtattctaagacaatgcttctgagacaccggcgtagaatgatacacatactaagacggttaacacggccatcatagaatatgtaacacgtttttacgacgtctgatacgacaaaggttataaaccgatgttgtaacccttaaataactgatgtagaatctatattttt

SEQ ID NO: 98902 - DNA, 280 bp, Glycine max
  Clone ID: PAT_MRT3847_60321C.1
acgcgtccgaaccgatgaaacgacagactgcggttctagcgtatctgaccgctgagagtcattcgtttacttcgctatcttcttcttttgttgtttgtagtgtatgctttttctctcacctaaccatgccttcctgcgcgtgcaactgcggctgcgcaagcgcctgcaagtgcctaaactcaatgcagtggctgcaagatgtacccagacttgctctacaccccgtgaaccaccaccgataccttgctcatgggagcatcaccagttaaggctcaattct

SEQ ID NO: 98903 - DNA, 3912 bp, Glycine max
  Clone ID: PAT_MRT3847_60322C.1
gacccacgcgtccgcgatgtttttcgctttcagtgttcctcttgatcgaagtgatgatgaggttgtaatatctctgtgtcttgaaggcttccgctatgctattcatgttacttctgtaatgtcgatgaagactcatagagatgcttttgtgacttcattagcaaagtttacctcactacattcaccagcagatattaagcagaaaaatgtcgatgcaattaaggcaatagttgttattgctgatgaggatggaaattacttacaagaagcttgggaacatatcttgacttgtgtttcccggtttgagcatctacatcttcttggagagggggctccaccagatgccacattctttgcctttcctcagaatgattcagaaaaaacaaagccggcaaagtcggctcgagttcctgttttgaagaaccagggacctgggaggatgcagtatgcagctgctactttgatgcggggttcatatgatagtgctggaattggcagtaatggttctggtgtcacatcagaacaggtgaacaatctagtctctaatttaaatatgttggaacaagttggaagctctgaaatgaatcgcatattcactcggagccagaagttgaacagtgaggccataatagattttgttaaggctctatgcaaggtctccatggaggaattgaggtctccatctgatccacgtgttttcagccttacaaagatggttgagattgcgcactataatatgaaccgcatcaggcttgtgtggtcaagcatctggcatgttctctctgatttctttgtaactattggctgtttggcaaacctttcaattgcaatttttgcaatggattccttgcgtcagttgtcaatgaaatttctggagcgggaagagctggccaattataattttcaaaatgaatttatgaagccttttgttattgttatgcgcaagagtaatgctgttgaaattagagaacttattattagatgtgtctctcaaatgtttctttctcgtgtcatcattatcatctctgcaagggatgtcctgttcatgctaattaacacgcttaggttagcaggttggaccaattttgctacattcacgtggaagatttgggtaaagattaatcgtgcatatttagatttaggaacttttattgtatcaacaatcttgttcaaaattttgtactgtctctcctcttcctcgaattatagatcaatcatagaatatggcattgtatgaatagttgtccgtgaattctgtgcaacaaaactagcagaaggagaccttggatcttcgtcaaggaataatgacaaggaaagttatggaaagatatctgctccatcacctcgaacaggaaaagaggggaaacaagataacggagaggtgacagacaaggatgatcatctctattcgtctggtttcctttattggcaggtttatctgagcttagctttgacccaagacctgagattaggaagagtgccttggaagtcctgtttgaaaccttacgtaaccatgggcatctcttttcactacctttatgggaaagagtatttgagtctatcctatttcctatattcgattatgttcgacattctattgatccttcagggagtagttcaccgatcaatgaagtagaggctgatggtgagcttgatcaagatgcttggctttacgaaacatgcacattggctctccaattggttgtagatctttttgtcaacttctatgacaccgtcaatccacttttaagaaaggtgttgatgctcctggtaagctttataaagcgccctcatcaaagcctggctggcattggtattgctgcatttgttcgtttgatgagtaatgctggggagctgttttctgatgagaagtggttagaagtggttttgtcactaaaagaagcagcaaatgcaacactccctaacttttcattccttgacagtggaaactttgtgactgtaaatcatgagtatgcttcaatggctgaagatgacagggatcctgctgagtctggctcacatgataatttagaaagcccgaggactcaaaatctttatgcatatttttctgatgcaaagtgccgagctgctgttcaacttttattgatccaggcggtgttggagatctataacatgtaccgaactcaactttcagcaaaaactatacttgtcttgtttgaggctttgcgtgatgtggcattacatgctcacaagattaacagcaatattattttacgttcaaagttacaagagtttggctctatgactcaaatgcaagaccctccactgttacgcctggagaatgaatcctaccaaatatgtctcacatttttacagaacctcgttgtggacagacctactagttatgaggaggttgaggttgagacacgtctcattagactttgtcaggaggtgttggagttctatattgaagttgcaggttctggaacagtatctgaatcttctcatggtaaacagctgcattggttaattcctcttggctcggggaagcgaagagaattggctgcacgtgcaccgcttgttgtgaccactcttcaagctatttgtaatttgggagagatatctttcgagaagaacctggctcattttttccctctcctctcaagcttgataagttgcgaacatggatcagctgaggttcaggtagctctcagtgatatgcttagtttatcagttggtcctcttttgctacggtcatgctgattgattacgttaagatcgacaatgaattttgagatataggatatttttcctctaaatctcttttgttcatattttcctcctttcctttgcctcgggttacttgcaaaagtatagttcgatagtgtttgaatagttggcagtgattttgtgtttagaataccttcccggtccttctatattttagaagcctaagattaccaatccgaattgatctgtattaccagaaggtttaatgttgtatcttgtatgcttaattattttatcccaattttttaaaagaattttgagtttttcgacccttgatgaaaaagccatgctagtcctgtttgatgctctgcacgatgttgcgatacatgcacaccagattaacggcaatactatgttacgttcaaagcttcaagagtttggttctgtgacccaaatgcaagaccctccactgttacgcctcgagaatgaatcgtaccagacctgccttacatttttacaaaaccttgtcattgacaagcctcctagttacaaggtggatgaggttgaatcacatctcatccggctttgtcaggaggttttggagttttatattgaagttgcaggttttgaacaaaaatctgaatcttctcatggtagacagcaacactggttgattcccttaggcactgggaagaggagagaattggctgcacgttcacctctcattgtggctactctgcaggctatttgtagtttgggagatacttcttttgagaagaacttgtctcatttcttccctctcatttctagcttggtacgttgtgaacatgggtcaaaggatgtccaggttgctctcagtgacatgcttagtttatcagttggtcctattttgttacagtcatgttgatgatttgggtaaagattaaccctgcattttgagatgtaggatatttttttgtttaaatctttttgttcataattttctcctctctctcctctgccttgaattacttgtcaataatattctatgtcagtgtatgaaaagttgttagtgaatttgtcttagctacaccttcctaacttttgtagtttagaagctagcttttcccggtcagaattgatatgtattaccgtaaggctgaatgttgtatttttgtctattactcatttttctttttaaaagaattagttttgcagcattatgtcctgtaaagattagtc

SEQ ID NO: 98904 - DNA, 257 bp, Glycine max
  Clone ID: PAT_MRT3847_60323C.1
ccttcgctcgctcgccctgatgcggttcattggcgctttactggcactcgtagccttcattatcgcttcccacagcacgcaagctgaatctgtggccctaaatgaggctacctttgatcaccagacaagcaacgatgtgtggtttgtcaagttctacgcgccgtggtgcagtcactgcaagaagctggcgcccataatcgacgagctgtaacggccaagagtctgttggacacggacgtacacgtagctactgtgga

SEQ ID NO: 98905 - DNA, 654 bp, Glycine max
  Clone ID: PAT_MRT3847_60324C.1
tagttacgaggcggatgaggttgaattgcatctcattcggctttgtcaggaggttttggagttttatattgaagttgcaggttttggacaaaaatctgaatcttctcatggtagacagcaacattggtcaattcccttaggccctgggaagaggagagaattggcagcccgatcgcctctcattgtggctactattcaggctatttgtagtttgggagatacttcttttgagaagaacctgtctcatttcttccctctcatctccagcttggtacgttgtgaacatgggtcaaaggatctccaggttgctctcagcgatatgcttagtttatcagttggtcctgttttgctacagtcatgttgataatttgggtaaaagattaaccctgcattttgagatgtaggattttctttttttttttttgttttttgcttaaatctttttgttcataattttctcctctctcctttgccttggattacttgtcaataatatactatgacggagtgtatgaaaagttggtagtgattttgttttaaaacttccccctcctaagttttgtattttaaaagctagcttttccggtcagaatttatatgtataaccctgaggcccaatgttgtatttttatttattacccaattttctttttt

SEQ ID NO: 98906 - DNA, 231 bp, Glycine max
  Clone ID: PAT_MRT3847_60325C.1
tctacaaatgaaattttctttaattagcgaacttaaggagattaatatttgaaatttcgcgctttccaagggctctatcactcatcagtgattgtggtgttgagtgtcttaaaggtgaatatgcatgtctcactggagaagctctgaggcttgatctgttacaagttctattgaagcttcgatactacatatccgatgatccagattttttttcgggcttactaaagaaaa

SEQ ID NO: 98907 - DNA, 346 bp, Glycine max
  Clone ID: PAT_MRT3847_60326C.1
gggccccccaaaaatatgcgtatcacattcatgccattgaaaaaaaattttaatgcttatttaggggccccaactaaacttttacattggattatattttaaacaacttttttttattcagctgtccctgataaaactgggttttttttcaaaatatgggactatcttttgctacctttaaaaaatattaatttttttttcaggggataaagacccaaatttgttactgaataaaaaataccgggggggtgggacttttttttgccatggatgccaagtttattccttgtcaacaaaaaaaatgactttattggaaattcctaccaagccctgttagatatccccc

SEQ ID NO: 98908 - DNA, 193 bp, Glycine max
  Clone ID: PAT_MRT3847_60327C.1
tttcttttgccgctgctgctgatgcggcggtgtctgcagtccgaccccgaccgcctgcaccccctccgcgagggtcccccggagcttggaagctcgaagtctggctgtagccatgggagacatggtagtggagcctgccaccctgaagccaacttctgagcctactcctagcccatcagggaataacgggggc

SEQ ID NO: 98909 - DNA, 147 bp, Glycine max
  Clone ID: PAT_MRT3847_60328C.1
gtcgctctcactctctcattcataaggttcatagtcgccatagtgcgattcactgattactggatcgcaacggtgttgtctctcatgcattcaactgcattgtcatcgccagaggctgagggtagtcacccgatgtatcacccgcta

SEQ ID NO: 98910 - DNA, 291 bp, Glycine max
  unsure (1)..(291): unsure at all n locations
  Clone ID: PAT_MRT3847_60329C.1
gtagcagaagttagtcatgttaagcgcccccncnncattgaccagaattgttaacataattgccactttttcaaggtacatgaatcctaccctgttctacctataaaaaattctagaaaaagaaaatagatgaggaaaaaatgtatgttaacaaatatacatttgccatgaagattgacataagagattgggattttagtttatagaagatcctattgaacaattcctggtttatctatctggtgcatcggtggaaaaggaatgaacaacttaaagatttaatattgggcc

SEQ ID NO: 98911 - DNA, 428 bp, Glycine max
  Clone ID: PAT_MRT3847_6032C.1
cgaaaaaacggccaaagtttttgcgggggaatttcaacccctgtttttccaaaattacccttcaccaatatctttccaacggttttttggggccatcggacccttcccaagggcaaaaccttttcgcttccaattttttttctttttaacccagttttggcaaatttcctttgaaacttttggccaacaatttttttgttcaaaaaaatccagttcccatagaaaattaacaaaaaaaagggggctttctaaacgatttggcccaaagcccatttgttgttttaactttaacaattttaaccctctcactggggatttcgccccaccatcgggagttttaacaagcttttcactggcacataaaaaaattgaacgcccttcttccattttcaaataaattcaagagcctccacttggaaaattaaaac

SEQ ID NO: 98912 - DNA, 796 bp, Glycine max
  Clone ID: PAT_MRT3847_60330C.1
ggcatcctcctgaacgcggtggcgacgcagctgaaaaaggaagggagctccggccgcgtcgtcggcctggaccgcacgaagcgcacgacgctgtcgacgctgcgcgcggcgaagatggaaggcgtcggcgagtacgtgacgtgccgcgagggcgacgcgcggcggctgccgtttccggacaactacttcgacgtggttgtgtccggcgtgttcgtgcacaccgtcggaagggagtacggtgcgcggacggcggaggcggcggcagagaggatgcgcgcggtggcggagctggtgagggtgatgaagcccggcggagtggcggtggtgtgggacctactacacgtgccggagtacgtgcttcggttacaggaattgaagatggaagacgtgagagtctccgagcgtgtaaccgccttcatggtcagcagccacattgtatcattccggaagcccagtcagcacgtgcatggtcccgccgaagttcgcttggattggagattatgctgacgtggaatttttatttttcacactaaatagacaaatattaccaaatatataaatataaatatatattacactaagaaatgttttgttaattttttttcatttttttttaaatatgagtagatatctgaaagtaaagttatggctggggaggcgaagtcgaaccagatggtgaaaaaaaacaaaaattatatgtaaaaaaaaagtgaataatgtgatgacagatctcgagccaggtttttgtatatggtgatggttatatagatagaagtgaaatttccagcaaaaaaaa

SEQ ID NO: 98913 - DNA, 1044 bp, Glycine max
  Clone ID: PAT_MRT3847_60331C.1
catcgggccacgcgtccacaaatttgttggggctctcgtctgaacctttcattcaccgcaatacaaccttagattctcggagcgagagcgagaaacagaaacctatttttattttctctcttcatatcacttagactgagactggatgcttctgtatccatcatattatatgatgattattgaattgattatgcgttcagatttcacttcaggatcactttgacagtttgacttgtccggcaccaacttctggtattactattgtctgagttctcaggagttctttcacagaaggtagatgggttctagaatcccatctcataagcttagcaatggcctctacgtatcaggacggccggagcagcccaaagaaagaactccaacaatgacatcaacagccgtgccatataccggtggagacataaaaaagtctggagaattggggaagatgtttgatattcctgttgatggctctaaatctaggaaatctggaccaataacaggtgctccatcacggactggatcttttggaggagctggttcgcattctggacctatgcagcctaatgctgctgctcgagccacctatacttcaggtccaatgacttctggtggcatggctggttcgacttcaatgaagaaatcaaattctgggccactgaataagcatggggaacctgttaaaaagtcttctggtcctcagtctggtggagttacaccagttgggcgtcaaaattctggacctcttgctcccgttctacctacaacaggtctcattacatctgggcccatatcatctggcccactaaattcttctggggctcctcggaaagtgtctggtcctttggaagcaacgggttctatgaagcttcaaggttctgctgctgttcacaccaagctgtgactgttcttagtcaaggtgatgattccttcagaaggaattttccgaaggcggtgctatggggtattaattctgctttttgtgatgggtttcattgctggtgggttttattcttggagcagtgcacaatgctattctcctta

SEQ ID NO: 98914 - DNA, 333 bp, Glycine max
  Clone ID: PAT_MRT3847_60332C.1
acgcgtgcgaacacgtccgagaggactgctgaacgaaaccttaccggtttggagccttcgcactttcacagcgatcttattcattttacggttactaatactgactcttcctttgacgaatcgaaacattatattattgattgggtctgaacaatcttgttggaagaacctttggctttaaataggcaagcattatcattggattttactatcacatctacactggctactaaacttaagcttactcatatacttataactcgtctacttgttcaaaggaatgtattcgtatttgcgtatagcaaatagatgttggagtatatccttacaacc

SEQ ID NO: 98915 - DNA, 758 bp, Glycine max
  Clone ID: PAT_MRT3847_60333C.1
cggacaagaatccaaaaattaacgataatatatacaaatatcaacaagacttcatattgtgataagaattacacagctaaagagaacatgtattctatacaagctccttgtataaagaatcaaagaatgatcttctgttgtggtattattttgaatctatcatttgactgatgatgcaaatgtacactggcacatagaaaacgtatttaaggaatcatgatacacctgcaaggtgaggagtgcttgaaatcatatgtagtagaaatttgtgctcagaactgttatggttaccctgaaaggcacctgaaatggttccaaagggatcaaaattgcacatcctgttgaaaatagcactcacttccttgttaagttgcctagtagtcttcatgtcacaaacttcggtgttaatttgtaaatcaggattgagcattggagtcattgcacatgcactcaggaataggaaacttggtaacatccctcccagctttgatagttctaagttctggctgccccaatgagtcttggtgcaactctttcataatcctgttgaactcttcttcagggagggaagaattgtgaaaataagggagcatgtgtctcttgtttggggttatatatttcttgtgcccggcaaatgctcgatgaccctgaattgcatggcccatatttcccccatgagatggcatgaaaacatcactcttctcagagactatgtaatctatggcagccattatagaagccttatttgcaaatggttg

SEQ ID NO: 98916 - DNA, 211 bp, Glycine max
  Clone ID: PAT_MRT3847_60334C.1
aattccagccacgacgtcacgcgtccgatcacgcgtccgttcactctatcaatcatctccttttccactctattgactcctctatcccggtactggctataagcattatcaccccaaaacccaattttttttactaatacaactgctcttattttgatcttctccatgaagccacgtcagcagcgcgatacgaataccgttcatttgttca

SEQ ID NO: 98917 - DNA, 919 bp, Glycine max
  Clone ID: PAT_MRT3847_60335C.1
gatcgacggctgcgacgagaatgtgtgtaggcacttgggttgtgaatagaatactcctctctcttactgagaggctaaacctaaaacccttacctttccttcccgctctcataatgagggacagaaactgagagtgaaatgcagaaactgctacgcccttcttcttctccggtcgccatcctctctatctccgtcaccgtggctactccctttctctcgttgccccccaaagtttcaaacttggtaccaatgtcagcagcgttcacttcttcttccctcaatccccaactttcttattctcgctatttggctctctctaccaacacttgctctgtctgcaggtgtctcagtctaacccactcccacaccaggaacaacaacaagacccttcttcttcttaacccctctagaaacctctccttacattcggcttcagaaggctctttcatcacccaacatgaccctgttgagtatggttctcttgtggactcaaaagagaagccctttaactccaggctaaataggaggcaaaagggttctacttcttcttctcctgctccgtcaaatcctgatttgctggccatccccggtgtgggtcccagaaatttcagaaagctcgttcagaaaggtatcgctggtgttgcgcaactcaagcaactctacaaggataagttctttggcaaatctagtgacaagatggttgagtatctacagaattctgttggaataatccacaagaaccatgctgagagtataactactttcattaaacagagtgttgacgaggaggagttggaagacaattcctcttcctctgttcagaagaagcgcttaacattctgtgttgagggtaacattagcgttggcaagactaccttcctccagagaatagcgaatgaaacgatcgagttgcgtgatc

SEQ ID NO: 98918 - DNA, 369 bp, Glycine max
  Clone ID: PAT_MRT3847_60336C.1
gagaagttgtgggatggaactcagaagccgtcaaatatttcagttaatttggcactccagcacctgtatgattggaaacaaattcattgtaaagaatcatcttcatctgcgcagacaatacatggactccaccagcagcttcttttatgaagtgtagtattgaagcagtcttattccaagacaccggctctttggtgtttcagcttgcatcaggcactctcgtgggaattttattgctgccagaacacaatgctatcagggagatctttcacctcaggaagcagaggaaatagcattgcttacagtggtgagttggtatcatttctgcatttggatatataatgtcatttttgaaattgattgttaatc

SEQ ID NO: 98919 - DNA, 279 bp, Glycine max
  unsure (1)..(279): unsure at all n locations
  Clone ID: PAT_MRT3847_60337C.1
gttganagagcagntgtngcttntgagggtgatcttgataaggctgcagagtctttgagagagttgaagctgnatcgaccatctggtccaccaaagncagaggaaattggtgancttccttccctcancaataagcagncagtagctgtgaatcagaatgctaggacacagacnaaacccntactttctccaaatcaanccnnnanagatgtcnangattttaactatgnnaagcaagcagttatgctaggaggntctacagaatccagnaacagactt

SEQ ID NO: 98920 - DNA, 396 bp, Glycine max
  Clone ID: PAT_MRT3847_60338C.1
ggctcgagaccatctacaaattctctgtgttgtgttgtgtacttgtgttaatagtgtcgatgttggcggaaatttaagtgaatagcgaatgcttattaaatttgctctgtgtgcattgctgcttgtggcactggacgcggctgaagtgtggcccctggttgaggctgtcgcgacttgctactcaaccctggcgtactcttgtgaccctgcaatggaatctgggtctgcatcttagagtgcttggtgccatatgctgaatgagcacatgccatgcacctgggtctacgtccttaaccgtagctagaagcattttggaaactattatattgtcctgaacacccacagtttttgcgggattggctatccagctcgttgcgttgctatcatcactatctc

SEQ ID NO: 98921 - DNA, 256 bp, Glycine max
  Clone ID: PAT_MRT3847_60339C.1
attaccaactagataaagtctggtagcgggactaatctcccatgacatagtgaatcgatgttggaattcctgcgtgaccatgcctaaagtgagtttaaattatgcaatagtagtatttaataatgggagcgtaaattgtagatatgatttaattttgaagtcgcggggtccataggagggttagattagaaggcatgtgcgtgcctgcgatcccaataatgcataggaattgaagcataggcacccttcccttccg

SEQ ID NO: 98922 - DNA, 375 bp, Glycine max
  Clone ID: PAT_MRT3847_6033C.1
caaaaaacccctgtcctaaaaaaattcccataagggaaaggggttttattctggggtaaagggggtaaaaaaggattcccaaaaaaaaaaaaaaaaaacccttcccatttttccttttaactttggggagaaaaaaaatcctaaaaatcccggggttcctccccccttgaatttttaaatagggggcccctgggcccataaaaaagggcaacccttcacaaaacaataagcccttagggattggggtgttaaactttccggccctggggcccttccatggttgtttacccctcctttttttaggaaaccttttttagctgccccgggttttaggccctaattctcaggggggaccccccgttttttttaaaaact

SEQ ID NO: 98923 - DNA, 1158 bp, Glycine max
  Clone ID: PAT_MRT3847_60340C.1
gcagtccatgaaatgtatcattaaattgataaattaagtccttttatgctaaacacaattaattaattatgccgaatcaatcactccgattcctgttggttgttctctcaagtctcaactcccaccccccctctttgacttttctatcagaagagcttgttggagttgaaaactgagaagaaaacatggcagcacaagggcctgtggtagtagcatcacttctaattttctgtttagctggaagttgctatgggaaggttcacttctcttccttgaaaagaacccttgatgtcactgcttcccccaagcaggaacaagttctggaggctggattagacaaaatcacagtgacatgggcattgaacaagaccttacccgcggggacagactctgcctacaaaaccataaagctgaagctatgctacgcgcccattagccaaaaggaccgcgcgtggagaaagaccgaggacgagctgaaaagggacaagacctgccagcacaagatcgtggccaaaccctacgacgcttccaacaagaccgtgcagaggttcgagtggctggtcgagcgcgacgtgcccaaagccacgtactttgtacgcgcctacgcgttcgactccaacgacgaggaagtggcttacggccagaccaccgacgccaagaagagcaccaacttgttcgagatcaacgctgtcagcgggcgccacgcctcccttgacatctgctccatttgcttcagtgctttctccgtcgtgtccctctttgtcttcttctatattgaaaagagaaagggaaaggcttcttcctcaaagtgatgattattgaatcacaccagaaaaacgtgccaggtttacatttcatggtcattaataaatcatgagccacctgtttttccctcccataatagtcgcttatctttagtacaactaaatttcacgtcaacattgtgaagcatgatgtccccctaaagctgtaatatgagggaaagagcagatattttatgtatgtgattaggacatgactattagtgtaaaattacttgctgcatgtttgtttatcatgatgcatgcttcttattaatctttacataatacaaagtgttatttatcctttttcctaaaaaaaaaaaaaatagagacgggattgagttgaattcatgag

SEQ ID NO: 98924 - DNA, 427 bp, Glycine max
  Clone ID: PAT_MRT3847_60341C.1
cccacgcgtccttccacgcgttctggaggggcttccttgtgtgctctctgactatgagaagaggccaagtgtaagagatgcgaccagaattcttgtaaaggaagcaccatttccttttttgccaaccagtaaaccaagaatgagaattaggcctctttgtcctaaaaaaaaaaaaaaacaaaaaaaaaaaaaaaaaaaaaaaaataaaatcaaaaaagaaaaaaataaaaaaaaaaaataaaaaaaaaatataagaggtgtctcatatgttctacactagacaaccaaaaaacgaggggggcccttttttaaagattcaaaatttatttaccctggcttggaatacaaaaattttttttttggggcccctaaaattataataactggccccggttttaaaacctgccggatgggaaaaaccccgggg

SEQ ID NO: 98925 - DNA, 419 bp, Glycine max
  Clone ID: PAT_MRT3847_60342C.1
gcaattgatacatacctcatatacatgtttacctatttcattaccacccttaggataagggacttgaatataacgatacctggaactacaccaaatcctccttaaaggagaaaccctttatacactgaccatcccgatgatgagaccatcaccatcgagatgataggagagtgccgctacaatgagcacaccaacgctcacggggggtgctatgtggtcactgactggctttggccatatcataatatcttcagatatgctactaacccaagacacaacccaacctacacctatgccaaaacacccacccggacgaggagctcacgaccttgctcgcatgaatttctagcgatgacagagcctccactaccactacttccagatacgggtgtcctctacaccatcaaataaccggtggt

SEQ ID NO: 98926 - DNA, 248 bp, Glycine max
  Clone ID: PAT_MRT3847_60343C.1
ccctctccttcttcctagtgttacaacattccacaaacgactctatatcgtaaattttataatattcttctgagtctgttttttttttttctctcaagaccattataccagatccagtttgaagagatcggtagtatgagcagccagacgtcgaagccgaacgtggatggagtgcacatcgatgtgaaggttgtggagaggccaatgagagaaaggccctacgatctgttgctgcggtttcttggcct

SEQ ID NO: 98927 - DNA, 277 bp, Glycine max
  Clone ID: PAT_MRT3847_60344C.1
cggttaaaggtgagacacaatgaatggtaataattgaggttttaaaatgcagtgaggaaaggaagcttaatagtccatcaaggaaacagtttgcaacattgatgcttctgtcaaagctggcatggagaaaaccatagccactgttcatgaaaaggctcttagaatgacgggacgtgattccctgccaaacgagttggcttcccataacaaagatgccaaaaatgattagccaggcataactggacaagcaatctgctgcattagataacacggtggc

SEQ ID NO: 98928 - DNA, 391 bp, Glycine max
  Clone ID: PAT_MRT3847_60345C.1
gtgtcttccaaataatactttgccttgctaggtttctgggcactctactagaacttctttgcaaccagcttctcattaaggttctttttaatgtgtagagtgcaaacacacacacacacaatttggctacaatgtagtactatttttctatactatactgggatatctatcttgtgttagatttcgtgatctattttattttctggctgacttgccttcatttattgatatcccaactatgttgcaactatcaataggttgttttgaaagtagatgaattacatggggtactgtatttattgtttcttttcttgactattggtttgggccattttgatgtatgataaagtgatttttgattgggaatgaatgaatgctaggattgtgaatc

SEQ ID NO: 98929 - DNA, 581 bp, Glycine max
  unsure (1)..(581): unsure at all n locations
  Clone ID: PAT_MRT3847_60346C.1
acgtaagctcggttttcggctcgagactccactccatctccatggaggaacacaaaaaagaagggttttttttgcccacaccagttgcaaaactaatatcctttcaaacggatttgatctataatggcctggtttctctcttttcccctatccactctcttttctccgtggcttctaagtcctaccaccgtgctgaggagaccaaagacagtgttgaatcagcagtgcaacgtgctctttctcatcaaatcactcatggcagcgcactcttgctgaagaaactaggactttgctttctgagtgttgcgtatgtgtgcatggttatgattttggctctcattctggctgctgtggtgggtgttgctttggttcggttgtgggtggaggaacccgtgtctgtcaaggataatctgcattttgattacactgaagctcaccctacggctgtgttttcattcaatggagttagaagtttaaagggtcaccttaagaaaagcacataagtgtagttgccactcgtttcgcttggtatggaatctgttcattgggagcttgcggctgtgttnntattcaatggagtt

SEQ ID NO: 98930 - DNA, 705 bp, Glycine max
  Clone ID: PAT_MRT3847_60347C.1
tttcttttatggttcattttcagaagtcagaggttagctggtccattatccattattcaaaaagaacaaaagtgtagtccaagagagagctaatgaaactaagagtgtgcgtagtacggcacattaagctacattatctgtggtatcagtcgagtactgagagtaatgctactaaggaaaaaataaaaaagacatttagaactaaactttccacctccaaattctcttggtgttagaagctacagaggaggagagctcaggcaccaagcttgagaaaacaaaggcattcctgtactggcagcacaatctaagtaaaactgattctctgctagaaggaataggcgctcatgtctgaaaattcattaagaggtggtatcaccaaactaaaattcatctttaggatacttatcacctttccctagtgaggaaagccacttaaatatttgaaaaaccttgctgcccgagggctcctgctctagctttgcattacagactgtatggtaggcatgcttctgatgaggtgcaactattttttccttgaatacttcaaatggacagaaatcagagccatcacaacctggcaatggaacagggtgttcattgtgtaaacacttgcaccaagtgcttgctggtagatttgcttggagcgggacaactattccagactaacatgttgttacccgcaaaaggggccccagtgctacc

SEQ ID NO: 98931 - DNA, 498 bp, Glycine max
  Clone ID: PAT_MRT3847_60348C.1
gacaggtgtcaaggtgcatttttgtcttccataataccactacagctcttatggtccactgtgagcaagagcgctttgctggtccaaagtagggattggactttctcgcgctgtgataagtctggtgtcttgagaataaacttagtacgcacttttgaacaccaagttcctgcccaatgccaatgctatcatctggaaagcgcaacgagaatgaaggcaagtcgacctttaaacgcctgcgctcttcacatccgcctgctcaccactgaccatcgcctccagcttgtcaacaacagggccattctgcttctgctcaccctggtcatccgcactatgcgcgctcctcaggggactgttaggaacatccacggtatcactcctcttgggcctgaacgggatgggagtgctaggtcttgaagacaaaaacgaagaagccgcgctgagcagcgcgatcaaactcgcctgcacgacgtcgtggtggatgccgacgccccacac

SEQ ID NO: 98932 - DNA, 375 bp, Glycine max
  Clone ID: PAT_MRT3847_60349C.1
gagctagctatctcgatcgaactgtccaaggtcctgtcactatttcgcgctacgtcgacttgtttcaacaaaaacgtcaaaagcttcgtctataaccataggctacaagtaacaacaacggcctcaacaacagcaccatacaataccgtttagttttgatgccagttctagcacccattcataaatattagtaccgataatctcaactcttcgtatgcctcgtctattaactggccaggtgcaccgctgcctgggcttgccaggtacggaagctaggaaagacccagggaaggggtgcactttaaaattacgctgcccacgggggaaaaaggccttagggaaggttacaatggagccccgaccaaaggaagccac

SEQ ID NO: 98933 - DNA, 280 bp, Glycine max
  unsure (1)..(280): unsure at all n locations
  Clone ID: PAT_MRT3847_6034C.1
agagccaacataaaccctatcacccagggaagaagctaaattgcatcctcatcntggaagatgtcgtcacccaaggcaagcnctngntcaaggngcaggaanaggttctctgctccanaccctctntccttgcnctcagcgatgagctcgataaactacaacnacctcttgccatcgctntcttcgnagatctccaaatcaatgannngtcttctcagaacccttgccangagaccgagaccganacgaagcganaccacccttntngactggtgcnntt

SEQ ID NO: 98934 - DNA, 205 bp, Glycine max
  Clone ID: PAT_MRT3847_60350C.1
atgggttcacgtgttatttaattctccttgggggagcgagaccttgtttgggggggatgttgttgtcaaggttagatcactcgaggtaagatttatttgttaacttagatcttatcttggattgatggattgaggtaaagccagtagtgtgttgcttaaagctatgatagcacccaaaaaattacaaattctaagctggttacgt

SEQ ID NO: 98935 - DNA, 473 bp, Glycine max
  Clone ID: PAT_MRT3847_60351C.1
atgagttcctgggagcggaggctggaaggccacaaggtgcttgctaaggaacagaatgacccagagtcaaggcgaagtctgcagggacctggtgagaggcctcgagaatgtcttggctgcccaagactcttgttgcctttcttccaagccatggccatgccctttttctcaaatgggaggggctggagggtgtgtgggatttgtcttcagctgcaaccagccttgagcctgctgggctattttcagctgaggaggggtgaatataggaaaaatgcatttttgaaacgtttgcaacatgatcaaggtgttagttctccaccacacaagttgtattcttcttttgccacctcaaaccaccacagagtctttaaatgcaaatcaattggtcaatgctagtcaaagctatgttcttacaaaaaccccagacagctcagagctcagaaaatcctgtggagtggcgggggatccactag

SEQ ID NO: 98936 - DNA, 191 bp, Glycine max
  Clone ID: PAT_MRT3847_60352C.1
tggtaatttgtgcgtgaaagattgttgtgtattgtccctaagctttacccatttatcttgactttaagtaccgatgaatctcttcctaaaatagaattcgattatactcttattgaagttggcattcaaaattagattgaaaaaaaaaaaaaaaaaaaaaaaaaaaaaaaaaaaaaaaaaaaaaaaaaaaa

SEQ ID NO: 98937 - DNA, 311 bp, Glycine max
  Clone ID: PAT_MRT3847_60353C.1
gggcgcctccgagaaggctacaaacgctgatgctggggatgttttacattggagcgctctacttcacttttcggtaaatgtatcacttcgttcactttcatccaactcaacatatatggaattttttcaccgataactactgtcttgatcatgtgtgcaaagactacttcatattatcttattctcagtaaaactatgtggttcacattcttaggcatgtccaccaccatgaatgtaacatcacccatgaaatgactcactactactaactggctcatatttttttttattctaaatcacgcaaattcatt

SEQ ID NO: 98938 - DNA, 232 bp, Glycine max
  Clone ID: PAT_MRT3847_60354C.1
aagattcgtgggggagtgctacagagagactgaatacgcacatgcgcatacagattgaggtggatgtgtcgaagggccattgagcacacgcgcgtgcgtggaatcacacggacatcggtacattgtcactgatgacaactgacgacctgatactgaccctgacacacacatcgcgaatgcacatcgcatcacatctactccatgtcgacccgcctatgttcacggagacaga

SEQ ID NO: 98939 - DNA, 414 bp, Glycine max
  Clone ID: PAT_MRT3847_60355C.1
cccacgcgtcctcccactcttcctttctcttttcttcaagattatattcttgtcacgaagaagacgtgtcattcagtccgtaagagaggcaaacttaaagaaggcttgctaccacacatgggaaaaattaattctcaaggatccacaagatccttccactccaaatgcagtttcatacaaaacatcagcgagagagaaactgataaggcagggatacaacattgttgggatcattggagaccaatggagcgatctcctctgatgccacatatgctaaagctttacctttaagcttcctaattcggtggggtagatttagtttttccttcacctcttaacaatttaatcttgctcctatctatccatatttaataaagataccttaaaattttgttcacttaccttcaactttat

SEQ ID NO: 98940 - DNA, 269 bp, Glycine max
  Clone ID: PAT_MRT3847_60356C.1
gtgggggagggcgtcgcacaccctggcgcggttcgaggagtttcgcaaggcaatgaaagcacgcgccaccgcggggctcgccgagggaaatgacgatgaggagaacacatggtgcatcgccgacgggaacgaggtcatgtggtttcattgcttgattcaatcaaatatctctgagaagtagttcttggagaggttaagggtttggaggaatgggaggttgttgttgtggtggtggtgatggtttatgacgagtgggcttatgtaacccg

SEQ ID NO: 98941 - DNA, 521 bp, Glycine max
  Clone ID: PAT_MRT3847_60357C.1
gttgcatagcaattgcatccctagcagtagtatggatattagacgcaaaattgctattgagaaaggctatgaagatcaaccacaagctgtagtgaacatgtctgctttgtggctcttaccgcgccaaatccttaatggattggctgaggccttaggtgtagtaggacagaatgagtttttcctcaccgagctacctcaatctatgtctagcctagcgtccactcttaatggccttggctcttctgtggcaaatttggttgcaagtttcattctcagtgttgttgacaatgtcactggaggtggaggacatgaaagctggctttcaagcaacataaacaagggtcattatgactactactatactttgatttgtgctttgtgctttgtaaattttgtatattttctctactgtagtaaatcttatggtccttgtaagaatagaggaaagtagaactttagatcttatgatccttgtaaggatagagaaaaatagacctttagatcttatttatggtttgtag

SEQ ID NO: 98942 - DNA, 257 bp, Glycine max
  unsure (1)..(257): unsure at all n locations
  Clone ID: PAT_MRT3847_60358C.1
cccccccccccccacccccccgaacgcagtgatgaactgnagaaaaggaagacacaggcagggggagtcacgaagaagaagctggggtagagaaagagaaggataaggtggcaaaacaaactgttggaccaccagaggaagactgtgaaaaaaacccggaagggtcagaaagaaccgacaaaatcaatgaaggcctggacttggatgcaaaggagaaaggagcaacaaactgacaggagaacaaaagagaaggcaaa

SEQ ID NO: 98943 - DNA, 490 bp, Glycine max
  unsure (1)..(490): unsure at all n locations
  Clone ID: PAT_MRT3847_60359C.1
aataaataaaaaaaaaaaaaaaaaaacgactcctccactaaaacaagcccggggaaaaaaaaaaaaaaanaatttttttttaaaaaatacaaaacaaaaaaaaccccccccgttatttttaaaaacccctcccncccccccccatacacctacactaaccaaatatatcattcatcatccttcccttttttttaaaataaatacaaacttcactacccctatacataaatctcatatacttacacaaaataattaatccaccctaaaaaataaccaactcccttcacttacttcaacaaaaatttcactaccattttatcctctcaaaaccatataacaaaaaaaaaaccttataatacaccctccctatcaaccacacttactctactctcaactcatttctattcaaatgataacttaccagaccactcaaataaatccctaaaaataaacttctcccatgttttaaaaccaacctcctttaaatact

SEQ ID NO: 98944 - DNA, 247 bp, Glycine max
  Clone ID: PAT_MRT3847_6035C.1
ggattcggctcgagtagtcttcctgataaataacgctgtaatacagtggagaaatcctgtccctcttaagataccaatgcaggcaggttaactctgtcagcagcgtaatctgcattccactaccattttcttcaatccgatctgccgattgtcgtttttttcccggacggctgtttctcgacgcgaaagtccccgattccttcgtccgttccatttcggtcaggattcgcgccattcccttgtccga

SEQ ID NO: 98945 - DNA, 2700 bp, Glycine max
  Clone ID: PAT_MRT3847_60360C.1
caacctaggaatggaaattcttgcttcctatgtttcagtagacggtcggttctctattataaatatacacatctatgctaggtatggccacgcgtccgggatgtttgaaagcaacccgagagtcttctcagcaagttggattattcaaagacattaacagagatatggtgaacaataatgtgagagatattcctgaaacttcttatacacataacagagacattttatctggtggcatttctgctcctattaagatcaatgaaaagaattcaagaggagcaaagggacacaaggttgtttctgatttagtcaagcctattgacgtggttcctggatctgagcctgaaattcaggctccttttactgttagtaatggatctgaaaatctggtggaaagtagcatcatcaaggagggcttacttgtagaggttttcaaagatgaggaagggtttaaagctgcatggttctcagccaatattttgactttgagggatgataaagcttatgtaggctacacttcacttgtagctgctgaaggtgcagggccattaaaggaatgggtttcacttgtatgtgatggagacaaacaccccagaatacgtactgctcgtcctcttaatactttacaatatgaaggaacaagaaagagacgtagagctgctatgggagattatgcatggtctgttggggatagagttgatgcatggatacaagaaagctggcaggaaggagtcattacagagaagaacaagaaagatgaaacacatttactgttcactttcctgcttcagtggaaaaacaaaacttgtcagagcttggcatctacgtccatcccgtttttggaaggatgggaaatggattgagtatcccaaagtggggacaaatgacagttctacccatgagggtgatacaccaaatgaaaaacgacctaaattgggtagtcatgcggtagatgtaaaagggaaagacaggatgtcaaaaggcagtgatgctgtggagtcggcaaaacctgatgagatgaaattacttaacttggctgaaaacgataaagtgtttaatattggtaagagcagcaagaatgaaaataaatttgatgcacacagaatggtgaggactggtcttcaaaaagaaggatcaaaagtaatttttggtgttcctaaaccggggaagaaaaggaaatttatggaagtaagcaagcattacgtggcacatgaaaacagtaagatcagtgatagaaatgattcagttaaacttgcaaatttcttgatgcctccaagttccggacctagaggatggaaaaatagttccaaaaatgatgccaaagagaaacatggagctgactccaagccaaagacaagtcatactgaaaggattaaggattcttcaaatcaattcaagaatgcttcccagagtgaaagtaaggtggagagagcacctcactctgcaagtgatggagcaacaggatcaatcttgttttcaacgctggcaacttcggtggatgctcatcccactaaaagagcatcctcatcaagagcaagtaaagggaaacttgcgcctgcccatattaaatcaggtaaaggtgagatggaaaaggctttaaatgacaatcccatgaaatcagcatccgacgtggttgagccccggagatccaatcgcaggatccagccaacatcaagactattagaaggattgcagagctctttgatcatctcaaagattccttcggtttcacataatcgtaataccaagagttaaatggaagggagcttgcaatgattatgatgcggacacttaaaagaccggcctgttatttagatgaccgacatacctagcatagatgtgtatatttataatagagaaccaacctaggaatggaaattcttgcttcctatgtttcagtagacggtcggtcatatttgattttagtatttatttaaatttgaatgtgatttgatccataggctgtgctgtatatggatattctccatgttaccttgtttgtagaggtttgttcatcaaatgataacataacgcgatgctctactctatgccaatcgccgcattcactgccatacacctagaatgatggcagaactattggattatctcagagttacatttggtttagcataatcataaaatgggaaaatcaagcgttgtgtggcacccagagggcggaaaatgggttgcaaaaatgttaccattgatgacagtgatgtcgaattcactccaagctcagcccacatagattgaattaacatttccaaaaatttgaggaatactactgcttgcgccggctaaaggaagaagaggtccgacacagatgccattaagaatcatgcagatggcttcaagatctcttcatccctggccgagaggatggaggcgcaggcaactcactcggcgaatgctgcacccacaagtgcaagtaaggttgcgacagcaccactttcggcaggtgctcttgcaactgaaacggcttcctattccactccaaggacatcggcatctgcccctgctaatgcgaaaccagcgtcagcacgggtgaaaaaaggtaaacttgagactgcaagggcttcagcagccaacctcgtgaagccaccagctccaatccccgatgctttcctcttaaaaaaaaaaaaaaaaaaaaaaaaaaaaaaaaaaaaaaaaaaaaaaaaaaaaaaaaaaaaaaaaacaaag

SEQ ID NO: 98946 - DNA, 691 bp, Glycine max
  unsure (1)..(691): unsure at all n locations
  Clone ID: PAT_MRT3847_60361C.1
ccacgcgtccggtaactcttggtggatatatttgaatatgaactttaaggtgttaaatccaactttcatgtcataatttatgataaccgaacctttctaaatacatttcaaatgccctaccctattgcaaaatggggttcccctatccttgttgcagttactgtttgtgtgttataacttataacctaggagtataaagattatggcagaggcaaacttatattaaagcatagtagtccataggttaaatctcaaagattgtgtaactgtatgtttgaggttcatgacttcctctcatttttctttactttatgcaagcctttcctgtagtctaatgaaatgttggactgtgtatactaacaggcagtggctgagagggtcaataatttgaaaaagaagttaactgagggagacttcagtgttctcaaggagattcgtgaaacagttctacagttgaatgcaccatcccagttggtagaggagttgaaaactaaaatgaagagttctggaatgccgtggccgggtgatgaaggtgaacaacgatgggaacanagcttgatagctataaaaaaggttaagacttctctcgatgtaaattatattgcatgaactaggttcgatgcgggtttcatttaagttacatcttatgcaagaaaaagtttcttttcttgatattgggaactgccactac

SEQ ID NO: 98947 - DNA, 287 bp, Glycine max
  Clone ID: PAT_MRT3847_60362C.1
cacgcttcccatctgtaaaaccactacacctaccgcattttttttttccaagaatccaaatatccacttggtagtttaccatataggctctgggggcgtcacactcactcaccaccacactctttatcctcataaaagattagaccctttcctaaaaattcaacatcctatatctccattaaaattaattcttcccttattaacataatttttcatccatattttttatttccgatcctttttgctgcaccaaatttcacactcaccttcatttattaaatcttcac

SEQ ID NO: 98948 - DNA, 405 bp, Glycine max
  Clone ID: PAT_MRT3847_60363C.1
cacacgcgagctcgttacgtaacattgtgctttttctgagaatcaagtggatacctaataagggagacgtgtaagacgaataacaataagaatatgtacatcgtagcagctataaagatattccaacatcgacaacttatcagtggcttccgaatcaagataattgctcttatgtatgtcataacacattcaaagatgaccgcgaatccgatactttctagcatgccatacttcctacaatatgatatgctactgaatcctagattcgaccattcactagcagcattatttctgactttacagctagtgtaactgttggaactaaccctactaataacatgttctattattagcacaaccactaatgatttgacgcatgttacctaagcatgaggtcatgtgtct

SEQ ID NO: 98949 - DNA, 429 bp, Glycine max
  Clone ID: PAT_MRT3847_60364C.1
caccgcgggaatggaacaataattatacgattaactcagtttaatggaacatgactaaaacaagtccaagtttccagggaaccaccccttttttcttaaggaaagctatttattttaggcttcctccatctggctactaaacgtaattggctgttgcagggctgatacaactcaccttttgatttcaaggagtgaatgggggagcaagcaatgatcaccccattttattgtttttttttaaccactttaacgagccttccacgaacccattttttaattactacaaacattggctgattttcaagggagggaattcccatcactggtggaaaaggatctgtttcgaattcacttctttgaacctggtctggttccctttgttgattggagggactaaattcattcatttgactattcaaactaaaaggg

SEQ ID NO: 98950 - DNA, 371 bp, Glycine max
  Clone ID: PAT_MRT3847_60365C.1
cgaacctgggccggtgccattggaagccattggaaaattaaaccaccatttggccatttttgttttttccttaagcctgggccaaattccatttttagcctgggccacaaaaaccttttattccgtggaaccttccccccccacacttattcccaaaacaattcccaagcttttaaattccttaaggggagggggatttcatgggtttccacttaatggttggaatgggcttcaaaacaaaaaaaggggaaccttggcttaaaggggcttttaaagggatttaatcaagattggcttatttggcttgagggttattaaaaccaaatgccttaattattttccaacctgccttgtaagccaggaggtttaac

SEQ ID NO: 98951 - DNA, 1600 bp, Glycine max
  Clone ID: PAT_MRT3847_60366C.1
agctttcagagatggcattggtcaaccgatctagctttctgggtttcagattgagttggaagccaactaattaatagtacctccaaaaaaaaaccatgtcccgtgactgtgattcccttcctgaaaacaccattgttgtggggtgtggggcggcgggtgtggatttcttagctaccgttgcaacttatcccaagccagatgacaaaatcagaagcacttccttcaagattcaaggaggtggcaatgcaggtaatgcgttaacctgcaccgcacgcttaggcctcaaaccaagaatcatctccaaggttgcagatgacactcaaggcagggaaatattacatgagctagaggttgatggggtagatacatcctttatggctgtctctaaggaaggcacttcaccatttacatatatcattgtggacagccaaactaagtcccgtacttgtatacataccccgggatttcctccaatgaagccagatgatcttccagagtcaaatttgctaactgcattgaacggagcaagaattgtttatttggatgggagattgcatgaaactgctctagttgttgcacatgaggcagttaagaagaatatacctatcttaatagatgcagaaaggctgagagaagggttggatgatctcataaaattagctgattatgtcgtgtgtgctgcacggtttccacaggcatggacagaggcatcaacagtttctaaagcacttgtttgtatgcttttaaggttgcccaacatcaaatttgtgattgcaactttgggaaaagatggttgcataatgcttgagagatgtgttaatgaggatccttccgctgaagaagtggttgttgacaaattactggaatctctggagatgagaaagaatggaagcacacacatcccaacctgcatatcatcgccagtgacaaaattgcatgcagaaggtataggaacagtttgcagcaggttatacattggaacagccaagaacataccaccatcagagcttattgatacaactggtgctggagatgcatttattggagccgttctctatgctatctgtgccaacttcgagccagagaaaatgctgtgctttgctgctactgtggcagcttccaagtgcagagctcttggagcaagaagtggtctcccttaccgcatagatccatgcttggcatccttcatgcagtagcattctttactaccactgaagtgagccaaatggtttagaataaattttttggttagaggaagtgatataatattggacatttcttctacatctttgtttcatactttcatcaaatgtcaatttagaattcaaagccaactttaacactgctggaaaagctacccctttcgttgatttgtcacacacttgcctcactatggtggtctatatatacaagtcccaagataccattccattttcacaatattgatgtcttcataaagcatgtggtctcgtgtatttaacgttgaatgtcacttttgaagagtaacattaaatatttatgtttagatatatggaaaaaagaatggctgagctttgtttaattagttaatttaataattaaaaaaatgttcaatgaaaaa

SEQ ID NO: 98952 - DNA, 397 bp, Glycine max
  Clone ID: PAT_MRT3847_60367C.1
ggggagtccttttttttttttttttttttttttttttcagctagaccgaaaataagaaggcgatgggtcatcaaaacgacaacgacaactacgggaggggcaccgccaccttgctccatctcgcgtagggagcgaattttacgactccctccataaggggggggtggaacccttcttccgcggggatgatgtaaaacctgcacggcgaatgcggccacaagatccactacttgttcaagggggggctggcccgagactcccccggggggaaaaaccaactactggggcgcttctgcaagaaccaattgaacgtgtattttaaaggcaccattgggggctagttttagaccaaaacgctcataaacgacaaaaacgacatggacgggcgcctgggggc

SEQ ID NO: 98953 - DNA, 918 bp, Glycine max
  Clone ID: PAT_MRT3847_60368C.1
cccacgcgttcgtccacgcgtccggagaagggaaagttaagatgaagaagatggtggctgcaatgatgctttttcttctcatttctacgcaaatgaagagcgttgagccggatgctgcggattgcttggatggttgcagtactgcctgtgttcaaagcgactcgaggcttcaagcacggtgtgaacgcaaatgcagcattcctaaaaaatgttttaaggttttttttttaaaaaaatgtgttaggcccaaaagagagaaaacgggatacagacgagaagggaaagttaagatgaagaagatggtggctgcaatgatgctttttcttctcatttctacgcaaatgaagagcgttgagccggatgctgcggattgcttggatggttgcagtactgcctgtgttcaaagcgactcgaggcttcaagcacggtgtgaacgcaaatgcagcattagaatgcgaagaagatggtggttgcaatgatgcttatatttcttctaatttctacgcaaatggagagcgttgagcccgatgctgcagattgcttggatggttgcactactgcctgtgttcaaagcgactcgaggcttcaagcacggtgtgatcgcaagtgcagcattagatgcggtccagattccacaatcaaggaggacatgggttgagtatgtaaagtcacagcgcaagcaagcagtgtctgcttgaccaacaccgtgtcttttttagtccttgcttatatatgatataacattttaaagtcttcccgatgctgtagtagcatccaaataaacatggatgatagacagctttttaagatcaaatttgttagggtagatgctttgtaacttgaaggaatgtgatatgaatgaatgtttcattatggcaataaatacatcaccaattaatatcactatacatttgcaac

SEQ ID NO: 98954 - DNA, 339 bp, Glycine max
  Clone ID: PAT_MRT3847_60369C.1
cttacgcttttcgcccacgcgtccggtcttatttgaaaaacacttgggcgttggcgcaaatgttagcttcgttaatttcctctggagacaacaggctcactgagaaaacaaatttttacttgctgagtatcgcacatcttggttgtttattatccaatagcaacttaatttagaaaatttctaccgcactacattaggtggctttctgatacctagtcgatctacattcttccattttttctcactgctgaacttaatataagcggaatctgagtcatatttatatttcccgcttcttttacgacggttgatattaactcttggactaaccaccataaa

SEQ ID NO: 98955 - DNA, 296 bp, Glycine max
  Clone ID: PAT_MRT3847_6036C.1
ctaaggccgaactgatgaatgctagctggactcggctaactcttacccatcagtctagagtttgcaccagagtgtacgaaatactctattgcatcgtgctgcatacactgcccccacgtcatactgactgctgcttgttatcggtggtggcactcatcatgaatgctacgctcaaggctgcagagactgctcttgacgtagcaaaaagatctgctagtccagagctaggtctcctattgagtgctgctagcactgcctagtctactgaccgaaggatgcctccagatccatcagga

SEQ ID NO: 98956 - DNA, 1003 bp, Glycine max
  Clone ID: PAT_MRT3847_60370C.1
caacagtgttaggcccaaaagagagaaaacgggatggatactcatcataggtcaaagttggtggctaattgataagaagcgtacatgtgcttctttatgttatgttgagatatggcttgccatttccgtaatttgatcgagtaatcatggtcatttctttagcatagagttgataaatatcatcaagacagaactagtttagtgttttacgagtaagttaagataagatgaagaagatggtggttgcaatgatgcttatatttcttctaatttctacgcaaatggagagcgttgagcccgatgctgcagattgcttggatggttgcactactgcctgtgttcaaagcgactcgaggcttcaagcacggtgtgatcgcaagtgcagcattgtatcttgttattttttataaaagggaggccaatgccttatattgtaattatacgtgggaatgttgctccagcaaaatcaccccacaacaaatgtttacattcataaggtggttcatcaaaccaatgtattattccccaggataactgtcatcaacatttaatcagcagcataattgtcttaaaataaaatcttctttgtcttcaaagatacactccaggtttaaactattcatttaaagacaatccaaatggtgacattctcgtctgggtggtgtagttggttatcacgctagtctcacacactagaggtccccggttcgaacccgggctcagacatttcaatattttgtagcccatgtctgtaaattactttgagatatgtttttaggtttttttttattacaaagctaataaaattttacagattccacaatcaaggaggacatgggttgagtatgtaaagtcacagcgcaagcaagcagtgtctgcttgaccaacaccgtgtcttttttagtccttgcttatatatgatataacattttaaagtcttcccgatgctgtagtagcatccaaataaacatggatgatagacagctttttaagatcaaatttg

SEQ ID NO: 98957 - DNA, 1284 bp, Glycine max
  unsure (1)..(1284): unsure at all n locations
  Clone ID: PAT_MRT3847_60371C.1
ccacgcgtccggtggtgtactgaggaataattaattactcataaaacacacaattgatttccgtcgaacaaatttattgtagatttgtgacacaaaaattggaagctcaatcttcatttatgggcaattttgttttgttacagctgagtttgtgacaggatcaacagcatggcttggcagaggtctgtcctgtgtctgtgcacagagaagagaaagcgatgccagaccctcttttgatttaactccggcccaggaggagtgcttgcagaggctacagaatcgcattgatattccatatgatggttctatccctgagcaccaggatgccctaagagctttatggagtgctgcatttcctgaagaagaactccatggtttgatttctgagcagtggaagaacatgggctggcaagggaaggatccatcaacagattttaggggtgggggggtttcatatcattggagaatttgggtggttttttgctaggaatttcccggtatgggctctttctatttttgntcacacattttaaccagtcaagccgcattggttgagcaacttttctaaaatttcttgcagaaaatgggtcagcttttgattttcctattgcataactttcaagctaatggatcatcaatggctttatggatgcctcatcatggattttaatgcagtgatgaaagaaacccgacgtcagctagagaaagaacttctcattgaagacatagcccagcttgaagatttaccctcatacaaattactttcccgataataccagtcccaaaaacctgtcactcctatttttcgccaataggcttttgtatatgatggatgtgatgctcctcctatcataattttcactcctgtcaattcagcatttttagtaacatttcagcaagaatgagctataacatgtaaaactgatgtgagctttaagccttatacttgatgtcacaaggtttgagatggatgcagcagttaagcttttagtctagttgaaagatgattttgttggcctgacatgctgccaggaggctgaaatgtaaatttgcttggtattgggtattaatgatttgtggtttgccactttaccaatatatttccttgtggtgttataactggcaattgcagcttgcagtaatgtctttcagattgcatcttcttgatctagtttgatagactgcatatgtttgcagatgaacttgcctataagagtaattgtgatatctatccggagttgataaagattgtattcctgatagtaacacgtttcgttttatcat

SEQ ID NO: 98958 - DNA, 571 bp, Glycine max
  Clone ID: PAT_MRT3847_60372C.1
actattaaactcagtaacaacagagggtgcactccattcgcctaagtctaatacaaatccagacaaagcttcagaggttgccactcctccttttccatttccctaaaactccattttcccagaaaatttagaacaaaaaaacaaaaagaacgacaaaacaaaaagggcacctctggctttcacgtacatgctctataatgagttcctcagcagcaggacctcacattccaattccatatgaatgccaataatcaaataaaaaatattgcatgggatcctaatgtgacaatgatgatgacttcattgtggtgatgccaaacatgaaactaataaggacatgaccatgagtcatagtggtgaattaatccaccaacaccaattactctataaaacctgttttggtcaaaatggcatttctcactttactaagatctctccctttcagtgtcctcccgatcccttcacacacagagaaagatgaaatctggctccttgcaagtttcctagcaatccattcatgaggaggaatcatatcatcctcatcctcatcgtcatcatcaccataatgatc

SEQ ID NO: 98959 - DNA, 249 bp, Glycine max
  Clone ID: PAT_MRT3847_60373C.1
ctcataactcctgagtgtcgcctgtgattacgatttctgcacaaacaaattactaagtatatccaagtcattcaagtcagattctattaggggaacgctgacacggggtttacaaattctgcagaggatcgtcggcaatgcattgcaatctccaggtaccaatctaaatatggtgatcttagtgatcatgatgctttgccaagtgcgcgatcagggcacaatcgaaatgtgaccaggttgtagattcac

SEQ ID NO: 98960 - DNA, 124 bp, Glycine max
  Clone ID: PAT_MRT3847_60374C.1
ctcgagaagctcgagccgcttggttcagagatccttctctgtacttcctccttcgctggtcgatatcaacaagtgtttgaagagatacccaattgacgaagctcatgggcaagaaaggaggggc

SEQ ID NO: 98961 - DNA, 879 bp, Glycine max
  Clone ID: PAT_MRT3847_60375C.1
gcttatattccgagtttaaatatgatttactgccaatacaaagttttttcactgtcatttaataatgtgttggtagttggcacttcattaaagaagttagacttcttgcatagtggttttggtggtcaaactctttagtaatctaaattgaatccattttttttaataagtatatttcaaatcaagctgaattatggtgtggcttttctattcatgtcccatggatttgaacttttgaagttgtgaaccatctatttcttacatgatgaatttggataggatgaaattaaaaaagctgaaagtgccatccagaaggtgggtgcatctctattgcaagtatgctcaggtttttaaagtttatattctgaatgaagtggactgatagggaagtagaagcagggaacacaacacagggagcagcaaacaacatcaacaaagcccaagcaacagaaaacataaacagggaaggacagagggtaccaatagcaaacaaacccaagagaagagtaacaaggccctcatacatgaaggattacgcctgagggtaggatgggcaaggcaaaatcagcagcatcagctcagcactaaaacgtatctagcttgattgtgcttgtctcctatagtaggacaagaataacaaattccattaggaaggatattcccgtaggcaaatgaatccaaattctgttagaaggaggatcctatatatatcaatgtaaataatcaatcaagcacaatgaaaaatatactttacttaaaaaaaaaaaaaaaaaaaaaaaaaaaaaaaaatggaggtactggccctcgaagccagctcgtgaaattggcacctaacatggacacattgatagtttccttgtcgaacagcgctaagccact

SEQ ID NO: 98962 - DNA, 440 bp, Glycine max
  Clone ID: PAT_MRT3847_60376C.1
gctttaaaagatcctaaaagcaaggttaaagtccctcctgccgattccgctcgtgcggctcgggagagaccgggtcggtcaacgattcagtttctacccaaggtgtctctttcccacctgaggaacccgaggaccgcaaaggctttaaaagatcctaaaagcaaggttaaagtgaatccttcagaaagcaatcgtggatcaaaggagagatctgatagaaaaacaaataaatttcaatcaaaggtatcaaatagcaatcaaaagaaacctatgaactcaaaaagagagcaagaaaggaggcggcgagaagaagtagctggaaagggagaagaggaggaagaacacgcaggaagagggcacgaaaggagaaaagaagaagaagaaacagcacggagggaacaagaacaagaacaggctgaaagacagcaacaaaagagaga

SEQ ID NO: 98963 - DNA, 345 bp, Glycine max
  Clone ID: PAT_MRT3847_60377C.1
acggctgcgagaagacgacagaagggctgcccaatgcatgaggctcctgaagaggtctaaagtgggtagatatttgcaggctaacccccaacccaagcaacaaggcttaccattgggaacggtttttaatcacaacaactcattttttttttcccaccctttgtcttgcaaaaaagtataactttttttggggaaaacgttttttttcacggcttccctaaaaatgatccatgaccagaataaaccaacaaattttgcaaaattcccaaaaaaaaaggtctaccctgatttaaattaactttcaaacttggcacaaactttgtccataactaaagcaaacatcct

SEQ ID NO: 98964 - DNA, 368 bp, Glycine max
  Clone ID: PAT_MRT3847_60378C.1
aaaaaaaaaaaaagggggcccaaaacaaatttttcccccccccggggggaaaccccaaaatgcctcgggtgaaaacccccggggacccccaaagggggccaaaaaattgctttccccggggcccccccttttgcccaggcccaaattttggggcaaaccccccccctttgggggcaccaggaccaacaccggggccaaaaaggttctaaaaaggcccctccccaggaacaataccccgaaaaaaaaaccccccccgggaaaccggccccttggttttttccccgcccccgggggcccccccgggaattcgggcccggcctccgggggcgcccaatttcccctaaaagggggcgaataaaacccggggg

SEQ ID NO: 98965 - DNA, 211 bp, Glycine max
  Clone ID: PAT_MRT3847_60379C.1
aaaaaaagcctaccaaaacctcccaaaaatgaacgagtattcttctttctttgctctctagtccattgggggccgtcaccacctcataccgaccgtcagccatagatgatttcgtgctccataatgaaagtaaccctcttgaaaatgccggcacatattatatcgcgtcagacataactagcatgatggtggaataacgagcagcccccaa

SEQ ID NO: 98966 - DNA, 2556 bp, Glycine max
  Clone ID: PAT_MRT3847_6037C.1
ctaagatggggcataacataaagattaggcaggaagtcaagactcccccctttgatgatcaaatcatcagcttatcacagtcatatgatactgttggaaataaaaatttgtttgtgcagtcaattgctccaaagaacccacgggcgccaaacaagcctatgcaacctcttagagccccggcgatcattcgcagctcgccagtgaatgcttggtatgggaaagatttccactttcatgggatcgtacaaaatggtctggtgcagaaagggcaaccctcttcataccagttaagcgtcgactcccaaagtcagtgcttcttctatcacattctgttttacttcggggtgctgctgagccgatggacatcgcatgggtgatgtaattgcatctgtttaagatcttgcaattacacctgagacgattagacaatcttgaccgaaagtgaattggaatctgatggcgtcgctgtttgtccgtggccggtcggctgctgtacgtgtttcgtcccggtcctatggtggagatcctttgatcaaccaaggtgcatggacgaatgaagaggacaaatctcttttacttattgtccaagatattggcatcaggaactggtttgatattgccacatcattgggcacaagcaggactccatttcaatgcttagcacgattccaaaggagcttaaatccttccatgctaaatagtgaatggactgaggaagaagattctcaactctgttctgctgtggcaagttttggtgctagggattggcaatctgtggcttctgttttagaacggcggacaggaacccagtgctcaaatagatggaaaaaatccctttgtcctgagaagaaagggagctttacacgagaggaagatatacgcataacagtagcggttatgctttttggacgaaaatggaatcaaatagctaactatgttcctggccggatccaatctcagtgtagggacagatacctcaattgtcttgatccttctttgaaatggggtggatggactgaggaagaggatttaagattagaagctgcagttgtcaagcatggatactgctggtctaagattgctgaagaagtgccacctcgtactgattctcaatgccggaagagatggaaggtgttatgtcctgaatatgttcctttgcttcaagaagcaagaaagaagcaaaggtctattattggttgtaactttgttgatcgagaatctgaacgcccagccattacactgaatgactttctacctttacccgtgccagctccaaaatctgatgttggtgcttcaaatctccgcaagaaggccaagtcaagcaatgttcccaaggaaatgagtaagaaatgcaaaaagagctcgacttcataccaaggaagtacaagatacagaggtatatagtgatgatgggatcaagacttatggtgaagtctctgcatgcagcaatgttcccaagaagatgaggtccaagagacatacaaaaaaaactcgaaattgtcccaaggaagtagtggatatatattgtagtgagaaggtcaagacttgtattgagagttcagaaagtcaatctacctgtattgcgagttctggaaatcaagattcagacaacataactattgcatgctttttacgcgataaatcaaaggagatgctatctagatttaccaaagatttgagtcaggcttccttctcctctaggagtatagatgtttctaataagcagaatgttgcttctgatagacgagtgggaaaaccagaggatgcaaacactttgacaggtggtgatcatgaggaaatgacccttgcatgctttctgggaaacaaatcaaagaaaggaagtcaagctgctaacggacgtggtgcatgctcttcgaccatcatcatacctgatgatagtggactgtcaatgtcaaagcatgttgaaaaggagactgttttgcatggtggtgttgctgaaccaatggacatcgttgtggaagaaaaggatgatgagcttcttacttccttcttgcaaaacaggccaacgaggcagcgaaaacgacccagtaggtttttataaaggtgatgctaattatccaaattttggcctggtatacttttttttttttccattcctaggtatgaatagaagacaattaattaaaacctgtgccgtgaaattgggtagtggctaatccatatacaaaattgttgaagtaattgaaagccaactttgccatgatcttgaatttgaagttggtttaggtacagtgagtttcgagttccttatgctgagcttgggcctgtgtacagattttcggcctggcgcaatttgtataccaaccgattgccataattcttctgttcccagtttatattgtttctattcttaaagatctcaggcgtcaatgtgaagcgtttggattttggaaaactgatgtcgagtttctttaaaaactgattgagtacagaatcataacaaaagttattccaaaaccatcgatagagtacgggtttgaactaatatttttgcaattttaaaatttatcttgttatttttttttatcaaacaaa

SEQ ID NO: 98967 - DNA, 188 bp, Glycine max
  Clone ID: PAT_MRT3847_60380C.1
accacacgttcgaaaaaaataatacgcattttgtattcacaaacccaaataattatacaaggtgcggataatcactactgctggatatgtacttaaacaactacattcatctaaagataagacacatactcaataactaaatacatatccaaatccctctgaacgatgtccaacccgttcgcattatg

SEQ ID NO: 98968 - DNA, 235 bp, Glycine max
  Clone ID: PAT_MRT3847_60381C.1
attacaggttctttttttttgggcaccattcctcataccattggacaggatactgtttggaatgagatggcaacagttagaacaccattgaattttgattctagcaagcagagcttttgtcagtattctattgaccttcttggtggatgtatctttgtggtcaaaactggtgattggatcatacttatacaaaattttccaaattagaaacttgttgagaagttgttgtttggaa

SEQ ID NO: 98969 - DNA, 183 bp, Glycine max
  unsure (1)..(183): unsure at all n locations
  Clone ID: PAT_MRT3847_60382C.1
ttcctgcgggaagttagggccantgaaaaaatgtacaatcccttccgacagccngctgtatcactttgacacttgcaacccaaccaccccatcaggccccaccggagggagcaagggacctctcgtgatgagctggctaagagagcgaaaacagcggcacattttttaggggggggggggcca

SEQ ID NO: 98970 - DNA, 539 bp, Glycine max
  unsure (1)..(539): unsure at all n locations
  Clone ID: PAT_MRT3847_60383C.1
cgtgccgctcaaattgtgatgcgtggtgtgcaggcaattgctcgcactgggcgaactgtcctctgtaccatccaccagccgagcattacgatcttcgagctcttcgacgcacttcttcttctgcagcgcggtggctacacggcctacttcggtgacctcggcaaggactctgtcgtcatgcttgagtacttcgcctctatccctggcacggaggagatccgcccgcagtacaaccctgccacgtacatgcttgatgtcatcggtgccggtattggccgtaactcgaaggactactccgttgagtacgccaagagtgctctgtgcaaggccaacaacgagcgaacgcttgcgttgtcccagccttcacccgagtttattccgttctcgactctcaagttcgatcctatcgccnccggattctggaaccaattcnaggaacttacgaanaaacagcgtctcacgtactggcgcaacccncantataacgttatgcgcctgttcccctccctctcttncgatattttcgcanacttctacag

SEQ ID NO: 98971 - DNA, 316 bp, Glycine max
  Clone ID: PAT_MRT3847_60384C.1
aaaaataagaaagggaatgaaaagatttttttacaagagatgacaattgtttgaacagattgcaatttagcatgataataacccccaataactttttgttttgatttcctaatgggctaatcattttacatttggaatttaaataataaccataatcataatttgttgggggggggcatcagacttgggagaagcttttggataaaaatagctggggtgtttttctaaatttaatccaaaaattttcacaatttttttttttatccccccatagttttcacaaaattaaattattttgaattaaaagggcaagaaa

SEQ ID NO: 98972 - DNA, 368 bp, Glycine max
  Clone ID: PAT_MRT3847_60385C.1
cacaatctttctaatttgcttatcttagatactaacacatagtataacaaatagacggaaggttaacaactcgctgacctgatgacaaaaacatcactagaaagatgaaacaccaaccatggttctgcattactacaacatctttcatgttgataatagcgccaaagactatgacttgaatatatcttatactaaacttcctattatatggcactctgatttgatccccatcaacaagatctaagctgacactcattttcaacaaatttccgaatcatatcatgtacttactagatcctcataatatagctatctatgatcattatgtgcaacatttgttaaacgttcaatttactgcttctgattct

SEQ ID NO: 98973 - DNA, 513 bp, Glycine max
  Clone ID: PAT_MRT3847_60386C.1
cccacgcgtccgaaaaaaaaaaaaaaaaaaaaaaaaaaaaaaaaaaaaaaaaaaaaaaaaaaaaaaaggggccggccgtttaaaagaaccaaacttaacttccccttcattgcaacgtaaaagttttttaatagggcaaccaaaattaaattaattggccgcggtttaaaaacgtgggaactggaaaaaccttgcggtacccaaattaaatcgctttgaagaaaatccccttttcgcaagttggctaaaaaccaaaaaggcccgaaccaatcgcctttccaaaaatttgccaaccttaaatggcaaatggaaccccccttgaaccggccaataaaccccgggggttgtggggttaaccccaaggggaaccgttaaatttgcaagggccttaggcccggttcttttggtttttttcctttcttttttggcaacgttggccggttttcccggtaaagcttaaaatggggggctcctttaagggttccaattaagggcttaacggaacttgaaccc

SEQ ID NO: 98974 - DNA, 391 bp, Glycine max
  Clone ID: PAT_MRT3847_60387C.1
gagtgcgagatcatagatagacacacacacaaccacaatggctgccactgcttccaactctctcctttgcaccaaaacgctagtcccaaccctcccttcttcctccaacaacctcaacaacagcaacctatgctcctcctttcccaggcccaggcccaggcccatccaggccctgaacaactccgtgactgtaataaccgacaagaagtgcgaggcaaagtgggtggtggacagctggaagtccaaaaaggctcttcaactcccggaatacccggagcaagagaagctccagtcggtgctcaagagcctggaagccttccctccgattgtgtttgccggagaggcccgcaacctcgaggagcgcctcgcccaggcttccatgggaaacgcg

SEQ ID NO: 98975 - DNA, 868 bp, Glycine max
  Clone ID: PAT_MRT3847_60388C.1
gggaagtaagaatgatgtgaaactattgagttttttgttgagtccagttggtcacagagttgaatgggctctgaagctaaagggtgttgaattcgagtatgtagaagaagatatcttcaacaaaagcaatctccttctggaactgaacccggttcacaaaaaggttccggttcttgttcatcaccagaaaccaatcgctgagtcactcatcatcgttgaatacatcgaccaaacatggaagcagcatccactgttgcctcaacatccttatcaacgagctcttgctcggttttggggtaccgttgctgataagcttgtgaagacatcatatgttgcaatgtgtagcagtggcgatgaacaagaaaagagtgtgaaggaagccaaagaagtaatggataaaatagaagaagagattattaaggggaagaaattctttggaggggacaatattgggtaccttgaccttgcatttggatggatcccttactggcttcccatttgggaggaagttgggtcaatgcaaatagttgacccattgaaacattgtgccatctctgcatggaacaccaattttctcagccaccctatcatcaaggattgcttgcccccaagagacaagatgctcgtttattcccaccgtcgcaaaaatgagttttcttctactcttcgtcgttgattcatgttttttcctctatgtctaattcaatatgttataggcagagggaaaaacctattagagtcaattatattccaagatatagggattgactcaactgtattaatgcagattatatacgtttatcttgggttgttaatcatctctgctgttaaataaattatatataagccttatgagaggatttcagag

SEQ ID NO: 98976 - DNA, 506 bp, Glycine max
  Clone ID: PAT_MRT3847_60389C.1
ccccaagcaggaaccaacaactggcggaaacatttttaaaggagggactcactctttttttatggcaacacaatggggcagcctcattttaagttataattcggcccctaaggaaaaaaaccggaaaccacagccaaagaaaatattgcttttgaccaacctttaattgcccaaaacaagtaatacccaagcttttttcatcatacccaacacaaataactttgattttctgccccaaatgacaaaactcatcactcatcagcccacaaaaggaccatcaactgggccatcactgcaaaaaagccctggccgttgttaaaaacctccccttttaagcttctcccttgccttaaaaacaatcttttgattggggacagcaccatcactttcctaaatcacagcctgtattgcattgctaaaacctccataaccactggcaaagttacctgctggacttgcataaacaaaagtttggtctgtttgacacccactcataaaaattcccc

SEQ ID NO: 98977 - DNA, 238 bp, Glycine max
  Clone ID: PAT_MRT3847_6038C.1
aactaaaagttactttacataggtagcaaacgacagattataaccaggcgagacctatttacaaaagtgagatacgatggttccacttaaacagccattaatgagcggatgatacgattgtttaagtgatgctgcaatcttgaagcttccgcaaccaccagagcgaccgagacctaattcattcacataaacgatgtcactacgagggcttacagataaatgcttcagaaaattgaag

SEQ ID NO: 98978 - DNA, 856 bp, Glycine max
  unsure (1)..(856): unsure at all n locations
  Clone ID: PAT_MRT3847_60390C.1
caaaatcagcatgcacctgacaggccatttccctagtaggtagaagcacaagaacactgnnagtcctcccgaagccagtctttcttgaagcttntgttggaccatttattaaagactctaatatgggcaacacaaatgccagagttttaccctgaccggtgcgagcccgaccgaccaaatcagaaccatcgagaacggtgtcgaaggtcatggcctgaatgggaaacagtgattcgatacccttctccttcaatttttgcctcaagggttccgaaatcctgaagttggaaagcgcgttgggatcctccttcttttctccattagcctccgtgaccaaaggctgttccttttcttcggacttaacaacctttttcttctttttcttcttattcttgttgtcgtcttctctggaagcaggttcgggttggacgaggtcggagctggtctcgtcgtccccatcgttgttgtaagcggcggggggcatggcctcttgttctaaatctgaagccttgcgcttcttcgtcttcttccccgaaaccccatcgaggtcgggatcggtgagggactgggttttggtttttcttcttggcaataggtttgggggtgtcagggtcagagagagagagcgaaggcatggttgtgtggtgatggcggcgtggagaagaaagagaaaggagtgagagattttctcctgcttgaaagggggtatagcagtgaggtgcagaagcaggagaagaataaggagtacggacgcgtgggtcgacccgggtttccggagtggaaacgggcgttcccatagtcatacacctctcacaacctctagacctaattacgtttttttctcttattctctttc

SEQ ID NO: 98979 - DNA, 482 bp, Glycine max
  Clone ID: PAT_MRT3847_60391C.1
ggggcaaattagtcattgtataaacagcgatgcttcagcatgatcaggttgaatacatgccaaaatttcatactacatagacaataagtacaacaacttacaagttgatggaagaaatcttatggtcatcatttactgttttgaaacactatggcttagtggtggagcttctttagggcggagaagggaagctctgttatatcatcattgctcctaacttgttaattggtaactgatgtcaaagatagagtagcctcatgggcttgaacataagctagcttagagacaagtacaaagccagaccaacagataataatcccctacttaatagttaatactggctgtttcttttttatagttgctaagcctaacttaagaacttcccatggacttcatgtttctgtcatcgagagatgaagaaagccttttccatctttgaaatctctgtagcttcgttacagtagaaaccccctctaaagttt

SEQ ID NO: 98980 - DNA, 1208 bp, Glycine max
  Clone ID: PAT_MRT3847_60392C.1
ctaattttttttctttttttattgcataaaaacttatagaaatatcaattttctattacttttgttacatatttttaattaataaatggttagaacacaaggtttcattgcccattgggtcctgcaagttggccttgcctctctgggaacaagttgtcgacgaggtgtacgaattatccaagattgagaaaagcgttgaaagcagaaggagaataaaacgcgaagcgtacgcaacagtgctgcattcttcggaagcgtacgtttgcggcgcaataacactagcgcaaagcctgctccaaacaggtaccaaacgcgaccttatcctcctgatagacaagttcatctcggttcgtaaacgcgaggccctatccgaagcgggttggaagatccgaatcatcacccggatccgaaacccgaaggccgagaaaggaagctacaacgaatacaactacagcaagttcaggctatggcagctcacggactacgacaaagtaatcttcatcgactccgacatcatcgtactccgaaacctcgacatcctcttccacttcccgcagataacggccacggggaacgaccaatcgatattcaactcgggaataatggtgatcgaaccttccaagtgcacgttccgtacattgatgcggcaccgggacgacgtcgtttcgtacaacggaggggaccaggggtttctgaacgaggtgttcgtgtggtggcacaggctgccgcggagggtgaactttctgaagaacttctgggcgaacacgacggtggaggcgagggcgaagaacgcgttgttcgcggcggagccggcggaggtctacgcgattcactacctgggatggaagccgtggcactgctacagggactatgactgcaactgggacaccccggagcagagggtgtacgccagtgacgtggcgcatcggaggtggtggaaggttcacgacgcgatggaggaggggttgcagaggttgtgtaggttgacgaaacggcgtcggagtgagttgaactgggagaggaggaaggccagcaagatgaggttacccgatggacattggaaaatcaatatcactgatcccagacgatttgcctctctctttatggattagacaatcatcttatgttttaccttctccaccctcctctgtcaatatttctttttctgttaaatataataataattaattaatattattatttctaaa

SEQ ID NO: 98981 - DNA, 263 bp, Glycine max
  unsure (1)..(263): unsure at all n locations
  Clone ID: PAT_MRT3847_60393C.1
gacataatacggcctctttccttacttaataaaccctgctccttcttactacactttcgataacatggtatcgtaagctaatgcatggctacacccacttctgagtgaatgataccagcattggttacattattgctaatgaccccttaaactgtggtgtaacaccttaggctataaattatagccacttttacgagggcaagcgcatgctaaatgactacctgaagcactntcatgcagctggttggagagaccctgaccat

SEQ ID NO: 98982 - DNA, 305 bp, Glycine max
  Clone ID: PAT_MRT3847_60394C.1
ttgaaggtagcgctcacaaatattgttagttagatgattctgacgcggcatatgaaattatattgactgatggaactcttcgggagagccatcaatggcattgatgtctattgtctatactatgccattacgtgagcttagggaacactcggccttgtagattctgctgagatcaggcttatacctgttaaggagtacatgtagataacctataaaccagtcgtaggcactttgcacgaacatgctcacgcatattgtgattctagtgctgcaacagatcgagacgcttgataatcaggagaatg

SEQ ID NO: 98983 - DNA, 311 bp, Glycine max
  Clone ID: PAT_MRT3847_60395C.1
cccactcaccctttaaatctttccaccattatctttaatcccccaacttccctcacatccagactatttttaatactaaccaaccccaacacataaatacattatatccatcaaaacctatcagccatatattcctttatcctctaaacattatcaataacaaaaagattttcgctctcttaaacaacaacctaacacattaccttcatacatccacttatccaacctcatctaaatatactaccacataacaaataccaccctcttctacattacctataacctcacctattttccattcacacaacttt

SEQ ID NO: 98984 - DNA, 269 bp, Glycine max
  Clone ID: PAT_MRT3847_60396C.1
ttccaaaaaaagaaaaaaaggggccccattaacgaaaattaaggtttggaatataccctgaacaagccaccattgcccccaaagttacactccatggtaacaaaaccccccaatttaaaaagggaaattgaaagttatccaagtcccaaattttccaccagaagggccatttggccaaccatggccaatactgtggccttttaactcgccaacaacctaaatccaaaacttaaacacacgcctaaaaaccacccaaaatttacccttcc

SEQ ID NO: 98985 - DNA, 287 bp, Glycine max
  Clone ID: PAT_MRT3847_60397C.1
gtcacatatgctattaagggtgagatatatagaaaagcaggtgagaatagatagaaatggagaactttccagttgttgacattgggaacccttatatttaatagatatcttctacctttgatattatcaaacattccttttataactttggtttcttatcttattttttttcttttctttttcttttcttttatctatcttatctttttattttattttttattgtttttttttttttttttttattttttttcttatttattttttttttcctttttttcttattt

SEQ ID NO: 98986 - DNA, 486 bp, Glycine max
  Clone ID: PAT_MRT3847_60399C.1
gaggtgagaagggaagggatgtggagttcaacttcaagcacagcatcgattccctccgacgaggaacctagcgaatcctcctcctcgtcctccttctccacctctctcttcaatttctcttctggaaacccgagaatcgaggagacccgtggcctcatgcatctcttcccagacgacactccttctactctacccgtatcctccttctattcttcttccatcgatatattctgcttttacgcatgataattaatgaatgaatcaagtttcgttttggtgttaggttggacggaagcctctcgtttgcgttgtcggcgtcccaaatcacatgacctatgcggatttctgccagttctgtggttccttcattcagcacatgctagagatgcgcatagtcaggatggatgggatggaggatcagtacagtgttttagttcgctttgacgatcaagactccaccgacagcttttacaagcactacaatgg

SEQ ID NO: 98987 - DNA, 357 bp, Glycine max
  Clone ID: PAT_MRT3847_6039C.1
acccacgagtcaatacagctgtcagtacagctgagaaaggggcacaaatgggtttattgatcaatatgtcgataaacattgtgataaacattatggtccttgttttcgtcgttgctatcatcgtggcagcattttagtgacaatcgtactacaattcctctcacagattcactctcggattgggtactggtaatcgtgccgttactccggcagtttaatgcgctgctttggagccacatatcatcttaggctttagcattattcttgaaaagagtcttgaagcatgagttgaataaatccatggataccaatatagataagactccatatcagtctccaaacaattttacttttatg

SEQ ID NO: 98988 - DNA, 339 bp, Glycine max
  Clone ID: PAT_MRT3847_603C.1
atacggatgcagtgcggttgcgtgagcacatgcgagaggacagcaagtgcatgcaaaatctatatgctcaatcgaaatctccaggaacagaggagagtacgaccaacattgtcagctgaatgaatatatgatggctctctactgtcgagatgctccaaccatttcatttgcttttatgactgggctgcatgcatgatgatctatcgcatcgatggcaatgtgaacaacctgtactgggctgacagtggcgttctagtaacaatggctagcgatacatcattctacattctgacgtacagtggtgacgttgctgaatcacgtttagagggcgggggacct

SEQ ID NO: 98989 - DNA, 270 bp, Glycine max
  Clone ID: PAT_MRT3847_60400C.1
gtcttcacaccttgaacaaagcttgtgatatcttggcccaatctttcagttaaaatactccaaatcattattgtttctaccttctagtatatttcttgttggtagtgtattgtaatctgaattctcagcttcacaatgactaaacttttttcttgtattgacagagcaatgaggatattaaccacaggcttgtctgtgccaagcttgaactgatagcagcaaaatggaagccaatgctaagataaagaaatatgaggagacagttaaaca

SEQ ID NO: 98990 - DNA, 526 bp, Glycine max
  unsure (1)..(526): unsure at all n locations
  Clone ID: PAT_MRT3847_60401C.1
agtgttccaaacaaatgaatttggtgtcacatctaatctaaaacattgaacaaaaaataaggatccttgaacaaaaaaaaaatctaacttaaaatattaagacatgcatcaagtgtataaatattatctatcattcaacttccattcatacttaattgtaagatttcctcacttacacttatcacttcagcacttaaataattgttataatgattacttgtatattgcaatacatgattaaattatataatagaaaaaatacagcattatatcaaaactaaacccttaaaattatgcttaataacttggttaacaatcatattgaaaggcgtttatttgcttaggaactgcttgatatcatgatcaaacccactaattttttttcataattaactctcattntacttataaaaaatgttctttcttatttaaaaattacattcatcccaacccctagcctgcctccattgaaaaattatctaaactagtttttaattaaacctcccttgataattaaaatatctaa

SEQ ID NO: 98991 - DNA, 513 bp, Glycine max
  Clone ID: PAT_MRT3847_60402C.1
aattaattcattattatttttcaaccttttgagccgtgtaactggccggtcttgtccaaaataaagcttgattgccttaaaaaaaaagtttaattaacttatttctttacttatatatataagtgataacagaagaacatgatccactcaaagataaaacatcaaaagcttaagctttaggtctataaaaattttttatttgcgatttaattttataaaataaagagatcttatatattgaaaaaaaattattatataattatcacagtaaaatatttttcttaaattttattttatgtctcacttatcgtttgaatcggctggagtgagagctaacttatatgagtatcaccaagattttaataagttatagtccaaaacttaaattgcaatttacaatcataacatcaaatttttggggattttatagtcacatagcgtttgcaaaaaattgtttgcgattctatataatgtaaaaaaaaatttaagaaagtttgcagaattgcagtttta

SEQ ID NO: 98992 - DNA, 175 bp, Glycine max
  Clone ID: PAT_MRT3847_60403C.1
gaaccgtccaactctacccagaaggtatataccagctgaaggaaccccatagcatgatgacatggtgaaaaatcccccccaggcttatctgacaacaatcacactcaactttgacacccttattgatctttcagtgatacccatattgacaacgcatgctcctgactccatctac

SEQ ID NO: 98993 - DNA, 185 bp, Glycine max
  unsure (1)..(185): unsure at all n locations
  Clone ID: PAT_MRT3847_60404C.1
acgagcatttgcctcctcttctcaagtctctttaatttctcaaaggaaaaagaagaagaaacaaaattttattttgagaaaaaaatggaggcattgaagatgaatcttttctttttatgatcagtcgagactccaatggncatgggatncaattgggctagncgattccaggcattgtctaagga

SEQ ID NO: 98994 - DNA, 224 bp, Glycine max
  Clone ID: PAT_MRT3847_60405C.1
aaaaacgacaggtgggatcatctattattaacaaaaccatttcacaccacccaatatctttataccttctcttctccctacccttctactttgtgcgggggcggatatctattttccaacaacacatatcgttttctctacttccattactattcttttcactcctgtttcatattctatcttttcccacatatcataatttactgtcatagaataaacctaac

SEQ ID NO: 98995 - DNA, 495 bp, Glycine max
  Clone ID: PAT_MRT3847_60406C.1
gcacccacgcaattcgctgactcgcactagcgatcccctttgtttatgacgcttgtgtcttcttcttgtagttcatcatggtcgctcttgagctgtccaattttattcttctttaaccatactgctatcgctggatgaaggatagcacacagccgcgggacttggaccaggtcagccacatattcagcgctaaaattatggccctgataacgagtttatcactccttccaacgaatgcttgaaagccaatatttgttgactgctcgcttgttatgtacctgcacatgatgcatgctaccatcaaatcgggcgccctttcttaagcactcatgcttttgttcgcccatttgcgatagcatctctcttgtatactgaccccgaaacacaatatttacgcccttctgttacctcactaccactgcaacaacactgttgatacacttcctcataaagttctggtcaatgcacattttgtcatatggaaaacattcttga

SEQ ID NO: 98996 - DNA, 652 bp, Glycine max
  unsure (1)..(652): unsure at all n locations
  Clone ID: PAT_MRT3847_60407C.1
tgacaggtcaatctctcaagtgaaattcaaggatgacgtagggtgtgtttctgtaaaaagagtaattaagtgcttattgaataagtgcttatcatgtaaaagctttactgcaaaatcagaaaagatgaaaagtcgagtgaggttaaaaggcggtgaaagaatgttaggtcaaacttgattcttatagtggctgtaaaccttgtattggtgctattgtttgtgttggattgaccaatgatagttttgggcagtggattagtggttttacatgtagattggtgcctattctccggttgctaaagaatgtcgtgcttgggtaggtctattgacttgggatcttagtttctgaggagttcaacttgagcttgattcctggtatgctgacacatagtggaaaaaatgtttccatgcctttaactacttgttgttacaaatcctttctactacacatttgaaattttactttttgctacatattgtgatgcaggaaactatacaattatggcgaatgtgggtgtcccgnaatgtgcatagggaagtgaattccattacactgtngctgtttgctttgagtgtcgacaccaatgttcaaaatgaagtgaactggaaaaaaagnaaataaacaattcacaaagcttttgatgctcaaaac

SEQ ID NO: 98997 - DNA, 885 bp, Glycine max
  Clone ID: PAT_MRT3847_60408C.1
cccacgcgtccgcggtggtctgccttgtcgttttctctgaaactcaagaacctttttcttttatgaataaaatatagttattttttttgtgtgtgtggtggttttttggtttggtttgaaggagagagaaataaaaatgaagtttatgaagttgggttcgaagcctgatgctcttcaaagtgatgaaaaatctatcaggtatatatcatctgaattggttacagatattatcataactgttggtgaagttaagtttcacctgcacaagttccctctactgtccaagagtaatcgtttacaaaagttgctgtcaaaggctaatgaagagaatgctgatgaaattcaattggatgattttcctggtggtcccaaggcttttgaaatatgtgcaaagttctgctatggaatgactgttactcttaatgcttacaatgttgtggctgctcgttgtgccgctgagtaccttgagatgactgaggatattgatagagggaacttaattttcaaaattgaggtgtttcttacctcaagtatctttcgcagctggaaggattctataattgttctccaaactactaaatctcttttgccatggtctgaggacttaaagattgttgggagatgtatcgattccatagcttctaaaacttctgtggatccagcaaacatcacttggtcttacacttataaccgtaagttatcagagcttgataaaattgttgaggacaagataacaccacaagagaaaattgagcctgttcctaaggaatggtgggttgaagatatatgtgaactggacattgatctttataaacgggtaatgattactgtcaagtcaaagggaagaatggacggagttgtgatcggcgaggcactaaaaatcta

SEQ ID NO: 98998 - DNA, 1528 bp, Glycine max
  Clone ID: PAT_MRT3847_60409C.1
ttacagagcaagctaagtaagcattctcattttgcttgactttggcagcgaccaattaaataagctgagtgcctcaagaacatggatgctgaaacgctgacattgcaaaaggaagtggtttttaaccagacttcaaagcaagtcatggcttcctctgatgatgacgcaaaagttccttttgtagaacccgtttgtaaaacgatggttatagaacaagggagtgttggaaacggtcaacatcatgatgaagtgaaggaagaaaattctggtccagctaggctttacttaaatccttctaattctttggtgtacatgaaaaatggaccagctattggcatagccatgtcacccacggaggaagtgcgtgaagtgtatttgaaaaacatgttcatgatgccaccaaaccatggattctattgccccaattgtcacattgatatcaacaaggtgttgttttgcacaacgcggcaacaagatgagtttgaaattaaatctcctggaatgttactcaagggtccacctattttgcctacatttacccagcccccggttactactgagcctacggttactacacctacacttatcgaacctgagcaagataatgaatgcctagtacgatgctcaacatgcttcagtttactcattcaaaaaggcaaagagttttttactgggttggtatcacgagctccacaagagttagagtcaggccagggagatcagcacgtagttcctataccagattcatctcctataatgccacaaggtccaccatttaccatcaccaggccagaaagtaccaagggttgggaaattcttaagagtattgtctatggtggtcttgctgaattattagcaagccttagtgttgtgacatctgcagcaagtgttgatgctaccacattgagtattgttgctctgggtgttgcaaatctgatcggtggactttcggtcttgggtcacaatcttagggacctgaaagcttcgcaaccaagacagggaagtgaaacacaagcacaagaggacaaatattatgaactattgggaaagcgggagaatttctatctacatgccttttttgctatcttatcattcctcatatttgggttagtgcctccaatagcatacggcttctcattccgtgagagtaatgacaaggatctcaagcttgcagctgttgcggtagcttctctaatttgcatcacattgcttggcatggcaaaagctcatatccaaagatccaatacttttatgacatactttaaaacggtgacgttttatgttacctctggagtattggcctcactacttacttatgaagctggagccctaatgaagaaacttgtagaacagcttggatgggtttgaaacaaaatcaaactttggcttgactcttcctgagatgatgagtataaagaaatcaggatggggttcgtactaaaagtaaaggggttggcgatggtttggacaatcatcatgtatctattgagtaattatcttgtcatgcttaacattgataggcattttt

SEQ ID NO: 98999 - DNA, 683 bp, Glycine max
  Clone ID: PAT_MRT3847_6040C.1
ctctccctctccatcaacctctctctcttcactcccctttcccattcttcctcctcctcttttctctctctctctctctggagtgaaagtactatttaattgatcatggatatatcagaaaagcttctacaatatagatatcacataaccatagcaatagtagtttcactatcattttctttgtttttatatgctgctccacactttctgaccattctggcctatttttggcctttgtttgcttccactactgtcttcttggtagcaataatagcctttggaggcgtttcaaaactctcaaatgaagatcatggtgaaaaggctggtgagggactcctggattatgtagcagaaagaacagaacatactcaagaggctcaaacacttctaagtgaatgaagggtgtacgaatttctggcttagtttagatggacttggaacctttaatgtttaaaatccatgttcaataacatcatgttctttgtcaccggattgctgctcaaaagacaattgtattgtatctataatctatccaatgggctcaacaatcgtcacagcaatatgaacgaaaataaacaactataaacttctggaaaaaatgagtaaaagcttaatctctttgtctccttgtttggctgaaacgtgacagttttggcattagccctgtgcaactttttgggggt

SEQ ID NO: 99000 - DNA, 212 bp, Glycine max
  Clone ID: PAT_MRT3847_60410C.1
agggtgtagcgcagaagaacgaactagaagctagcgttgcatgcgagagccatcatggctacgatcaatgatctactaccgcagctgctactactgtcaaatgcttcctcacccagatgggaggctcattcactgacactaaatccatcgatgagtagcccaccgagcagacccccaatgacatctcctacattgctatcaacactggaaga

SEQ ID NO: 99001 - DNA, 252 bp, Glycine max
  Clone ID: PAT_MRT3847_60411C.1
atgaccaaaaagcaaagcaagttcctttctgagaaaaaagagactacatgtttacgttgagcttaacttaatagaagaagaaataagtatgtttaatgagaaaataaatacgtgacacgaacacctttggtcctgagaatttaaccaatgagtctccttttgacagaaccgacgtatctgtctttaatgaagccatctctgatgaagagaaaggtaaggacctgtatgactttcatgtactttaagaactgc

SEQ ID NO: 99002 - DNA, 424 bp, Glycine max
  Clone ID: PAT_MRT3847_60412C.1
gatttttatctattatctattactgaagaaattaaaatgcattgccagatgccttcgaaaaaaaatgcattgccagaattgctcaatagtgtcatatattaagtttaaaacacatgattaagtatattatttgtttttgacacatttatttttaaacagctattgtcctaatctcagtgtttctcatatattataaatgaaaatgtttcaggtcttaaacttaactgagcttgaattaaatcgggtggatgtgcgtgtgggattatcaggtgcattatattatatggatggttcttcacaagcagtgcggcagttgcgtggtcttgtttcacaggttgcttctcctctaaagtgcatattctgtttcacccactttgagctttttttgcatttgtgtcttccgagctattttttcttccttttg

SEQ ID NO: 99003 - DNA, 271 bp, Glycine max
  Clone ID: PAT_MRT3847_60413C.1
aatgaaagacctcgtggatatggtggtggtggcggcggctttggtctatatggtgctgtaggtggctgtggttatgaaggtggtggtggtatcggttatcgtggaaatgtttctgatggttatggtggttgcaactatactcgaaatgataggggtggttatggatatggtgcactgcagttatggatcaggcagcaattacggggatagtcgccctgtcaataagtactcgggatgctatagtggtactaacagttgacattttggtgat

SEQ ID NO: 99004 - DNA, 383 bp, Glycine max
  Clone ID: PAT_MRT3847_60414C.1
cggccccccacacctacttcgggatctgatgctttttataaatgaaactactcgggcaggcacaattcaacactatcctagcttcaaccattgaatcgaacaatatgagctgacctcgctgcctccattgtgagcaaatctggcttagcgctggcttttagacagatagcggctatggctcacataaaactggatgggcttctagcatcatttaaccagttggcacggactggaaaacatccacttatgctgaaactgacaaagcgcgctatggagaccagccaccctaaacactgtacctgcttgttgcctcaaacacactcagcagcatactggacgataaggagactctgagactaaacactacacttgaacctgaatat

SEQ ID NO: 99005 - DNA, 679 bp, Glycine max
  Clone ID: PAT_MRT3847_60415C.1
cccccaaaaacccctggccccccccagggatttgggccgcccgaaggtcatatggcgcctccccggggatattcagggcccgggcccggccccgggggcccccccgggaatcccggccgggccccgggggggggcccagtttccccaaagggggggcgaatgaaggcggggggaacccgggggaaaagcggtccccggggggaaatgggaacccgcccaaaaccccacccaaaaaccgacccgggggctaaagggggaaggccgggggccccaaaggggggggccaccccccattactgggggggggcccacggcccgtttcccgggggggaacccggggggcccccctgcataaaggaggggccccccccccgggggggggcgggtggcaatttggccccccggggggttttcctttcccccgggggccggacaaccgcggttggcccttcccccccggccccggaaagggtggaaacgggcggccccgcgggggtccccccagggggggaaaacccggcggtgggggggaaaccggggggaaaaaacaggggcgccctcgggggagcgcgctcccccccccggggggagggcgccaacggcggggccggaagtgggtaaggggggctccttggcccccccgcccatgtgaggggggggcgccccgcgccccgggggg

SEQ ID NO: 99006 - DNA, 551 bp, Glycine max
  Clone ID: PAT_MRT3847_60416C.1
ctttggttttttttttttttttttttttttttttttttttttttttttttttttttttttttttttttttttttttttttttttttttttttttttttgaaaaaaaaaaaacaatcaacttgaaaaaaggaaattgataacaaaaaaattaatccccaattgggggcgggggaaagcgaacattgcaaaaaactaaactatttacgtccctaaaccacacaacttttttaaaaattgggcaaaaagggaaaaacaccccttttcatttttccatattttatatgcccgatttttaactaaacaaaaaaaacataaaaaataaagccggaagaacggaagttttacggccccttttgggcggaaaccaaaaggacctgggctttttgggctttcaaagcgtcaacacttttttttttttttttggcccaaccttttttgggggcttttaaaccgccttggtttttttcggaacaacgggggttgcaaatttttttctttttggacccaaatcctttttcgctttgggggggctctccttcacctttttcggg

SEQ ID NO: 99007 - DNA, 1305 bp, Glycine max
  Clone ID: PAT_MRT3847_60417C.1
tacggctgcgagaagacgacagaagggggcagcacagcagtgagtgaacccaccgtcaccacaccacaccacaccacaccaacaaagtagaaatacttgtaacatttgctgcaattacaactccatttgtggacaatttgatttgggtggtgcctttgcgaatagttggttgaacgagctcctttgcaaccatgagttttgtcttccgagggagtaggggagatattgaaagtggcttttcagaatatgttcctgaaagaaccttgatgcgggttcatccagctcgaccagttaatggcaattctctagcttttcttatcacagttattttgatattcatgatattaaactcccctcagatgttacatcattttttgctctgggttgtactggctatctttgtgatggctacaagtctgaggatgtatgcaacttgtcaacagcttcaagcacaggccagggctcatgctgcagcagcctctgggttgcttggccatactgaacttcgtcttcacatgccatcatctattgcgattgctaccagaggaagattgcagggacttagacttcagcttgcacttcttgaccgtgaatttgatgagctagattatgacactttgagagctctggattctgatactgcttctagtactcgttcaatgaccgaggaagagataaatgccttgcctattcacacttataaagttccagtcccaccaaaagatggctcagctggtttggcgtcctcttcaggtgcagctgagattaaacaagcctctggaggaacagaggcaggtgccaaaggttcagaagatgagctgacatgtactatatgcttggaccaagttaagaggggagagcttgttcgtagcttaccatgcttgcatcagtttcatgcaaactgcattgatccatggctccgacaacaaggaacatgtcctgtgtgcaaattaaggatagggtcggtaagtgggggaaacagggaaagcgagtccgatggttcagatattgcctagtttatggttcagatatggctgtaaactgcatgatgtgaggccttgagttatgtacaagtatatatgtatgtgtattattcggtattggcgtatataatgagattggcatgagcataagattgtagtccatgtttagtcccttctcttcaaaaagtatagctagtctccatatcccaaaactatgtgtaccgcttgatatataaatagcattaaaaatgttattaaagtggaagttgataatggtgtgattgtgatacatcttattttgtatacacttcaccaaaaagaa

SEQ ID NO: 99008 - DNA, 553 bp, Glycine max
  unsure (1)..(553): unsure at all n locations
  Clone ID: PAT_MRT3847_60418C.1
attcaatccaataactgtttcattcaagattattttcaaatatattttgataatcacaatacaattgaaagaccaggacgctacaaaataatttatttaaataataaaaataatttatccaaatgatccctaacatatatgttgatgatcacaatacaatgaagacaatgacgctcaaaatggataagtcagacttaagtattttttttttccaactatattcttagagaagggaacagtttgtgttgactggttcgtcaaacacaatactcacgagacacctcctatcagatttggcacaataactcaatcaaagtgcatttactaaaatcatatcaagaaaccatgtgttaaaaattataaatgaatgttaaattagaaaaaaacataaaaaaaaatactaagtttgaatgtatattttgttccgaggcaaagaattttgctttaatttgttccccggaacaccgacaaaatgatgaattctaacaagatgtaacttgngaggcaattgctatttacccccttcccttcttgntaataaactcccctttcg

SEQ ID NO: 99009 - DNA, 762 bp, Glycine max
  Clone ID: PAT_MRT3847_60419C.1
gaattcgagctcgttacccggggatcctctagagtcgacctgcagtacaacttgttctctctgttggtgtcctttttggtgttggtggtgttggtgctcttcctggtttagtcccacttgttatatgtggacttatcaatgtaccatttgctaagatcctacaacattgtatggcacagttcatgatttcacaggatgagcgtcttagatcaacttcagaaattctgaatagcatgaaaatcattaagttacaatcctgggaggacaaattcaagaatttggttgagaacctacgtgctaaagagttcatctggctgtctaagtcacagatgatgaaatcttatggaacatttctgtattggatgtcacctaccatcgtttctgctgttgttttcctcggttgtgctcttttcaatagtgccccgttgaatgctggaaccattttcacagtttttgcaacgttgaggaacttgtcagaacctgttcgaatgattccagaggctctatccatgatgatccaagttaaggtatcctttgatcgtctcaataccgttttgcttgatgaagagctagatagtatgcaatgctaacagtaagaaatataaaccatagttcggttaatgtctgtggaaatccaagcctgtaaatttcatttggcgatcacagaatcattatgttccaacttttaagagatcgtgaattttacaaatctgaaccatggacagataatcgcagttttgtgggccctgttggcgctgggaa

SEQ ID NO: 99010 - DNA, 161 bp, Glycine max
  unsure (1)..(161): unsure at all n locations
  Clone ID: PAT_MRT3847_6041C.1
gtcttgttaggttacctctgtganatttgtgntgctagnnnatatnnnttgnggttgnncagngagaaggaaagcagganaaaaanaanaaggagnagatgggtagctnaggtttctcatggaaattggcggatcatccaaagcttcnaaagggtaagact

SEQ ID NO: 99011 - DNA, 353 bp, Glycine max
  Clone ID: PAT_MRT3847_60420C.1
tcgacccactcttccgaatgcatatacagattaaatgctaattttcaaataacaatatcaaaggtaaatcaaagctcttataagaaaaaatcaagtctctatcataaataccacactttacctactcacagtaaaattaacaaaaaaaaggattctcaatattaaaaaaataactacaaacttccaatatcttacaaatacatcacttgatgcttcccattaacgtatccaataacaattaatttcttatacaactgatatctatatactttctacatataaaccatataataaaaaataaaacaatatctaacataaatagtgctttcttacaaatgtaacttaattcacta

SEQ ID NO: 99012 - DNA, 294 bp, Glycine max
  Clone ID: PAT_MRT3847_60421C.1
cgcttctatacacaggcttaatagtgttcttttctttctactattggctcttggcatttcttctgccagaagggcccttctcactcttgatggcggctatggtgtaggccctggcattggtggtggttatggtggatatggaggtggtagcggctcgagacaaggtgggggtgtaaggtatgtgtggtaacatggaacaagttatggccagcagtcttgtatactatattcgattacaaacttgtatatgaccaagtgactggcatgtattatcaagctacttaattacctact

SEQ ID NO: 99013 - DNA, 423 bp, Glycine max
  Clone ID: PAT_MRT3847_60422C.1
aaaaaacaaaaattacctttcctttcatataaaaggaaaaaaaatccctactccaaactcacttaaaacattggaaaattgggctttctctttacaagtttagggccatagataacccaatagatagcgttgtccctcccaataaaaaaaacccaactactcttgttggtcccacatcctcgggggccagttggggaggatcttcttttgaaatttttgactgggttatggcaaccccgaacgggcaaacaaatttggctgtattttctggtctggccaagctccaaacatatattcttctttcttcctcccaagacaggatgggggatgattctttgaaaaattccaatttcttcctaaaggcatccccccctaaattccgactcttcaattcttgaaccttgatattttatgccccccccc

SEQ ID NO: 99014 - DNA, 232 bp, Glycine max
  Clone ID: PAT_MRT3847_60423C.1
aattaaaataatatactatgtttacttgcttaaggagatctattgttcaccatagtaatcaatagcatgctatagtggagtagcaaagcgaagtggcttgaggccttgagctactatgggattcaaatagcggacagttttcaatagtatctggccattctggttgcaatagctgccaaaatagagcctttttgcatgctagagctgttaccatgatagaggcttcaaaaac

SEQ ID NO: 99015 - DNA, 137 bp, Glycine max
  unsure (1)..(137): unsure at all n locations
  Clone ID: PAT_MRT3847_60424C.1
gcattgggttgatcaacnnattcaggggnnacgtgcattttatttcgaagatgaantttaantgaattttgttttatccaccgccatattaacctatttttcttccctttttgtaaatactacaggagtatgtctat

SEQ ID NO: 99016 - DNA, 480 bp, Glycine max
  unsure (1)..(480): unsure at all n locations
  Clone ID: PAT_MRT3847_60425C.1
tntttcgcgtccggtctaagcccgcaagggaggcggaagaatttcaagccgtggccgtggggggcaacaaaaacgtcacataattgctgcataccgtgcccaaggaaatccatgccttttagccgagcgcgaatttagaactgcattggggaggaaaaagagcaagcctcaagctgctgcaatgcatgtgggagctatagaaattatcatggaaagaggcgcaagtactgactgcagcatagttggtgcaatgcttcagcctgatcctgatgagaccactccagaagatgcgggatggacacatgatagttgcgcctctgagagggggcaggccaaaacggagggctacatatccgaataccatcgtgcagattgaaccagacatgagtccaaggcttcagcttgtgagtaccactaccaatggtgaacctgttcaaggaaaagatcttgcaatggttaaagctaccgtagcatgggctg

SEQ ID NO: 99017 - DNA, 339 bp, Glycine max
  unsure (1)..(339): unsure at all n locations
  Clone ID: PAT_MRT3847_60426C.1
ttttaccggtgncgtacccttgtgttttgggttgcagtcgtaccttttttttttttttcttgctttttttctgtctctttggaaaaaccgggtatttttaacccggtttttaaccccaacaatttaaaccttttatggggcttattagagcccgggggggggggggaacccccttttttcaggccaaaggggttttttgtttaagggggggagggaacacccgtccccctttttaaaaggggaaaactttggggggcgaaaaaattaacaaaaaaactatattgggggcgcgccccttgtcgggttttaagggaggtatttttttggggcctttttcaa

SEQ ID NO: 99018 - DNA, 475 bp, Glycine max
  Clone ID: PAT_MRT3847_60427C.1
cccacttgttgtaatccgctcctgtccaaagtcaaagacagggcaaaatcctctgttcttggatctgaatcttaaaaactaaacatgtgagaacaataattcatctaaaacatgaagatgaaagcggagacattgacgttagttctggtgaatctggcaggtattatggagagagcagacgagtctctgcttccaggagtgtacaaagagattggtgctgctctgaacgcagatcccactgcgctaggttcactcactttcttcagatcaattgttcaatctttatgttacccactcgctgcatacctcgccactcgtcacaatcgtgcgcatgtcatagctctcggtgcttttctttgggccgctgccacattctttgttgccatctcctccaccttcttacaggtcctcacctctctttcaatttcttatcctttgttaattgtttaatgaatatatattctaaatatatttt

SEQ ID NO: 99019 - DNA, 209 bp, Glycine max
  Clone ID: PAT_MRT3847_60428C.1
acccagtctacgacttgctcttcagatttattttcatcggaaaataactctcctagttcctgctacaggtcaggaggcccttacatcatcccccctttatataactcaaaacaaagcttcatatatttattcttacaataccgctattatgactgacaactaactattctccttaccaacctttactcttctcctacccataccactct

SEQ ID NO: 99020 - DNA, 685 bp, Glycine max
  Clone ID: PAT_MRT3847_60429C.1
ctatatcctcctcttctatttgaagcattgctctcttctcctatcaatgaaatcctgcataagcctaaagctaaggctaagtcttccacctgctaaaaaggcatggaagagcatcacttccacccttggtaaacttcataggtccaaatccaaagccatgaagaaacccagaaagcattattcaaaaaccaccactaaaaaggttaccaaggcccctcctaagttccttgctaccaaacgttttcgtcgcaaaagattagccttagccacagtgagaagcttcatcttcgggttccacaagaagcctgcacctgtgtatattgacaagctctttagagagccttcatgtgacttggtggggcatttgaagccacagacagcacaaaaaccacgaactgaaaggctctctgggggagaaggaacaacaaagggtggtggatcttgcacttcagaatcagatggcatgtgggaatctttggcccaagcgtccgctcaaatgcaaggaatagatgaacgagcagaggagttcatcactagattcagacaagagatggcggagcaagagatgatagcaagaaatttttagcaagacatgtttcactatgctatagttgctaaagtccagaatcttagtaaagttgtagtgtaataactgtcaagtatacatctttttagcttgttgatg

SEQ ID NO: 99021 - DNA, 258 bp, Glycine max
  unsure (1)..(258): unsure at all n locations
  Clone ID: PAT_MRT3847_6042C.1
natctaagaactcaggtcaccttccccatgcttgaaagtaagaataaggaaatgtaagtgtatcacttgcttattgtttttggttccaaataatatttctctcttaagatacaggttgaggatcttgcccgtttgcaatttcagaaaactcctatctatattgatgagatgatgggagacgggggacaaattccctgcgtttctgggntatcttgnggntccctgtgccaagcgaggtgttgttctctattccttttt

SEQ ID NO: 99022 - DNA, 446 bp, Glycine max
  Clone ID: PAT_MRT3847_60430C.1
tgcgggttttcctcatgtgctttcacgcaggagtggttttaaaggcaaaaggagatttgtctctggggatggtgaagagatgacattgattccgggaaccagtgttgaagaggcttacaacaagctaatagttgaacttgagaaaagtgttcctacattggttggcattgaatgccccaaggatgagacacttgctcgatgtaaaatactcgacaaacctaagacgcgctgcttcactattctccctatggaggcaaatcttgtggtcacgtcccaagtttcattcttggcgaagcaattttaaaaacagtagggtatcatccagactcgggcgaggttgagaaatcaaaacccagaagtgggtccatcaacgacgatcagaagctgaacaacggtgtcttcaaccaccaagatagagttcctggcactatgccagtgcccaatag

SEQ ID NO: 99023 - DNA, 492 bp, Glycine max
  Clone ID: PAT_MRT3847_60431C.1
ttgtttgaaattttcacaagaggaatttcttacagcttggtcaactcaggtgcgtcctgcaacaactctgtcggctgatgggtgtccatatttgaatgctatggaaccagaatccggttcggctactgactccgcaaaggcgacaaaatgccaaaataactgcttacaatgaacagtatgccaaaacaatggcggcactgtcggccggggcttatgccccatcgccaaatgaatgcatccggcgatggatgccaaagtcgagcctttggcgtgtattgacattgccccaccaggcttgcgatcttgtagagcagacttgtgcctaatatacattggccttgtaggaggaggaatttcagtggacagaactggagagtggatcacacttatacaaaattcttcaattaaggacttgatgagagttgctgcttggaagaaaggctgtttaatggttaagattgtgatgtctgggaatgcagcagtcaaaaggag

SEQ ID NO: 99024 - DNA, 353 bp, Glycine max
  Clone ID: PAT_MRT3847_60432C.1
aaaaaagaaggtttttaccatccattataccccatatcaaattatggtccttacaaaacaaaatcccgaacaatttcccctaaaaatgacattttgcataatttaaaactttcagtgcattaccaattttttttcagtaaccaaaaacacccttgctttcaccttaccaccccctttttaaaaaacaaaaactcccccttttttaccctctcgggaaaaaattttccctttccaaaaacttaaatacacattttccagtgtttttaccccttttctctcttaaaaaactgaaattttctttgataatttgaataaaaccaacccccccctttttaaaggaaaacccccctttt

SEQ ID NO: 99025 - DNA, 506 bp, Glycine max
  Clone ID: PAT_MRT3847_60433C.1
ccacgcgtccggtgggagcagtcatcccaggagcactacttctaaataggaccaggctctagacaccacaagggcacctatgctgcctgcaccaccattggacgacatgtaccgactgtaagatggtgcgtgacacctactattatatggacatattaatgctgccgcaccatatgaggacatgaccaactgatttgactccaactaccatttttttggaactgcatattatgctgttgcctacataagatctgttactaacaaagatgcagatgattacagatgttgacctgcatcttcaattgattacccaagggcttcatgaaactcctggctcttaactatctatttaaactgctgacaacacagtagcaacagtctgtgatttaaatgttctgcttgctagacactctctaggatcaacgaaggcattgctgactgtgaaaaccatggccgctaatggcatgattatcaaaagcctacttttaacccaccacttgaatctg

SEQ ID NO: 99026 - DNA, 250 bp, Glycine max
  unsure (1)..(250): unsure at all n locations
  Clone ID: PAT_MRT3847_60434C.1
actcacgcgcttattcataccaaaataaaaattaattttntactcctaaaaaaaanatgggggtggtttttttctctaatcatccatcaaccaccacctatcttatttattattntctgaaagatatgcttgtctctatctgctcaatccttcatcttttgcacctcgcaacgacaataatcaacgcttttgtaaccttttatcatgacaataaagatgctccaaattctttcctaatccaatatataac

SEQ ID NO: 99027 - DNA, 262 bp, Glycine max
  Clone ID: PAT_MRT3847_60435C.1
cttgacaatatacctttcatggttttgagcccacaaattaccaccataggcccttggaaagacctttcacagggcacacgtccctccccctaaattaattgtatgaatttgctccttcttgaaagtacaaatgaaaatgttgtttggccatccattgtgaacctgagggggttatgccagttatgcctgtgcgtgctgcataacttggatgggagttacctccaaaagaaaattttcctacccttttattgcttacaaggaa

SEQ ID NO: 99028 - DNA, 410 bp, Glycine max
  Clone ID: PAT_MRT3847_60436C.1
ggtggaacattcccgtttaggattaaaaaaagggggtcataggggagttcaatattccggtagccttggacacaaactttttaaaaaacctgggggtcattctagttttttcgccctcacaatagggactaaggggaggaactttcttttttttttatttaaagatttatggaacccccggcagttttttttcggtcaaaaggccaaaccgaaattttccacctcattaaaaaagccagggccaaattccccacctaaaaaacattgggggggggctttggggcaaaatgccccatattgctgcaaagaccaaaatggaaagggcataatttttttggtaccataaaattaaaccgggcttgccataaacttcataaggagctggtgaccttttggaacaaaagtttggg

SEQ ID NO: 99029 - DNA, 1677 bp, Glycine max
  Clone ID: PAT_MRT3847_60437C.1
catatattgatgtttcaacgttgtacatgctaactcatctccttccccttttcccttcgtataatgtatatcatggtaatatgatttcttaagtgccatgtttctacccagggcagtggttgataccgagaacacaacagatggaggatcaccattggatgtggctatcgttgtatatgcgcacacgccctccatgggcatcaccttcgatacacccgttgcgtgctcaaacaccatctggaattcagctatttgacgaagaaacaccatatctatttggcaacaattctacgccaacctccaagttgaaaagggattctgctgctactggttcatggagtattcaggatgaaatacgaagagtaagatccagggcaacaagaattgcaaccagatacaacagaaggggcagaggcaagggtgtcaaatgatgcctgttgtattatgtatgttaaattgtaagtcactgttagcttagaaagtatagtttgggagagagagtacagaattcaacaaatttagttgatgcatcgggtctacgtcaacttagactggtttctcaggtctctccagatttggacagtaaacttgatgaattacgttcagggaaatcaggttcaggaccagttaacattaattttgaacagaatcagggctctgttgctgttcagcagaccagaggtacacaagatggcggcgaaataactacttcaggactaagagatgggtcctcggatgatatgcacagggatggcggtctggttaaagtcaatggcatcagtgacacaaatgggtctggtcatcagctagactcagttgaagaaactagagatgcaataaattctagattacaagatagtaaccacttagtaatcaaagagaaggttggagccgaagatgcattggcaaatgggtttccctcttcagggccaagtttcaatgcagggcaggttattgaacagagcacaaaaacattggacaacaaacctaatactactgattcaagtcaggaaaggacagctcagggtcttgagcaagaggagtgtcagacgttgcgtgaatcaacggaggtgcctgatgtgattggggatgactccgttgctgaccgtgttgcctctggttcacagaacagttccagtatgtatgaggttcaacatgatacttctcagccgggtgtagaattaggtttgccagccacaccaactagcattgctaagcaaaagggaagaagaattacaaccagatacaacagaaggggcaggagcaagggtgtcaaatgatgcctgttgtattatgtatgttaaattgtaagtcactgttagcttagaaagtagggattctgccaggtcatttgttgtgagattaataatattcacgaatgagtctacgtcaacttaggtttattttttctttcatctgttctttcttcttttttgggcgattacgttcagggaaatcaggttcaggttcaggaattggaatgtatttgctgtataaaatggttaaattagcgacatgttctttttttcttttttagctggttaactagcttacacggatttatgggacatgtacgaacttgtgcagcctgaatgaggctcctccaggaatcataacattttgtaacattccagtactcgaattagtttgagtttgttgacttgaaaggttttttgt

SEQ ID NO: 99030 - DNA, 1194 bp, Glycine max
  Clone ID: PAT_MRT3847_60438C.1
ctgcgagaagacgacagaagggggagtgtgttgtgtctaacggtccaagtctaacgttgtggagcatagaagagaaagggatgatattgaactgtgttagagtgacagctatgcctatgatggctgttccttcatggagatccacctgctgctgcgcttcttcttcttcttcagtttcaaccatcaacacagaccaacttcgttctcaacttgatcaacttcattcagaagctgatgccaccagaaccaaggcaactaatgctagattgaggtttctgcgactgtcagaggttgcagagaagcttcaaaagcaagcagctataagcattcaaaaggggcaggaaaattatgcaagggaaatgctttttcagaggaagaaagtgttgcaggctttagacaagtctaaaagacgcattgaagtgctcgatgagctttcctccaagctaagtgaggcaatatctttgaaagaaagtcagctaattggaaatgttactgtgaaaattgaagactcaacagaagatgcttcaagtccagttcgaattattgctccaaaggaggaagttcaaaatgatgtcactaaggatgagtcagatcctgatacgatggaatttagtgatattcaagatgtgcaactttctatcgaaagtgaaggaagtccactggatgataaggagactcagcatcttctggaatcccttagtatcagcacttcaaatgaagaatatatagccagaaacttgtcagaaatatcctcttatgaggatttcatggaacatatagataaaaaactcagtgaaattgaagccgaactagttactgttttgaatgtctcaaccttggtactggataatgaagagagaccaaagaattctaggttgcaacaaacaattgaactccttgagagcatccatggcattagacagagaattagaagtaccaaggaggcaaaattgaggatctaatcaattttgttttgctcaactcatcttctgcttccaggtgagaactaacaccatttgtaaaaaaaggtttgccacaattttcttgtatcccttaatcacttaatgtggaaacaggaaagacacatttgagatgcttattattagtttcccaaaaaaaaaaaaaaaaatactaaaaaaaaaaagcggctcgccgtactagtgtaggctctgtcgagccgcgaggagattaatt

SEQ ID NO: 99031 - DNA, 708 bp, Glycine max
  Clone ID: PAT_MRT3847_60439C.1
taatactactgattcaagtcaggaaaggacagctcagggtcttgagcaagaggagtgtcagacgttgcgtgaatcagcggaggtgcctgatgtgattggggacgactccgttgctggcggtgttgtctctggttcacagaacagttccagtgtgtatgaggttcagccgggtgtagaatcaggcttgtcaaccacaccaactagcattgctaagcaaaagggaagaagaattgcaaccagatacaacagaaggggcaagggtgtcaaatgatgcctgttgtattatgtatgttaaattgtaagtcactgttagcttagaaagtatagggattctgcaggtcatttgttgtgagattattaatattcacgaatgagtctacgtcgaaagtatagggattctgcaggtcatttgttgtgagattaataatattcacgaatgagtctacgtcaacttagacaggtttatttttttctttcatttgttctcttttttttttggtgattacgttcagggaaatcaggttcaggaattggaaatgtatttgctgtataaatagttaaattagcgacattttttttttacctagttaactaggtaacatggatttatgacatgcacgaacatgtgcagcctgaatggtaacactggtccttgcactagcattctctatgaggctcctctagtgaatcataatattttgtaacacc

SEQ ID NO: 99032 - DNA, 1184 bp, Glycine max
  Clone ID: PAT_MRT3847_6043C.1
gctcctgtcggcctcggtggggttcctgaaagccctgttgtcgagagtctctcgaacccgttgctccctctctcactttcattgaatctctgaacctactcatcaaatctcgatgcctgttaccttccctcacgaaaacgcaccctcttcaatttcaaaccacattcctttacttcaatctcaaaacaaaaccagcagaagtatcggaataaaaacccaaaatattcccccaattccaccaacaaaaacattatcaccaaaaaccaaaagtcacaaaccaaaaacaacgaaaaaaatgacaacaataacaaccacctcgttagcgtcattagaaagctgggccatcctcccattcttcattatgttcctctccatatacttgatcggatacttccttattttccgcaaacaaacccccaagatccgacccgaattctccagctgcctgatctcgctctttcacggcacccccgccgcaatcctcggcttcgccgccctcctctccgatagccaccgcggcttcgctgcccccaacaccgccttccagaaactcgtcctcgactacagcgccgcctacttcctcacagatcttcttcactacgtctttttctaccctagcgacgtgctctacatcgcgcaccacgtggcgaccctcttcgtggtcctcacgtgccgccacgcggtctcgcatggcgcgttcgcagtcctcgtcctcctcgtcctcgccgaggtcaccagcgcgtgccagaacgcgtggaccatcgcgggggcgcgaaagggtgaggacgcgcgagccaggcgcgtgcacgacgccctctagccgccgttttacgcggcgtattcggtcgtgagggggctcgttgggccctactttgtgtaccggatggttgtgttctacgcgagtgggggcgcgcgtgggcttgtgcccgtttgggcctgggcttcgtgggtcttggttgtggttatggctattggggttagtatcttgtggatttgtaatctttgggttcaattttttagggaaaggaggttgaaattggaagagaaaattagatagagaacagggtttgttgttctaagcaaaagcagttagaattattaacaatgttctctttgtttttttcaaaaaaaaaatattacttgtttattactattactattattctaatactggtaatttttgg

SEQ ID NO: 99033 - DNA, 302 bp, Glycine max
  Clone ID: PAT_MRT3847_60440C.1
actggtagacgacagcaggaggaagcctcttcatagacaatggcggcgcctctgctctcggagaacatcgtgctgaaaagggtcaagaagttaactaggcctctcagtgacaggatactttccgttaagactaactggggcagaccaaaaggtatcgattgtagcttttggagaaaactaaggggatgcacgttgatgccaaacattgcttattgtccagacaaaaagacccggcactatctccctagtggtctgaagagatctgctgatcacagtcggaaagattctgtactactcatgat

SEQ ID NO: 99034 - DNA, 688 bp, Glycine max
  Clone ID: PAT_MRT3847_60441C.1
tacggctgcgagaagacgacagaagggggtaactcgcatcggattgccccattttgccacctctatctgtctgcaaccggtgacgttgttagagagagaaagaaaaaaaatggtgaaaggaagaagcgaaatggatggcgtagaagtacctgaagccatgatagatactctcaaccgtactttggagagccttcaacaactcgagacacagttaccccaatttctctctctccgaccctgattttctcgctgaattaccactcgttgaacgcgctcactcactcttctccctcgccaaactcacctctaccctcttctcattgaagttgaggtgtagaggtgttaacccaaatggccaccctgtcaaatccgagcttgacaagataaacgtgttgcagaagaaactggaacggcttccgcggttcactgaagcacaggagcaagacactaggaacataagtgaagaggaggagccagagatgaactatcaggaacggactagtcaaaagaggaagtatccatcgtctgaagaacagtttgttcaaattgatgctgtgggatccctggttaaagtaaaggaggaacatgttggtgataataatggaaatattaaggaagcaatagtgattgacatttcagatgatgatgaatgatcatgatcatgatcatgagctacttgcaccttagt

SEQ ID NO: 99035 - DNA, 172 bp, Glycine max
  unsure (1)..(172): unsure at all n locations
  Clone ID: PAT_MRT3847_60442C.1
catgaagcnctgataatgcatgtagaacaaagctctgaatgggacgttgacaaccggaacgcgtatgatgtaccgatcctcgatgtcatacataacatctactactaaactctgcacttatgctcaatcaatttgcataccaaactcatctcattgagaagaactagatctc

SEQ ID NO: 99036 - DNA, 347 bp, Glycine max
  Clone ID: PAT_MRT3847_60443C.1
atagataaaatcaaacaatttggaattttttaaaagatcagtctcaacaaaaagtttgcccacttaaggggggaaaaaacctccttcctacctcggggttccttatggcaaaaccaaaaacacttccatttgtttataagatttgggaacccgattaaaattccacctttcccatccatttaccaaaattttgctttgaggcgtccaaggacctcttgcttttcctgtgtggtctggaagcaaccatgcccatactttgaagaggtgtcgttaaactggtgcttgatctcctccaaagcaccccgaaaagtctgcttaaggagggattggcccattgtaataatccc

SEQ ID NO: 99037 - DNA, 678 bp, Glycine max
  Clone ID: PAT_MRT3847_60444C.1
ccacgcgtccgtaactttgattaactttttttaaaacatttaatttgataatttttttttaccgagaaacatttaattgtatacatttcagtctttagcattcaaacatttcctccatttcttttaaaaaaaaagagcatttcctccatttttaccttatttccatttatttgactttttatctaatactattaaatgtctattattctgtttactatctatctttttatgctactagtaatttatataacataaaattgaagtggtaaaaagctatatatcatttaaaagtaatattaattattggaatcttttttttttgtttaaaactattgaagaataagatttttttaaaattatgttattgttattgatcgtctcttagatcttacttaaatatctaaactcaattctattacaatcaacttgttaataaaattttatattttacactaatatgaaaattcagtgtaattaatatgtaacaataaagcttaggaaatataacattttttaaagactaatctcaactcaatcttaatcagcttaagttggatttgataatctgaaaaattgaaataaaaataactgaacccaaaaaactagaaatttaaactttaaaatatatttcagaaaattaataactttttcctattaatttaaaaataaaaataaaaa

SEQ ID NO: 99038 - DNA, 402 bp, Glycine max
  Clone ID: PAT_MRT3847_60445C.1
attcgatcactttgatagttactatgtaaattatgatcccaacacatgtcctctacgcctcggtctcaatcccgctccccgtcctctcatgatgcttaaatagtcctccgaccttattcttccccctttcgccgacatgcttcatccacgccatcgtcctcggtcccttccactgcatcatgccccgattcttgcggtgcaggtgcttcgcgttgtccttgtagtccttgacctggtctacaacgccacgtttgccatcttcattgagacgggtgtctgtcttattgtccttttgcaagaaatcagggaggaagttggacgagtccgagtctgagcccgagtcactgccgtcggatgagccttccatgtaggagctgttggcacgtggagacctcggcttct

SEQ ID NO: 99039 - DNA, 275 bp, Glycine max
  Clone ID: PAT_MRT3847_60446C.1
gtgtcctcaccgcctcatcagcctctttgtttcccctttcatggatgaaatccagatggaaattcaatgcccatcttccttcatggatggattctctcattataccctccatcatgaagaagccaccaacttctcaaaacccatttcctgcaacctcaaaatctgtcctcaaccacgcagacttgagctctcttctctctgtttgtggcagagatggaaaccttaatcttggttcttccatccatgcccgtatcatcaagcaacctccatctttc

SEQ ID NO: 99040 - DNA, 458 bp, Glycine max
  Clone ID: PAT_MRT3847_60447C.1
tttaaaaatataaattataaaatatatggagtcgccaaaacgcctctacgatttagggggccgtgctaacgccgtgcaatgcaaaacctcatacgactcgctcataccagcagaacagcgttcaagcaaccgtcgttctcggggttgttcgtaatttgagcatatcgaccccacacgacctttccacccgcagtaacaagtcccaactcagacacattgacctcaataatcggacccttggtcagcacacccaactgtgtgtacagcgggttctgcgggttcttcttcacactgataattggcaactgcaccgtaacgcttaactcaggatgcgtcacattcgccttcttgtacctcaatcccatgggcctaatgaagcgctcgtatttcaccggtcgcctcgtgaatccaggtccaacaaacgtcggcttggtgatcatgcgcttccagctcttctt

SEQ ID NO: 99041 - DNA, 322 bp, Glycine max
  Clone ID: PAT_MRT3847_60448C.1
gggaacagggggggaaaataacccaacccgcaaaggcttttttaaaaaacccaacaggttttgctaacccctcctccagcatttcaaatccaaaaaaaggggaacccaaaggccccaaaaacataaacttccttaggccttggccaaaaaaaaaacttttaaaacccccgcaaaaaaacgggggggaagcttccggaataggaataacgggaaagcagtttcccgccaaaaaactaaggggttttaaaccccaaatttgtttttgaaagagagggaaccttgtttaccagctgggttattttgttgttgaccaacatttttt

SEQ ID NO: 99042 - DNA, 225 bp, Glycine max
  Clone ID: PAT_MRT3847_60449C.1
gcccactgcttctatcgtcattctttacatatagaaccctgacatggcggatgctctgttaaagaccatcagtgacaggacgcgataacacactaggagccaccgccgtcaagaaggcctctaaggagagcaatagctgactgcaattgctggtcggccgaatcggccgtgacctcatggccgcaaaatacgccgagcgcgtcagcgcctgtgctaccgtatacc

SEQ ID NO: 99043 - DNA, 1477 bp, Glycine max
  Clone ID: PAT_MRT3847_6044C.1
gtccggattcccgggtcgacccacgcgtccgtcaaaatttgttttttttttcttttatgtttgactctgccgcgtgaaatctcctcccgatgctggcccccctcacccaccacctcccctacccctttctgcgttgccgcagggactcccccccttcccgcactccttggcctattactcctctcgcccattcccagactggacgtggacaatctggaccccctaacttgttctgtctttttacagatcgaattcggatatggcgaggaacacagcagacctcgcaacgaacttcaatgttgctcaccacttcccccacgactctctgctccgctattgctcttcccacgtttctggcttccctcatcccccaactcacttcaccgtttcccagtttgggcatggacaatccaaccccacgtacttgttggaagtaggttcatatggttccgtggtgaagcgctatgttctcaggaagaagcctccggggaaattgcttgcttcagctcatgccgtcgacagagagtttcatgttttctctttttacattgttctccatgcattgggcactcataccaaagttccggttcccaaagttttttgtctgtgcaatgatccaactgttattggaactgcgttttatatcatggaatatttggaggggcgcatatttcttgaccccaagttaccaggtgttacatctcaaaagaggagggcaatttacagggcaacagctaaagccttagcttccttacattctgctaatgtagattccattggtctgggaaattacgggcgacgcaatgattattgcaaaagacagattgagaggtgggctaagcaatatgttgcctcaacccgtgagggtaaacctgcaagttatccaaaaatgtttgccctgattgattggctacggcatcaaatccctcttgaagatacttcaggagcaacaggaggtctggttcatggagattttcgcattgacaatcttgtgttccatcccacagaggatcgagtaattggaatacttgactgggaattatctacccttggtaaccaaatgtgtgatgttgcatatagctgtatgacttatattgcagatattggacctgaaaaagtacatgaaggtatagagcattttggattacctgagggaatcccttcattaccagaatatttggctgattactgttctttggcacgaagaaaatggcctgttgctgaatggaagttctatgttgccttttctttcttccgggcagcttcaatttatgcaggagtgtataatagatgggttaagggtaatgcatcgggcggtgaacgtgctcgacacacagaagtacttacaaatggccttatagatactgcttggaaatttattgaacacaaatctgtgcttcctcagcatccaccctcagatgcaaacgctcaagactattccaaagagttaccgaatgggaatgatatacaggaactc

SEQ ID NO: 99044 - DNA, 206 bp, Glycine max
  Clone ID: PAT_MRT3847_60450C.1
tttttattttggcggcagaaacacactcacacaaactaggtcttatatgtggcttgatcgctacagcgggccaatactacaacaaaaacagtagtagccgccagccccccacataatataagacttcaagggggccatttggggggggtgatttacactctctaggggccgggggttccctcaaggaatatggggggggggggggg

SEQ ID NO: 99045 - DNA, 1588 bp, Glycine max
  Clone ID: PAT_MRT3847_60451C.1
cttatcatcactttcatatcacactttcttcccttggccttcgtcgaaacgatatcgtttggattcatcatgaaggcctcaatctccagcaatggcgattttctcaagatcgcgttcttcttcctcttcgtggccttcacgttcttcttcgtcggcaagcacttctccgacagctcctcccagcagctaatcttcttctccgccaccaccgccgccgtctccactaccaccaccgccgaggtcaccatatcccccaacttcaaccaattctttaacgtcgccgcgctaatcgaagcccagacccccaaaaccaacccctcccaacaacctcctccccctccccctccgccggagcttctcgacacgatcaagcgcttcggcatcctcaacgacaacggcaccatgtccgacgacttcgagatcgggcatttcgaggaggggttgccggaggattggggaaacgacaccgtcgtcgaggattccgtctccgctcccagaatcgctgtgagcaagttcgggatgtgtccgcgcggcatgagcgagcatataccgtgtttggataacgcccgcgcaattcggctcgagaatacatggagagtttgagaggggagaagtacgagcggcatcccgtgccaaaagcagagacgaggttgcgcgtccgtttcgttagaacgccctgtactcttctccttcaccctcttcctcttcctcttcatgcgcttctctcccacctcttattctgatctcaccttcttctcttcgacggcagaggcaccctcccccgagcaatcaccaccaaattcgcctcctcctcctcctcctcctcctccgtctccgccgttgcctacgccgccgggagtgaaaatattccgtgtgccgccgttaccgccggtggagaggatgggggtgctggacggtagcggcgtgatgacggaggatttcaaggtgggggagttagatcccggtttcgaggaagattctctaaacgacaccttttcgagcgtttcaggtggtgggggtgtgagggagaagggaagtataaaatgtgtgatgtgagaatggtggattatgtgccgtgtttggataacgtgaaaacgatgaagaaattggagagtttgagaggagaagtacgagcggcattgcaaagggatgggcctcaagtgtctggtgcccccgcccaaggggtaccggaggcccatcccgtcccaaaagcagagacgaggtactattccggattcggactctggttcagtaatgtaccccatacacgtctagtcgaggataaaggcggtcaaaattggatatcaataaagaaggataaatttgtttttcctggtggtggaactcaatttatacatggtgcagataaatacctggatcagatttctgagatggttcctgaaattgcatttggtcgcaacaccagggttgctttagacgttggctgtggagtggcaagttttggtgcttttttgatgcaacgtaatgtgaccactctttcagtagcaccaaaagattttcatgaaaatcagattcagtttgctcttgagcgaggtgtgcctgccatggtagcggtatttgctacaca

SEQ ID NO: 99046 - DNA, 680 bp, Glycine max
  unsure (1)..(680): unsure at all n locations
  Clone ID: PAT_MRT3847_60452C.1
attatcgttcccccgcntacatctttttgcccattcaaactagaaacaaagagttctctcccagaaatggatagaggagtaggcatttttctttgtctcttgcttgtgaccatggatatctcagctgggattcttggcattgaagctgaaattgcacaaaacaaggttaagcacttgagattgtggatatttgagtgtaaagatccaagccataaggccttcatgttgggattggctgcagcagtgcttttggcattagcccatgttatagtcaatttggtcggtggcttcaattgcctttgttctcaaccagaggctgataaggcttctcccaacagacaactctcaatggcttctctcattttaacatggatcgtgttggccgttggattgagcatgctggtgatagggacttcatcaaacaacaagtcaagtggttcttgtggtttcactcaccatcacttcttgtctactggtggaattttgtgttttgttcatgccctattcagtgttgtatactacgtttctgccactgcctcttaattagcgattaagttaactagactgaggccaattctgcttgctttattgttttaggcatttggcttttttanatgttttgctttaccaaatgtgtactaagttagattaaacaaagaaatgcaatcattcttattgac

SEQ ID NO: 99047 - DNA, 776 bp, Glycine max
  Clone ID: PAT_MRT3847_60453C.1
gtccatacggctgcgagaagacgacagaaggggactcacaaaacaatataacttaattgccttaaggaacgttcgagaccacagaggtttctctagtcttcttctgtggagagcttgttttctcttgttcattcatctcacttccaattaaggaacaagctttccaccaatttgaatcaccaatggctcgctctttctccaacctcaaggttctctctgctcttgtcgccgacggattctccaacactctcaccaggcgtgggtacgcagtagcgacacaaagcgcaacaagaggaggagcagcctccatcagcggcaagtcaggggaagacaaggtactaggaggaggtgctgaaaaggtttcgtgggtcccagaccctgtcactggttactacaaaccggagaacatcaaagagattgatgttgctgagctgagagccacggttttgggcaaaaaattcaaccactaggctctacttaatttcaataattaacctttttggtctcacgtgaatatgttatatgatatatgaagttcacagaaccttcggggattattcagcatggggtttttttcttgtatttctctcttgagaatttggactagcatatgaccaaattaatgtttactagtgtgattggatctcccgttgaaaactcaaagctatgcttctgttgaattcactttcgccgaataataggagtattttgaatctttctatgcaaaatatccaaatgtacacgctctattaagtatgaaccctcctttcccgttt

SEQ ID NO: 99048 - DNA, 265 bp, Glycine max
  Clone ID: PAT_MRT3847_60454C.1
gaaccacatataaaaggtccgggtctattatcatagttaagtatgcataatcccaatcacaaataggctatctcaatatgttcataaagtactcaatatgtttataactggtccgtttttcgtcatgatcatttcaatatgtgtataacctgcttaactttacaggtgccatctctcttgccttggccctcaaaatatgcttctggatcttcccagtagctgtcttagggaaggcttcaaacacaactgtttttggaacccaata

SEQ ID NO: 99049 - DNA, 274 bp, Glycine max
  unsure (1)..(274): unsure at all n locations
  Clone ID: PAT_MRT3847_60455C.1
cgctatggatttccatgttcctgtactgttaattcttnctatnggatnngacgagnacatggnncacttggcttctatcccaattactgctactggcattaacccagcaaggagttatagtgcagctgtcatctacatcgaagacaaaacctgggatgatcagtggatcttctggctcgcaccaattgtcggatcactatcgcctgcattccacccccacttcatccttatatcttcacctatgaaggttcttggatccttcacgaccaacgct

SEQ ID NO: 99050 - DNA, 613 bp, Glycine max
  Clone ID: PAT_MRT3847_60456C.1
ctcgagccgtttggctagaaaatgaagcaaccatcatcaaaatcaaagccatggagacctcgcgctgctctctcctccccctcggtggcccagaccctcttttaaaacttcagcaggtgcatgccatcacgttcggatttgtcaaagaacattgcacctttgccatcattcagaaggctctctttctcggatctcagccgttcgtcgtcgacgcgaatcaacgaggatcttgcacaagtcttttgggtcggacttggttgattttcagctgattgagctgcgtgccataacacagaattttagcagcaatttcttgctgggtgaaggtggctttggaacagtgcataagggttacatagatgacaatttgaggctgggtttgaaggcacaacctgttgctgtcaagcttcttgacattgaaggtttacaaggacatcgtgaatggcttgcagaagtgatttttcttgggcagctaaggcaccccaatttggttaagttgattggatattgttgtgaagatgaagaacgattacttgtctatgaattcatgccacgaggaagtttggagaatcacctcttcagaaggctaacatcactgccatggggaacaaga

SEQ ID NO: 99051 - DNA, 308 bp, Glycine max
  Clone ID: PAT_MRT3847_60457C.1
accagctacatcctaggaaaggagacactgttttgaaagtgctttgttttgacactctgacgtctgtatattattgagaatatacagttctttagatgttttttggtatcacttctcaaataatattagacaactagtatttttactatcacaactagttttttttatatacagatttgttttgtatgttatcagaaaaaatgtgttgagagcatgccatgtgtagaggttgatgagcatccagtgctacagaatacagattgttcaggcacgtggattggttaccggaccgaggacagcgcttatac

SEQ ID NO: 99052 - DNA, 402 bp, Glycine max
  Clone ID: PAT_MRT3847_60458C.1
tggctctggaacctttgggctgatttatgtgcttgcatggtcgtgagaagatgatagacgggggcgctctatctatactatatatatctctacaggcgcagtggtgatatcaagactggagaaagaacggtgaaaatgatgctgccgtcgtctcccatatcgtcttctcctggaatttcagtctctacttaggtgaagaaactgaaggaggacccgaaggaggcgatttataaggcccatcccgacgccgagaccaacggaaaagaagtaggctgcaccgcaacgggctcccacgggaaggtcgccttaaaaatcgtagaaaatccttgagtatcccgtataggggaaaagggaatcggcaaaagcggaaagttctcttaccataaaggcagtctaccttac

SEQ ID NO: 99053 - DNA, 316 bp, Glycine max
  Clone ID: PAT_MRT3847_60459C.1
ttcttctttctctttttacttatttctccttggaacaagggcacaaaggctatttttgcctcgtaagagaatactacatagcgatgccctttacatgcatcttcgtcaccatagttgattcaccttaaagcgaacctagtgccctctttcgaatcgcatttattacatttcgactgataggagcatgctagactgtcgtgaggggcacgaacctcctgaatgtcctacaggggacaaggacgcttaaaggtaccgcctttctatttgtggccttcaaagagagtgactcattggtcataaattgatcccaacaatg

SEQ ID NO: 99054 - DNA, 241 bp, Glycine max
  unsure (1)..(241): unsure at all n locations
  Clone ID: PAT_MRT3847_6045C.1
agcaaaggcggggctcaatggagggagagcacggcaccacggcccaacgaccacacccnngcggccgccgccccacggccgacccggacccaacaaccggcaggcgggaagaacccncccgccagacacgagcccncacccacgcggacnccccccacgggcgcaacccagagcagcgccccccaaacccaaacccgagccccaaccaaccggagcgacngcaaaacgacccanaccccac

SEQ ID NO: 99055 - DNA, 448 bp, Glycine max
  unsure (1)..(448): unsure at all n locations
  Clone ID: PAT_MRT3847_60460C.1
cggctcgagttcgagccacagaaggctcaggaatatcaacttctcataaggaacttcatttatactggttgctatggctatggtattgatgagcatatcaatttgggaggcaagtatnatccttcaactgatatttatagaatggatatatttgttgatctgcagcgtactggctatcatgtcaaacaccgccaaacgtgcaagtcccgtgtttgaattcagcacctgctcacaaaggaggatgctatgaagtggttccaggtgaaatatgacggagtgatccttaacaagttctagtcaattgtttagttagattgagttcactttactctgaacgcatgtattgaaacattggttgtcatttcattttcatgataaatcatatgtattaacatgagccctgtntaaactgcacttttattgcaatgaacttgtaaactccacgttt

SEQ ID NO: 99056 - DNA, 1080 bp, Glycine max
  Clone ID: PAT_MRT3847_60461C.1
gcacgaggtaatgccatgtgatgacaaaactgtttattggtttctaacttggactcccaccagtgaaggtgaatgaattctttgtttcagtaatgtacttgctaaaatatatatatatttttttagtttttaaaagagaagaaattatagtgtaaatttttttacataatatatgattttacaaacattaaactctttttaaaattatagtttaatactttaatatcattttagttttttaattttaatctttataaaaattttaacatttttaaaaaccaatttttgtcaatcactatatcacaattatgtcacatcataaatcacttttaacactgtatattggtttctaacttggactgccaccagtgaagagaaggagctagcaaagaacccatccaaaatgaagcaattggtgttgagaaaggttgagaagatgccaagtgatattaaaacctttatagagaaaacagagacaaaagacattttaacatctccattgaaatatagacatgagtgggagctcatgttggggaaaattagcaaaggcaacgtttgtgttgttggagatgcatttcaccccatggcccctgacctagggcaaggtgggtgctgtgccttggaggatgggattattttagccaggcatctagccgaggcattcaccaaaaaaactggcaaacatgttgctaaagagatgggtgaagaggggtgatttgaaattggtctcacattttagggacaaacttttccctgctttcctagctgagctgctgttgaagaaatcagattttgattgtggaaaacttaattaacacgcctaattgatgtggaataacgtaattaaccatgcatgcatgccctcttgtacttggtggccttatagaattttctccacccattaccagcgacgtttatgtgtatgaatagcgatttctaagaattttaatgcattgttgtgaaaaattttgtcgtctatattgtctctcgtgtggtctataaaaaacaaatgtactactgcagaaaagcatcaagtccttgttacactttcgtacaagaataaagatttgtttccccccg

SEQ ID NO: 99057 - DNA, 1397 bp, Glycine max
  Clone ID: PAT_MRT3847_60462C.1
aattcggcaccaggtgccgacaaattgcaccgaaaccagtcccaacgcccattatttctatcatctctctgtttccctaactgccacgcgtccgctctgttttgctccaaatgactctgtttttgccattaggcttcccttctaagcacccttgtcaaacaatgcttccaccctaagaaaaccaacaacttcccataaccaattgaaagaaatacattttcccaataacccctttgaagcacatgttctaagcactaccacaaaccatattctccatctcccttcctctgtctccctctttctctttctctgtcactcacccctgaatacatagatgactgatgcaaatgctgattcgtttgaggcatttctccaagggtggagggtgcgccaaagaggctaccttgatgagcttctctcagctcagcaacactatcacgagctgcaggatgatgatgtgaagcaattgatcaacagggtcgtctgccactatggacaatactttgaagagaaatcaaagattgcccaccaaaatgttcttcttgttttctcaccaccatggttcagttcattggaaagaacctttctttgggttggggggttcaaacctggagtggcctttcaggttgtgaacgcagctttggaggttttgtcagaagagcaaaaggagaggctgagtttgctcaaccaagagaccaaggtgaaggagagagccctaaatgatgagttggccaagcttcatgagagtgtggcagctccaccgctggtggacatggccaggagccatggtagggtgtgtttcagtaggtccttcatggcagatgggggttcttccgttccaagcactttcagatagacattggagaatctggaggcaaatgcagatgctttgaggacaaacacatctttgaagattctccagatactgagaccttctcagcttgtttcattcttggttgctgtggctgagcttcagatcaggattgggtcttggggtttggacaaggatgccctgaatggaggccaagggtgaaagtcaatcaacgggaatttgaaggcttttttattgaagaacttggatggatgtataggatgtggtaccttgaaaattacttttcaacgtcccactcactttgacattgcatcaaagtaagtttctccctaaggggtctttttggtcctttcctcaacacaatgcctaatgctaaagcaccagtttcaaagttcaaacattcagcatctacaagttatcagaagtgaaagagtggatatggagtggaagaatatcccaagatcattaattttcatttcccttctttgttattcacacatttgtatgattatttaatgctaatgaattgttatttaattcattattataaataaatacataaccc

SEQ ID NO: 99058 - DNA, 298 bp, Glycine max
  unsure (1)..(298): unsure at all n locations
  Clone ID: PAT_MRT3847_60463C.1
gaattcggcaccagggtcgggcgtcgcaggtttctttcctttcctatggtcatcggagcagtcatcattggtgttgtttctgggaaggcaatatttggacccccacttgatgagtattggaaaaagaagcaacaggaagaggcagctgctgcttctaaggagaatgactctacctcaacttagttcacaacacaatcatcatattttttctctttttctttggactttttagacgagaattgaaagaccacatttgaatttaatcttggacgggtcactgcactagcttnngctagca

SEQ ID NO: 99059 - DNA, 407 bp, Glycine max
  Clone ID: PAT_MRT3847_60464C.1
cggctctatgcaatttaaacttcatggcatttgagggtcctggttgacagtcggaaacagtctacagatattgatatacacttgggaatctctcaagattctgaaattgcggtgtaatactatttatgccagctattttctgttgcacaggctactagacatatctattgaaaatgccggagccagtgtataactccgaatatgtgtttacaatccttcgaacatttggtttatttatgtgtggatggtgatcatgacttaattagtgtgcatgaatatgtcaagccttactttagagagtctaaattagaaaagctttttatctgggcataacatcaccattactgatggtatggacaaaactagtgcaactttgcaattggggttgtttgcatattttgattttc

SEQ ID NO: 99060 - DNA, 210 bp, Glycine max
  Clone ID: PAT_MRT3847_60465C.1
caacaaataaaaccataacatattagagcgctttttaaaacctaacagggcaatactaaattgttaaaaagtctacattactcacaacaaacactttaacaatgctccatctgtatttaatgtaccacataaactaataagccactatttcccaagccaaatgtaattgtccatttcacctaaccatgaccttaatacaaaaacctaact

SEQ ID NO: 99061 - DNA, 499 bp, Glycine max
  unsure (1)..(499): unsure at all n locations
  Clone ID: PAT_MRT3847_60466C.1
gtataacagtatgatatataggacgggccgggccacaaagatagaaccacttactaaaggcgatctctattgatgagcaccactggaaggcaatgtgcactgcttccgggaactatttacctatggacacattttacctgatatttaccatggctttgtgttatgacaataaacgcctttaccctgaaaagtaacggttacgacatacgcaagaaagggaccccatactgcatccatgaggatcagtcggggtctagagaatgcttcctttacaaaccaacagctaagtctggatgccggaaaaacaccatctatgcaagcattgtactcctatgtaatctttacaatatcgaatctgaccaaaagaatacatggtttctttgacactgcatgagacacancggctgaggaactatcactatcaaaatcacttgtcaaagagcctggatcactggtgtagctgcttgaactactggctttactgccattatccactgga

SEQ ID NO: 99062 - DNA, 279 bp, Glycine max
  Clone ID: PAT_MRT3847_60467C.1
cggaagagcgggggcgacccacgcattcacccacgcgagctttttattttaaaaaaaagaaaaagcaaaaaaaaaaaagaggaaacagttaaaaaaaaaaacacaaagggcgagacccggcggcccccccagaaaaaccaagaacacgaacccgggcgggcaacgacatagccctaaaaaaggggcaccaaaacccaaagcacaggccagggaaaaacaaccaccggacggaaaaaaccatggggaacccaactaaaaagaaaagagcacaaccccaaa

SEQ ID NO: 99063 - DNA, 443 bp, Glycine max
  Clone ID: PAT_MRT3847_60468C.1
ggattacctcacagaacattaccgagtttgggacatcgcactagttaaaacccccacctcctttaattggtttccaacatgtattatttatgaaaaaagatgacataccttttaaccccattggtttagggatcaaaccttccagacaaaaactttggaaaaacaaccacccggccaatcaatgaaggggggggaaaaacatttgatccctaaggaactaatttggccttaaacacctcccacaaaaactgtggccggattattcgctgcaatttggaaaataaaaaaaatggctatataaaaccagtcgggccactggggtaggggggggaatttttttatatggaatttatcgggcccgccatgcaggttagggttgccaaaaaaaaatctcattttcccccaatgttgggcgtgttttttttaagctcctcccaaggggg

SEQ ID NO: 99064 - DNA, 357 bp, Glycine max
  Clone ID: PAT_MRT3847_60469C.1
ctagaacttcatttttctctccctcgtcactaacttgagcgggtggcttgttggtaaaattagtactcaaatcggggttcatgcaactgctgcaaagtggttcaacctctttacaactcagtcttattatgttcaacatcttactgatagattgcatttaaccaaacttcaccaccgagaaaagtcacttttcaactagtccatcaaacactcatactttacaacaaatggtcagatctcaacatcttttatagagtaccaaattctttaatttattcctcaaaacaatcactttcagcctttttttactatatatccttatttatactaattttttaaatttattttctattcttt

SEQ ID NO: 99065 - DNA, 504 bp, Glycine max
  Clone ID: PAT_MRT3847_6046C.1
atgcttgttttgatttccggagtgttgcaaaactttacgaattatgcaacgatgcttgttttgacttctgaagtgttgcaaaactttacggattttgcaaagatgcttgttttgagggttccgaagggagcaaacaagacttgttcacctctggctgacgaaggtgcggataaccacgagatgaccatgttggtctctgcgtgctaccggacccttgagtctgacggtagaaacgagaatttttcgcggtctcggccggaagacgctgacatctccaggaaaggtgctgatgatgacaagacgctgacatctccgggaatggtgcagatgaccacgttagtctccgcgtgctaccgaacccttgagtctgacggtagaaatgagactttttcacggtctcggccagaagatgctgacatctccgagaaagaagacgctgacatctccgggaaagtgcagatgatgacattagtctctgcgtgctaccgaacccttgggtcatga

SEQ ID NO: 99066 - DNA, 620 bp, Glycine max
  Clone ID: PAT_MRT3847_60470C.1
atttcccgggtcgacaccacgcgtccgcgcccgggggaacgcgaacacagattcattcacctaccgttcctacccttctctctctcgccgcctcttcttcttcctctcgcatgctccttctctgaaccaaaccaatccattattcatttgaatcttcttatacatcccaaaaaaacccaataaaaaaggggtctttagaaggttctggttgatgggtaggagaggaatcaagctattcgatgaagaaaggaacggtcttttttcaatttccaattttgggtctcaatggggtggtgttagaggtgatggtgttcaagaccctgtgaatttggctgtgtatgcaagcattagtcaaatgggaatggggtttggtgttcaagaaccaaacccttcttcttcttcttctgatggtgataattcccaacacaacggtggcatgagcatgagaatgaggattccgtgcaccgagttgtacgttcggtacgtgcaatccgaggggaaggtgaagattctgggggttcctgaggaggaggaggaagaggtggtgaagggggtgagaaaaaaaagaggggggggggcgtggtggggggtgcaaggtggcgggcgggggggtggggggg

SEQ ID NO: 99067 - DNA, 1146 bp, Glycine max
  unsure (1)..(1146): unsure at all n locations
  Clone ID: PAT_MRT3847_60471C.1
cccgcgtccggccgagagaaacgcgaacacacagattcagtcacctaccgtcctacccttttctctctcgccgcctcttcttctccctcgcgcatactcaacagaagcccaaaaaaggggtctttagaaggttctgattgatgggcaggagaggggtcaagctattcgatgaagaaaagaacggtcttttttcaatttccaattttgggtctcaatggggtggtggtggtgttcacgaccctgtgaatttggctgtgatggcaagcattagtcgaatgggaatggggtttggtgttcaacaaccaaacccttcttcttctgatgataataattcccagcacaacggtggcatgagcatgagtatgaggattccgtgcaccgagttgtacgttcggtacgtgcaatccgaggggaaggtgaagattctcggggttcctgaggaggaagaggtggtggagggggtgaaaaagaagaaaaagggtggtgcctttaaagggttgaggattaaggtgaagaacccttctcttaggaggttggttagcggtgcctttgctggggcggtttcacggaccactgtggcgcccttggagacgataaggactcatttgatggtggggggtagtggcaattccactggggaggtgttcaggaatatcatgaagactgatgggtggaagggcttgtttaggggtaatttcgttaatgtgattcgggttgctcctggcaaggccattgagctatttgcttatgatactgttaacaagaacctctcgccaaagccaggggagcagcccaaactccctattccagcatcattgatagcaggtgcttgtgctggagttagttcaactatatgcacttatcctctagagttactaaagactcgactaactatccagaggggtgtttatgaaataaaaccaaagcttatgtttccttcatgagtttattgtcaatatagaagtttttacattaatcaatcagaaatcatgttaggtatgacttttaaagagttattgtaaaagtcaacaaacatactatgcatggtgatttctgattagttgacaaagtaaaagcaaaatttaagttgaattagtaattttgcagaggggntgttatgatggtcttgtagatgcattcctgaaa

SEQ ID NO: 99068 - DNA, 401 bp, Glycine max
  Clone ID: PAT_MRT3847_60472C.1
cgaccgcacgcgtccgaaaattctattaatccatcattttcaaggtttcatcatatatatatataatatgctcattgttttgctctcatgtcccctactcacttaaatatcaaaggacttgacaaaaccatcagatcactccactgtcaaacccatatttgaaagaactagacaatcaaatgaatataaagactctatttttcctaaatcagaaacctaagtacctcgatcttaaccttatacatttaaataatcaaaaactattaaacaactatattaaattgcaagttaaaactataccggaaaatacactaaattcaaatctgcacaataagaaactcaagactactattaacaacgagagctcacagataatccgtatgtttaatactgaattcaat

SEQ ID NO: 99069 - DNA, 521 bp, Glycine max
  Clone ID: PAT_MRT3847_60473C.1
acagacagaaaaaacattggtactatagatggcgatatatagatatatatatatatatctagataccttatgagtacaacatgtcatttgcaaagcccacctgtattcaaaaatcaaacacatactagcaccttaataccaacatgttggctatgccccctgctccgatttgttcttgaacaccctttacttaaaaggttcacttttttattttctcatgcacgccgatgaacagtgctagatttcttccctttgcgctaggatatcgataagcaactagaagtgtggtgtccctttattgcttgccagggctgattcttcgccctgacgacgccatttgcccggctccagccactataaacataaccatcacactgcctagcagtatatatgtgcttcttgatgaggatctgaactccccaaacagaaccacgccccaaaaagcgtctacaaagcgaaagcgccaggactgcatctgctgctgcatatcctgaaacatgaccacccttacattggagacc

SEQ ID NO: 99070 - DNA, 1431 bp, Glycine max
  unsure (1)..(1431): unsure at all n locations
  Clone ID: PAT_MRT3847_60474C.1
gtacgcnactgcagttttccccctgcgagaagacgacagaaggggggttggaattgtatggaatggagggttagctaagaagaaaataggagagggttagtttttaggggctgcggaaaaaagatagtgagtggtggccaatgggagcggagaggttttcccacgaccatgctcccttgattctgggtctccagccatccgccctggtcgacaacgttgccaccgtcgattggtccttgctccatcgcattcccggcgagcgcggtggctccatccctgtccaaattgaagaactggaatccatactgagagaggttaaatccaaatcccacgatgacatcaaaactctcgctggtggcagcgttgccaacacaattcgcggtctcagtcgcggttttggaatttccaccggaattattggagcttatggagatgaccaccaaggccagctttttctcaccaacatgaccttcaactctgtcgacctctcaagactccgtcaaaagaaaggacacactgcacagtgtgtttgcttggtagatgacatgggtaaccgtacaatgcggccctgtctctcaaatgctgtcaaagttcaggcacaagaattggtgaaagaggatttcaagggctccaagtggttggtattgagatatgcggtactcaacttggaggttattcaagcagcaattcatttagccaaacaggaaggccttcttgtttccttggatttggccagttttgagatggtgaggaactttaaactaccgcttctcaagctactggaatctgggaacatagacctctgctttgccaatgaggatgaagcagctgaacttttaagggatgaacagaaagatgatcctatagctgctgtagaatttctttccaaatactgccaatgggctgttgtaacattgggtgctaatgggtgcattgccaaacatggaaaggagatgatacaagtcccggccattggggaaacaaaggcaaccgatgctacaggagcaggggacctttttgcaagtggatttttgtatggagtggtcaagggtttgtcactagaagaatgctgcaaagtaggcacatgcagtggtggatctgttatccggtctcttggtggtgaggtaacgtcggagaattggcaatggatgtacaagcagatgcagataaacggactgcccacgcctcccggtttatgcaaatgaatagtagcaaccgttgcccccttaatttgtgctgtcttatattttactgatttttaatgttgtttttcttattctattgacttctattattcatttcacacaatagtatggaagctagatatttttcagggaaattcaagcgggtttgagtctttaatgtacttgtgcttgggataagtatgaactgtctcctaatttaatgttaacacctaagtcatggttccct

SEQ ID NO: 99071 - DNA, 1258 bp, Glycine max
  Clone ID: PAT_MRT3847_60475C.1
ctcaaacaaaacaaaactaaactaaactaaattaaaagtaaaaacaaaacatgttggtttttcaaaatcaatggctgtgtcttcctctcactcattcccttttctccaagttacttcccagaacaaaacatgcagcaacagtgttatccccaagactatgccccgtttggtgtcattcagtagctcgtgccaccactctgcccacttctccaggtggggcggagcaggttgtggacagttcgtttgatgcacctaaagtgaaattattgaagcagaaaatggaacttcttggtatcaacttggaaaagtcttgtttgcctgggaagtaccataacctgttttgtccaaaatgcaaaggtgggcagttaaaggagaggagtttgtcttttcacattatctctgattgtgaatttgcaatgtggaggtgttttcgagctcaatgtggttgggctggtcaggtttctgcagatgacaaggaattgtacagtggggtttgtactaatgccaatttatataggcaattagcagaggagagcttaggattggaaccacttggtcctgaggttgttgcttattttggagagagattgatatcagagaaaaccctgagcagttatgctgaaagacaattgtctgtcaataacatccacattgcttaaacttctatactcactcgggttgcttgttgaatctaggggttcaattttggcatgaggacttccatggggaaagtgtctacttttgcagcatgcgagcggaataatgtcccaggaatcttcattaagagctttgaactctttgtatcaactgattgagtctagagtctccacttttaaatctgccatccaactctcaagttgtttagacacgcttcacataggggctattgacgaggaggaagatgaaggtgaaatggtgccagttatctatgaggataaggatagtagtgatgaagaatctgatgataccatggaaactgacccagatgaacaacaaccagaagaacaatttcatgctgccagatacattgatgcaagtgatgatgatatgtcagattgataaggtctttttgttcatttcaaaatgtcataatgcgattggcaatgatgcatgtggttgagttggcagtgtctttaatgtattcgttacaatatcttggaagctccatattgatataactagcactttcacagttttgaagttttgatactatattgtactacaaaacactcaagtattacgatgtgtttagtctttc

SEQ ID NO: 99072 - DNA, 853 bp, Glycine max
  Clone ID: PAT_MRT3847_60476C.1
gtgcgagtacgctgagaagacgacagaaggggggattttaaatataaacctgctagaagatttctctgctatccatggcaaacaaagttaagcatgcaactcctgttcttggtatgggctgcagtgatggcaggccacaaagctactattggggagggaggttgggaaaatttctccatttgcccttgtttatgttagaggactaaggattgaaagagggaatagaataatgtgaaggggtagggggagaatgattcacaaaatgaagtcctgcagaaatcaatgttggcgtattggcaaaggttaagattatgtatttatttttcttcttttatattcattttcatcataactgaaaactgcccaagtctttatatcattttcatcataacggaaaactgcccaaggagggggaagtagagattgctcaagctgctctgaggattggttaataagcattatttcatttccttggtcaaatagatggtacattgagagcagattcagaaggatcaaatcagaaggttttggagaggtgatgttctctaacttatccatcataccttaccagtagagaagcaaaaaatgtgtattcactttgtaaggaacttagtctgtttatttggattcaaacgatagttagttgaagctttggctggccagaatccaaaccccagactgtgatataaacctatctctgtctccctaatctcaaatgtcttttttcctttctttttttaatgttcacggatgtgttgctgtaaaaactgactgttgaatttattgttattgttagcaattgtgagatggttaataaatgccagaatattcatggaccatattatgtatgtaa

SEQ ID NO: 99073 - DNA, 696 bp, Glycine max
  Clone ID: PAT_MRT3847_60477C.1
ccacgcgtccggatctttataataatactaactcttgtttccccctaatcttccatccaagatttttagggtttctcctccatatttcccccaatcttcttcgccactcctctcattaccttccgttgttcctttccctttcccattctctctggttgaaacaccgaaccctttcttctttaccattggagaggatctttttcactccaaacccaagaggttcgttttattcgcgctaattttttttcaagtctaattgttgttgtttataattagtaaacccccctttatcattgagggaatgttagttctcgcacggaaccgaaaagtttctggttcttctcttcctgattctggtggtgggggaacgagggttttcccttttccccttccatttctgcgtgccctatataataatggcggtgtttttttctttgaaactggatgtgaataatatatatgttggatgggttttcgatgattgttgatgttctctatattgattgtagaatccaacccaaagtgtgttttgatggggttgttgtgatcttgagaaatttgagagtggtggtagtttgttaatgttatgaggaagaaaaggaaaggaagcgagactgatgggtctgcggatctggctgttattttggctcctaatcatggctctgcttcatcgaatctaaagtcccattactcgct

SEQ ID NO: 99074 - DNA, 113 bp, Glycine max
  Clone ID: PAT_MRT3847_60478C.1
tccgatatactacacatgaaatgaccaatatatgttgctaaaatcggctcgaataaacaaaaaagcgcctcatctagctaaagagtcctgcatcgcaatcccctgatgcaccc

SEQ ID NO: 99075 - DNA, 637 bp, Glycine max
  unsure (1)..(637): unsure at all n locations
  Clone ID: PAT_MRT3847_60479C.1
gaaaaatgaactgttgaagcttacgtgactgagaaaacctacttactcgcgttgtgtgccgccgctgccgccgccgtgctttttttcttttctttttctttcgttttctcgggaaccaaacacgtttgccattggaacaatgcacggaagggcgcgagagaagcgcggtttggattcggcttccgctgaagaaggtcagcctgatcggaaacgacctgcgttggctagtgtaattgttgaagccctgaaggttgacagtctgcagaaactttgctcgtcactggagcctattctacgcagagttgttagtgaagaagttgagcgtgctttggcaaaactaggccctgccaagcttaatactggcaggtcttccccaaagcggatagaaggccccgatggcaaaaatttacaattgcacttcaagaccaggctatcccttcccctctttactggtgggaaagtggagggtgagcaagggacagccatacatattgntttgattgatgcaaattctggccatattgtcacatcagggccagagtcatgtgtcangctagatgttattgnactaganggagatttcaataatgaggatgatgataattgggacgaagaagaagttgatagtcatattgng

SEQ ID NO: 99076 - DNA, 124 bp, Glycine max
  Clone ID: PAT_MRT3847_6047C.1
ggaattctgctcgatagagaaagtttgattacagagctgataaaataatttagattgtcaaattaggagcgcagagaagttctaggtcgagataatgctgatgatgtgatacgtgagataaggg

SEQ ID NO: 99077 - DNA, 402 bp, Glycine max
  Clone ID: PAT_MRT3847_60480C.1
ggaactctttccataaataggtcatcataggttggatgagacctgttttatattcggttagaccgaatacctagcgtagggatatcaagtagtcagttaggtcgagtgactgatactacaagggtaccatgtattaggttaggttgagtacctgatacaaggatattaggtactaggtttggctaagcaactcaaattatagaagtgtatcaggtattcggctagatcgagtacctgatacgaggcatatcaagtactagacttggttgagtacttaaaactataaaggggtatcaagtattctgttgggctaagtacatgatactagggacatcaggtactaggcttgggcaagtacctgaaactatagaaaggtatcaagtattcagttgggtcgagtac

SEQ ID NO: 99078 - DNA, 277 bp, Glycine max
  Clone ID: PAT_MRT3847_60481C.1
aaaactttccaattttggcttggccaatttttgtcctgaaggagatgacacacacgtttgtactatattcatgggcacacaatgctattctgccccataatacatcattacatgtaaataatttcacatcatgaattaaaaaacaatgacaggttgacttgaatttataatttttaactcattgctaactcaaatctcacacttgtacatttttttcttctttcctatatgacacttttacatcaattaattaatttttacattttttctaatcttc

SEQ ID NO: 99079 - DNA, 231 bp, Glycine max
  Clone ID: PAT_MRT3847_60482C.1
cttttattttcttctgttcttcaaatatcatgttatacaaaattgacttaacatgttatgttgggactttgactgtgtcttcactttaaaataaggtagaactaagcatgtttaagtatctggaaggggccttcaaactgcgtttcgtgaatgcaaacccaaacgtgtactaaggaataataattagtatagagtataagttaagattttaaaaaggcttaaatatgttta

SEQ ID NO: 99080 - DNA, 155 bp, Glycine max
  Clone ID: PAT_MRT3847_60483C.1
cctattagagggagagagctgttggagtattgcctttatccctacaatatagggttcttagtaattagagaagtttttaaagggagctttcagcattgatcaacatatgtgttcagaaccacgtgaaagaaatccaccctccgcttttttagaat

SEQ ID NO: 99081 - DNA, 746 bp, Glycine max
  Clone ID: PAT_MRT3847_60484C.1
acggctgcgagaagacgacagaagggggagccgaagtggcagttcaggtggcaaaacagaacctctcttatcttctttgtaagaactacgacgaagtaacaacaatggtggcgggaactgcaaccttgaagcttagcctctccgctttttcttctccaatgtcaaatttcagcgcttcctcttcattcccctctcgtctcccaatgcgaaccccttcttcttctaaacctcgatttctcaggatttacgccttgaccagcaacgacatcaaggtcggcaccaacctcgaagtcgatggtgctccttggcgtgtgttagagtttcttcacgttaagccgggaaaaggcgcggcgtttgtcaggaccaagatgaagaattatattacggggaacacggtggagaaaacatttagagcgggaagctcgattgagcaagcagatgtattcaaggaaacaaagcagtttacatataaagatggtgctcaatttgtcttcatggacttgaatacatatgaggagtttcgtctgggtgaaaaggaaattggagacagaacaaagtggctaaaagaaggaatggactgcaatttgctgttgtggaatggaaaagttattgatgttgaactccctatcacaatcaagcttgctgtagttgatgtggatccaggacttaagggtgacacagccccaggtggaacaaaaccagccacactcgacaccggcgctgttgtcattgtcgcactctttgta

SEQ ID NO: 99082 - DNA, 434 bp, Glycine max
  Clone ID: PAT_MRT3847_60485C.1
ctcaacagctatcattggttagatatatttcattgatataaaggctgatttttactttatatagattcttgttatacacgtgcttttggattctgtttcttaattttggttctctggtttgacttgtgaagtctattttgttcgagtgttggatatggaccatgaggcagcctcatccttattataagatcatttagatgatttttttgttttttttggttaatttgttaatttcagttcagttctgaaagaacttgaaccattcttttcatgcaagttttggttgcttcaagtagagaataccaaggtcggaaatctaacaaatataatttgaaagaagttcatttacattccttgttaaaattgtcattttccctcattgttcctatgccaagttttctattaaattagtgctaatctgcagaaatgaaata

SEQ ID NO: 99083 - DNA, 473 bp, Glycine max
  Clone ID: PAT_MRT3847_60486C.1
gcggaacaagaagcccatgggtcacgatcattgttcacagagattattgccgcagtctcagacataccctctgggaaggatggaatacctatacttaggcgcgattacatgaccttaagggtttgagagctctactatctcaaaatacatgctctatgtcaatgaaacttgctctgaggacttctggatggccttactctaatttgatagaattgaactcgatgaaacacgggtgtctggttggggcctcaatgataagatgcttacttacgctcaatgccaagactgatgtttgaataaatgctatttgatagaatccattggagctgggtgttgagaccgagacccaacatctgtctgaccaacattcttattatgaattgaacatacatgggacgttctattgtggatgcgcaggcatagcatgcgtgtcaagcattcgaggagcacacacttgacgagagtccatgtgc

SEQ ID NO: 99084 - DNA, 574 bp, Glycine max
  unsure (1)..(574): unsure at all n locations
  Clone ID: PAT_MRT3847_60487C.1
ccgtccggccgctattatatatatgttgtgataggctctcacctcataaatagtaccaagcatatgcctttgaagagtcccatactctcgaaattaataatagcagcactcctgatatcagcgctagatgtttgaagcgaacaagcatgagggcaattagacagcgcaggaaattgttgtgcaaattctgacaaaagaatactgtcatcatgatatgcgtgggtatctgggaatgcatgaattggggagcagtgatggctgctattacaaacacagtgcacactgataacattgatattgtctggtgctctaattgatagctgcaagagatcactgatagatgatagcttctgacactcttaattcagctaaagatcataaataattactgcgtgtctattttaaaatcaagcagacgtcgctacaggataacatgaagagaatataggcagcgtgaactggtaataatnttcataatgtaactttgaatgaggcggacgttcgtaatgatgcaagattacatactcaggcatgcgacaatatatccttcctatagaggcacctaaattcaatt

SEQ ID NO: 99085 - DNA, 1511 bp, Glycine max
  Clone ID: PAT_MRT3847_60488C.1
ccacgtaaggctaacgtactttcaaaaggaggtcagtctaacacactcgggccttttctttctttgtaatatacaccgtagaatgatccaaagaaaaatctaggtgaaccaaaacaactcatttttatccctaaagaaacaaagttcaatcatcactcacaagtggcaaatgttagaggacaaagccttatatgcaagatctatttcttgttcagtcatctcaattgtctcatcactatcatactcaactgcaccagaagacatggcatttgttcttctagttttgctcctctgttctttatttacctttgaattcgttttcctttcatgatctaaaccatttagttcctcctcataaatacgtttacaatccaaagcccgtctttgaagatcttcctttaacaatgagcccttgtttcctactacatcaaactttgcaagctcctcaacaacacgaggtaagaacatccagtcctcagttcctttccggatgtcctgtttttcctctagagaacatattgcatcttgcaaacaagttagaatcccctctgcagctatttttgtcaactcacctggatcaggcttttcttcttgactttccagccactgaattgttttattcaaatcatcaatggcccactttttcacttccgaaggctcaaagcatttcctagcaacatcagtgtcttttccctttgattttatggaggcagttgatgctgaaggctgttctctttcaacgtgcttcaataattttttgggtacagatggtttcttatcttcatttacttcaagtgatccatttcctttgcgccatggtttcccagcatgtaaaaggtaactgtcaatttcaatcagcttcctctgtgtgtaacactctattatccaatccttgaagagtatggttccacaatcagcttcaacttgtctaaacttaggggtatttggaaaagcacaaaccaagagagtgcaatcagagttccaatcaggcttatattctgctcccatttccatagctcgtgacctcaacatgcccctctccggattcacaaaccctggaagcacaaaaaccaccccttcctgtccacaaaccattaatgagctaaatcaacattcaacaacaatgcaagcaaaacgaaaaacccacaagggcacctgagttgttccttataaaccaagtaccagaagcttgttgaagcttttagattccaaacatgaggcggaagattttccaccattttgattttggactttgctcttgttgggtgtctcggcttcaccgaatttctcacctttgccatccaaatttggtttctttgcactgttttcgctctcattttcccttgcactcgtgcatgatggcaggctccgcttggaaccattgttgttggcacttcttccagtgtcggacatggtgagaactactacgtggagggtgccaaagtaccaaatttgaaactttttgctgctgcgtctccccttctgtcgtcttctcgcagccgtacttttcc

SEQ ID NO: 99086 - DNA, 700 bp, Glycine max
  unsure (1)..(700): unsure at all n locations
  Clone ID: PAT_MRT3847_60489C.1
aaacggtgaaagatatgggaagtgctcggttgaagaattttggcttcttgggcttgaactaataagccaaaaggttctttttgacttattccgtcangatgttcgtctgtggaaagcataccagcaccaccctggagtcacacccagcatttacagaatatcaagatttgctggaagacctggaagagagcctttcatcagttgcaaatgtggaaggaaaatgaaagtgaatatagatttcacatctggactgtggttacaaatttgtttcctgatgaaaaaaatctgatctggtggtttttgccttgcccacatatctgtctcatcgatatcatgtcacacgtaagaactatgcatcctttccattggatttgattgcggggaccagaataaacatatttgattgtggggaccagaataaacatatttgattgtggggaccagaatactatgttcatttgntgggttaaccatgatcttggtaacaaaacattttgtggtgctaatccgatgaatcaagaatagtaaatgtagatagaggttagaagtttctatagggaggcttgtgcatgtctgagaatttcattattcttttaacttttaattcacattttgtaacatgtgttttttgtaaaagcataaacagatccatctgtatatattagttatatgctgttgatcagcataacattcaaagttg

SEQ ID NO: 99087 - DNA, 182 bp, Glycine max
  Clone ID: PAT_MRT3847_6048C.1
atacgagcggctcgagcggctcgagcagctcgacaggctcgagacggctagcgataagacgacagaagacatgggtattatgctattactgattcgttgatcattgtattacgtattagggttgggggataattcataaagtaatcttacgtataaataatgtatacttgattaggactcaa

SEQ ID NO: 99088 - DNA, 418 bp, Glycine max
  Clone ID: PAT_MRT3847_60490C.1
ggatcgagcacacttagtccattcattcacagagaactctctaatcttaattctggataacgggcaccaccctttgcttggttcttcaagatcaacttgtacaacttgtaagacacctgaagcatttgcataccatctagctccgaaggcccatgattgtggcgggctgtagatcagatggaaccgcagacctaatgacttccaacactctcattactacggatcattgtcatcatcatatggggcacaccacttgctccttctaatcgaccgaccatttttgccgattcgtggtggatcactcaatgtcgaagccgagactacagcggagcgcaagagctgaccgatgcatctgaggcacgaaaacatgtgttggctgaagacgacagcggcgtagatgaggaaacgtcagtgagag

SEQ ID NO: 99089 - DNA, 614 bp, Glycine max
  Clone ID: PAT_MRT3847_60491C.1
gcacgaggatttgctggaagacctggaagagagcctttcatcagttgcaaatgtggaaggaaaatgaaagtgaatatagatttcacatctggactgtggttacaaatttgtttcctgatgaaaaaaatctgatctggtggtttttgccttgcccacatatctgtctcatcgatcatgtcacacgtaagaactatgcatcctttccattggatttgattgcggggaccagaataaacatatttgattgtggggaccagaatactatgttcatttgctgggttaaccatgatcttggtaacaaaacattttgtggtgctaatccgatgaatcaagaatagtaaatgtagatagaggttagaagtttctatagggaggcttgtgcatgtctgagaatttcattattcttttaacttttaattcacattttgtaacatgtgttttttgtaaaagcataaacagatccatctgtatatattagttatatgctgttgatcagcataacattcaaagttgaatttatgtaccttgtttttctcccttaatggagcatgtcatagactttgttcctgttgtgcatgcttacttgtgccctccggttaaggaattaatagtag

SEQ ID NO: 99090 - DNA, 1615 bp, Glycine max
  Clone ID: PAT_MRT3847_60492C.1
atttccagcatgtgctgaattttcatgttctgaaccatctcctcaagcacgaacaatactgcactgcctactccgccatcttcttcagagggacaaaattgaggaagctttaaggctggcagagctatcagctgagaagcctcatttttcacattgtctagagtggcttctttttacagtatttgaagcagatatatccaggccaaatgtgaacaagaaccagatctcagttgttgaacatgctaaaaggtctcttttagagaagacctgtgacctgatcaggaattttccggagtaccttgacgttgttgtaagtgttgcaagaaaaactgatggtcggcattgggcagatttgttcactgctgctggaagatcaacagaattgtttgaggaatgctttcaacgtagatggtatcgcactgcagcttgctatatacttgtgattgccaaacttgaaggtcctgctgtcagtcagtactgtgcattacgattactacaggcaacacttgatgaatcattgtacgagcttgctggggagctggtgcggttcttgctaagatctggtagggaatatgaccaagcatcaaatgattcagataaattgtctcccagatttttaggctattttctttttcgttctagtgagcagaagcaatcactggataaaagcacctcattcaaagaacaaagtgctcatgttacctctgttaagaatattttagaaaaccatgctagttacctgatgtctgggaaagagctctccaagcttgttgcatttgtaaaaggaactcagtttgatttagtggagtatctacaacgtgaaagatatggaagtgctcggttggagaattttgcttctgggcttgaactaataagccaaaagcttcaaatgggaacattacagagccgtttggatgctgactttctcctatctcatatgtgctctgttaagtttaaggaatggatagttgtcctggctactctcttaagacgttctgaggttctttttgacttattccgtcatgatgttcgtctgtggaaagcatacagcaccaccctggagtcacacccagcatttacagaatatcaagatttgctggaagacctggaagagagactttcatcagttgcaaatgtagaaggaaaatgaaagtgaatatagatttcacatctggactgtggtacacatttgtttcctgatgaagaaatctgattgggtggttttcgccttgcccacatatcagtctcatcgatcatgtcacacgtaaggactatgcatcctttccattggatttgattgcggggaccagaataaacgtatttgattgtgggaaccagaatactatgttcatttgctggtttaccatgatcttggtaacattttgtggtgctaatccaatgaatccagaatagtaaatgtagatagaggttagaagtttctacaggggaggcttgtgcatgtctgagaatttcattattcttttaacttttaattcacattttgtaacatgtgttttttataaaagcataaacagatccatctgtatatattagttatatgctgttgatcagcctaacattcaaagtgaaatttatgcacttgttttttctccat

SEQ ID NO: 99091 - DNA, 359 bp, Glycine max
  Clone ID: PAT_MRT3847_60493C.1
aaaaaaaacacacttgtaaatccattatttagaacatatagttcactgtattagcataaactttatgtactcaataatggatgtacaagtgaacttttttagaccgacatacagtagttgctatgatcatgcatgcatgaccagaacacactgaaattctcacagcacttgcaagggggaataatccaagtattaatttgtgccgcacctggacacatattgtcatatatataacagacagtggtactaacctccaaatacaaagtaataattatagttaaagcacgaacaatccaatcgcttgtctaagaaggcgaatgaagaaaactatattgggtgtgatgagctgcgggcaatta

SEQ ID NO: 99092 - DNA, 420 bp, Glycine max
  Clone ID: PAT_MRT3847_60494C.1
tgctggctgcagataacttgtgttgcatccagtttatggtgcctattgtttttgcctaactccaggttaaggaagaagttgaagccgccctaaagaggcatttaaccagcatgaaacagacctgtggaaaggagttccatactactgaattaagaaatttgcagctgcagtttgaaaacagcatttgtcttcctgtctttacaggagctcgaattgaaggagaggatggctccaacttaagaataagtttagttgatgccctaacagggaaggttgttagtacaggacctgaatcgacagctaaggtggaaattgtagtccttgagggtgattttgaagaggaaagtgaaactcggttgcctgaagagttcaagagcaatatttgtgagagagagggaaggaaaaatgccccttcttaca

SEQ ID NO: 99093 - DNA, 466 bp, Glycine max
  Clone ID: PAT_MRT3847_60495C.1
cgttttgtggggagggtgatgtccaacgcgtccgggagctttttgatgagatgttgatgaggaaggttagtcccaatgtggttacatacagctgtttgatgcagggtcttggcaagaccgggcggtgactcaaggcttctgagatgttgaaggacacgatggatgagaacagaggacgaggctaaggtgttggatttgatggtgcaggagggggaggagccgggtactttgacatacaatgttgttgtgaatgggctttgtaaggaggatcgggtggatgatgcacttagggttgtggaaatgatggcgaagaaggggaagaaacccgatgtggttacgtataatacgttattgaaagggctgtgtggagctgctaaaattgatgaggcgatggaactttggaagctgttgttgaatgagaagttccatgtgaagctggatgtcttcacgtttaataatttaattc

SEQ ID NO: 99094 - DNA, 390 bp, Glycine max
  Clone ID: PAT_MRT3847_60496C.1
cccactcgtcctaaaaaaaaatatatataatacacaaaaaaaaaaactcaaacacgaaaaattaaaaaattctccacaaaccccacacctctcttctatcccaaatcctatctatccctccctaacaactctatccacctcaaccctctatccactcgcccttctctctacctcacgctcccctcacacactcgcctctccttagtcttcaaagcctccttcatctagcttccactacttgtaaacacctcaccagatttctaatcacaagctgcctttgaccaggattttatcaacgtctaactatctgattacattctcaaaaaatttgtttagctcttcttctacccgtttgacttcactttttgttgtcccacataaatcacttct

SEQ ID NO: 99095 - DNA, 2454 bp, Glycine max
  Clone ID: PAT_MRT3847_60497C.1
ggtatacggtgatattggtacatcaccactttatgtgtatgcaagcaccttcactaaaaaaattaacaacaatgatgacattcttggcgtcttgtctctcatcatctataccattgtgctcataccttttcttaaatatgtcttcatcgtattgtgggccaacgacaacggcaacggtggagcgtttgcactctattcgctaatctgtaggcatataaagatgagtttgattccaaatcaagaaccagaggacagggagctttctaactacaaacttgaaacaccgtctactgagtttaaacgagcccagaaactaaagcagaagcttgagggcagtcatgttgcgcgggttgtgcttattcttctagctatagtgggaacttccatggtcataggagacgggattcttacaccgtcaatctcagtcctttctgcggtaagtgggatcagtacatctttaggtcaagatgctgttgtggggatcactatagcaatcttggcagtcctattttatgtgcaacgatttggtacagataaagtggggttcgcattcgctccaataattttggtgtggtttttattcattggtggaattggcctttacaatttatttaaatatgacattggcgtattacgtgcttttaatccaaaatatatatatgattacttcaaacggaacggcaaggaaggatggatatcacttggtggagtctttttgtgcataacaggatccgaggccatgtttgctgacttgggtcactttaatgtacgatccattcaaattagcttttcttgcatcacatttcctgcaatagtggctgcatatattgggcaagcagcatttctacggaagttccctgagaaagtggccaatactttctatgatagtataccggatcccttatattggccaacatttgttgttgctgttgctgctgccattatagctagccaggcaatgatttcgggagcattctctattatatctcaggccctaagtctaggttgtttcccaagagttagggtagtgcacacttccattaaacatcagggtcaggtgtatattcctgaggtcaactacatgttcatgattgcatgtattgtggtctgtgctgccttcaagaccacagaaaagattagccatgcatatgggattgcagttattggtgatatgatgatcacaacaacactagtttcgctaataatgcttgttttgtggaaaaagagtctgtggcgagtgggtctgttctttttgggattcggtttcgttgagattgtttatttctcttctcaactaaccaagtttacaggaggagggtatcttccaatagtatcagctatgttcttgacggcagtgatgggaatctggcattatgtgcacaaagaaagatacatgtgtgaattgaaaaacaaggtttcgagtgcgtatttgaatgaactggccaacaacccagacgtaaggagagtgcccggaataggacttctgtactcagagctagtacaaggcattcctcccatattccaacacttaatagacaacataccatctatccattcaattattgtgtttgtctccatcaaggcaattcctgttagtagagttgcatcagaggagcgctttttgtttcggcaggtggagccgagagattacagagtttttcgttgtgttgtgaggcatggttacaatgacgtgcttgaggatcctgcagagtttgagtcacacttgatacaaaatctcaaggcattcgttcaacatgagaactatatgctcgaggttgatggaactgaacacgcatcagctgagactgagatgatagcagcagtaggtaagggttcttccaacagaataatcccagatcaagctgcagcctcatccgactccattcgatcattgggggccagtgcgaccaagtcatcctctttcatttccccacccatccagggagctgaagacgaaatcaaattcatagacaaagcattggagaagggcgtcgtctatatgctagcagaagcagaggtagttgctcacccatcttcctccatcttgaataagattgttgtcaactatgtttatagcttcttcagaaagaactttagacaaggccagaattccatggcaatccaacgcaacagacttctcaaggttggaatgacttatgaaatatgacctcgatttccagtagtttcactgtccatacataaaaataaagaaatatgtactttgcttgaattttgtatcttttccaccaaatcatgcaagttataagttatgttcaagaaaaagccttcgctccaataagccttcaaaactttccaaaatataagcaatcccaatgcccaacatcatcggagtcggagctagacactttcacagaaagtgccaactttgaatcatttatgtgtattgatactttttttattttttaaactaaacaaagctcatttcattgcatt

SEQ ID NO: 99096 - DNA, 151 bp, Glycine max
  Clone ID: PAT_MRT3847_60498C.1
cagcagctgcaacggcggtggctgcggaagggcgaggcacagggagtggttaaagaaccactccgtcggaatcggaggccacacactcgacggctgctgcgagttcatggcggcggtgatggagggtacgcatgacgctccgaaatgcgcc

SEQ ID NO: 99097 - DNA, 1892 bp, Glycine max
  Clone ID: PAT_MRT3847_60499C.1
agctggtaccgccctgctaggtacccgtgtccggaactttcccggtgtcgactctcacgccgtccgccattttgtttctacttgtccagcggagagtccggaattcccgagatcgacccacgaattcggctcgagtcacggctgcgaaaagacgacagtgcaggcgaaaaggggagtgctgtgcgtcacatctaatgtcttagtttctgtgatctaatctaaattttcacgcaaacagaagaaaagtcaacgcggcacgaatcgcgatctttccttctttctttctttcgttccttcacaatcctacctgccgccaagccgcagagtcaacttgttatacaaatgcccacccaatccattttcactataaaatcttctaccacgagcacgtgcctgctggcctcaccgatgattggaaggacatcactccattccagaatgcttcgttacctgttggtgttcttcttattgggcttgggaacccgggtggagtcacacgaggaatcgggtcattggagctgcgagtccgagtcggagatccgagtcgagactgagttcaaacccggtgtaatcacactggatggtcacgctgatgattggaaggacattgatgggtcctactttcccctccttcccgcccttgacccagatgctgaaaatgaattcaaagggggaaagatgagcgttaaaagtgtccatgatggccgcgatatcttctttctgctgcaagtagatggtgactatgcctactctaaaggtgaaagcaataaatgtccatctgttgctctcatgtttcaaattggagatagtgcctcttatcatgatatgggtggctgtaaagaacattcgacctcatgcactgacaagacctgcaaaggtcatgaagttgacattatgcacttttcgataggaagtgctattccaggacgactttacggtggcaatcccctagacaatagagatgggaatggtggcgataggtttggtcacttggttgatctatatgcttggaatccacattgtagatacttggatggaattggtcctccaggttctgctaatgattcaagtgcgcagaatgactggaaaggtgcttggtggcatagcagcttcacagttcactcaggattcgtagaggatgagagtccatatgcagataatggaaaaaagggcacatacttttttgaattctcgaggtctttgaggactatggatcatcttcaacaggacgtgcaatttaacattggtggatccagtaagatgtctgttgcattctggtatccagtagatggtcaaccttggcatggttctgggcactactctgtttactgtgattgggttcccattgacatatctgttggtaaatctttgaatggcaagtcagtagatgcagcatcaaatagctcgtggaatgttgctagtgccttttctgttatactatcagtagcagcactttgtgtgtctgtttttgtgagctatagggtgttcagccccaagagtgtctcttttacaccgatagagaacaacaacctttaaatattgaaccaagagcttgagtttgggattgtactattcatttcgcttgtactagataggtttgtactgtttagtgctttctctttgctctatttttttattataactaaagcattactttagttattttaagcagtgtcagaaaagtattaattcattatcaacattatggagttccatcctctttggcttagttattgcaattgcagtaccgtttgccttcattcatttcaaaatggaacttgagttgcaatccggcgaaagagaggaagattttgagtattaatataaataaattgagacaaattgatagcaaaaaaaaaaaaaaaaaaaaactcgagactagttctctctcc

SEQ ID NO: 99098 - DNA, 177 bp, Glycine max
  Clone ID: PAT_MRT3847_6049C.1
tgaaaaaaaaaaaaaacaaaaaaaaatataatataaaaaaaaaataaaaaaaaaaaacaggcgacgtggccttatagtggaaaggaatacatcgattacaaacataaacgcttaaagccaaacatgcgttctttggggggctcggtctcaaggacgccgttgctcccccgaaatttt

SEQ ID NO: 99099 - DNA, 256 bp, Glycine max
  unsure (1)..(256): unsure at all n locations
  Clone ID: PAT_MRT3847_604C.1
gcgagcgccgccctttngggttttttttttttttttttttttcttttttttttttttttggttgggttttttttttttttggtttgttttttttctgggtcttggtttttttcttcccagatcaaaggttggtcatcactacttcttaaaggaggggggacaggatgaacatgaaaccccctttattttgccatgcggcaccaaaacgagcctgtcctatatatgtccccccctcctgacgaaaaaaaaatggggg

SEQ ID NO: 99100 - DNA, 373 bp, Glycine max
  Clone ID: PAT_MRT3847_60500C.1
ccctcttgttcgtgggtttacaaggagcaggttgagcttttgcaaacaagattgtttttaacgataagctcgggttggctaacacacatgaattctttgatgggaaccatccaggggactcttgggtacccatttttgtgaattgtctttatcctgttagagaatgaccttcagaagctggcgttgtaaatgatacatgtggtagcggacgtggtggtttacacaccactgcttggattagttctgcaggagacaattgctgctcagacattaacagaaagatgagcgcagcacttgggaaaggcctgaaaactgatcctcttactagagaggatccttctacaggagccttagtggttgatcttcttggcga

SEQ ID NO: 99101 - DNA, 324 bp, Glycine max
  unsure (1)..(324): unsure at all n locations
  Clone ID: PAT_MRT3847_60501C.1
catgcgtcagctatctcgatcgaactgtccaaggtcctgtcaccacacagttagtcagtaaggaagggttaagccttcagtactgtattgatgaatacagtgtgcacggtaaccaacttgggacttgtggtcataaccatcctcagccggcgaggattattaaccaagtggcccatgcgcagcatcngtctggcgcctacaatttaatgcaccgtgcactgcatacgatagcagaaagcaccgggcagcgtgcagcccaagccgattaggcagggtttacaaggttgtaagtgtagcctctgtacgagcaaacatatgcgaggt

SEQ ID NO: 99102 - DNA, 464 bp, Glycine max
  Clone ID: PAT_MRT3847_60502C.1
ttttccggatttatacataatctaccacacatgggtatgcgttatttgcttacggagaaacaaaacattttcttatattggctcgctcaaggatgccgatgtaatcgggagcaaagagagagtgaatggtccaaattattatacgacagctgatacattgttgggggtgaacactataaaactggttgtttgacggaagaagaatagatggaagggattagaaatagaggcattcctgctgatggtcttgcaaagcgagctcatgaatttgaaaaacatgttggtcatgaaagtttcaaggatcaaattcctgctggtgacaagttgtattctactaaggtgaatcagtttgcaaaaattatgaacctcagacaaagttgttgatggagatcataaacttcttactgatgggaagttgaatgacggtgagcatatttctgtatctaacactagggcaggggaaa

SEQ ID NO: 99103 - DNA, 490 bp, Glycine max
  Clone ID: PAT_MRT3847_60503C.1
attacaaacctctttgaaaaatttccaaacccagatgatgttagtgaagcagacattggagatcttcaggcattctataaggcttcaaaagtgaggtttgatagtgatcctgagtttaagttgagggcacagcaggcagttgtccgcctccagagtggagaaatcaagtatcgcaaggcatggaaacaaatttgtgatgttagtagggctgaatttgataaagtctatcaacgccttggagttcaattggaggaaaggggagagagcttctataatccatatattcctggggttctggagaaactagataatttaggactgattgaagagagtgatggcgcgcgtgtgatttatgttgagggtgtagacataccacttattgctgtgaaaagagatggtggatacaactattttacaactgatctagcatcactttggtatcgtctaaatgaagaaaaacttgagtggattgtatatgttacagatattg

SEQ ID NO: 99104 - DNA, 309 bp, Glycine max
  Clone ID: PAT_MRT3847_60504C.1
ctttgcgtggatcatttggcctgaccttgtcattgttggatccttgatcgtgacgtgtgagtgtgtcatgaaaacaagatactgaagcctaatatcacgttggtgtccacaggaacaatgagctaacgcatacttcaatcgctgtatacttgactcattgcggatggaactcacctactgaaggtgtttgtgctggactgccaatgttgtgttggccattttgtgcagaacagccaacacactgtagatacatttgcaatgagtgggaaattgggatggatattgacaccagtgcgaagagaaggaggt

SEQ ID NO: 99105 - DNA, 756 bp, Glycine max
  unsure (1)..(756): unsure at all n locations
  Clone ID: PAT_MRT3847_60505C.1
aaaggaaatgcatgttggccacctgagatctaccacttatcggtgatacattagctcgtatgcttgaattttcacgtgtagagtgtgtaatccgtagaaatcatgttggtgactggggaacacagtttgggatgctgattacaaacctctttgaaaaatttccaaacccagatgatgttagtgaagcagacattggagatcttcagaaagaagaaataaatgggatgccagagatgtggatacaagcttcagaagcacatagccttcatttaagtagaagtgaaacaaagaatatcaaatgcattctataaggcttcaaaagtgaggtttgatagtgatcctgagtttaagttgagggcacagcaggcagttgtccgcctccagagtggagaaatcaagtatcgcaaggcatggaaacaaatttgtgatgttagtagggctgaatttgataaagtctattcaacgccttggagttcaattggaggaaaggggagagagcttctataatccatatatntcctggggttctggagaaactagataatttaggactgattgaagagagtgatggcgcgcgtgtgatttatgttngagggtgtagacataccacttnattgctgtgaaaagagatgggtggatacaactattttacaactgatctagcatcacttttggtatcgtctaaatgaagaaaaacttgagtgggatgtaatatgttacagatattgggcagcagcaacactttgatatgctatt

SEQ ID NO: 99106 - DNA, 185 bp, Glycine max
  Clone ID: PAT_MRT3847_60506C.1
aacacgcgtgcgggggcgggttattttggcggttacacgggtacacacccggggcatgagagacagagagagattggggtatgaggatcaacagcgagcgtgacgtgctcgagcgcttggttctctggagcgtgtatgggtggtggcggaccggactgctggcaattacccgccggagcaccatt

SEQ ID NO: 99107 - DNA, 254 bp, Glycine max
  unsure (1)..(254): unsure at all n locations
  Clone ID: PAT_MRT3847_60507C.1
ataccagaaggtacctctagaacttcgtgatatgtcatcactgagtgatggtgggatgcgtagatccagacgatgtggttctgcgagacgangtggacatggtgatactggatatggtggtaggactaatgactctggatattgtgtaagaggtaatgatgcaggatatagtggcataagcagtgattctaattatcgagggactgagactgctgcttctagcagacgtggaggctgtgggattgaccatgact

SEQ ID NO: 99108 - DNA, 293 bp, Glycine max
  Clone ID: PAT_MRT3847_60508C.1
accaaggcctttctaaccgtctcccaagctagatttctcaaccatctctaaatctctgctgctatcatcttcatattgcattacaaaagggtttgacaagctcaaagctgcagcggctgcaacagcatatgccagaagcatatttggattacatttatgctcatgccttgtatttttaatgacagtgagaagcattctagaatgacgaggactcaagggataatgtgccatggcttttcctaaaagtgtaagttcatccttgttatcaagtgcttcaagagctttcaagcaat

SEQ ID NO: 99109 - DNA, 197 bp, Glycine max
  Clone ID: PAT_MRT3847_60509C.1
aaagttatgggctttatactttattgtttatttgaaatgttaaaattattatgaaaatttaatgctaatttaacaagcacaaaagcgttaccaaaaaccatatcccaaccgccagcgaacagccgaaatcacttgcatacctgcacgactgcagtcacaagaagagcagggtgaaccaccgcccatacctacaatga

SEQ ID NO: 99110 - DNA, 418 bp, Glycine max
  Clone ID: PAT_MRT3847_6050C.1
ggcctacgtgtttggacatgccaaacaaaaagcttcatactgaggaggtgctattggcgggcacctttttgatgcaggccatacattctacctgctgaaggatgttcccgggattgactcaaataacattgatgtggcactttctgaggcttataacccattgaacatcttggagtacaagtccatttttcggaatgtacaccacggtgggcctgctaatttagacccagaatatcagaagctgggtcacaaacctgttgagaagaaggccactcgagatgagctaagtgaatatggtaacatgcaaagtgctcgtgaacttcttatctgggatgaaaagatgaggaaataatctgcaaatgtacctaaaagcacaagctaaggacttgaatggggggggttgttcgggtttaggcat

SEQ ID NO: 99111 - DNA, 822 bp, Glycine max
  Clone ID: PAT_MRT3847_60510C.1
tccaaaatttctgcccaccaaaaacaagcatcccaaactgctctatcatcgtagaaagtgattttcatagtcatagatcattttctgcacatttctgcaggatgaagttgatcctgcaagcttattagacatacctaggctttgctaagttaatgctgttatggcttttgaaaatggttccaaaaaggagcttcagaaagttggtctaaaaatctccaagagctttcctcttactaggactactctggcatctatggagtctttgtccctgccagtggttcaggaaattgttctttctgctgatatgcaatgtgagaagtgccagaagagggttgctgatattattactaaaatgaatgcagagaccgagtcagtggtggtgaatgtgttggaaaagaaggtggtacttacttttagattaccaactattggtaaagtaatctcacagcaaattactcctgtccctaaagttgccattattagacggatatttcgatcttcacggagttaacaatgacttacaacggatccacacgtgcataagattcggtaaactgattattcaatgtacagctgaaagtgtatttgtattcatttgaatttgttttgtaattgccttctgaattagccactccaagtgtccaagtgattttacgtctgtttattttaaaggaaaatagaattaattttgacaaaaaataagtttgaggaatgtgtaaccaaattaatcttttgaaaagtaagtgtattaaaatgtgtgcggtgagacaaattgatgccaagcaggcatgggattatgtattaaacaataatttctttcca

SEQ ID NO: 99112 - DNA, 341 bp, Glycine max
  Clone ID: PAT_MRT3847_60511C.1
ctcgagggaagatgccaacgacttgacatgaagaccaaacccataaaagccttatccggcatagtgaagcgctcaacctgaaagcatatcaaacagagctcgaataatgggatgtacaccccaatgctttggatcattctaaagcacaaaatctaggcgcaatggcacaacattaccaccatcgaattgcaagagacaggaaggagcaacctacggtgcgctgtatctgaccaggatcactccggaacagtggaacttagcactggttcacatgaagtacaggctaaaccctagaagcaaataaacgtgagccctaaaaagaaagcaactatttgaccgta

SEQ ID NO: 99113 - DNA, 330 bp, Glycine max
  unsure (1)..(330): unsure at all n locations
  Clone ID: PAT_MRT3847_60512C.1
actgcataaatttaagagaaatgtcttaatacatattggcccacccacacccccttacannttattatcttctctcnaactccttccnttacaattaaatttataatgtaatgctctctcaattttacgagaattgtgttgttaaaggagcagttgatgttgacatttttgcaaacccttctgctgatggtggagaatattagggagtccatgacgcaactgttaagtttgtttacatttttgatacattcagacttcatgatcaacccgctttttataaaaaacattttgttaccttcattaagaagtttatcaaaaattttactccca

SEQ ID NO: 99114 - DNA, 282 bp, Glycine max
  Clone ID: PAT_MRT3847_60513C.1
tttttgtgttttttttttttttttttttttcgccaaaaaacttccaattattcttagaaatggaaataataaaaacttaattaggctttggtccaaagtttaatacatagaaaatggccataaccgttgtaatcatgctcaattactttaaggtccatgaacagatagttaagaactacttgaaatttaaaacccgtggcatatatatcaggagtgagctggggaaggattcagaacaatgtttcacccgtcttgcttcttttcctaccatagccgggaacg

SEQ ID NO: 99115 - DNA, 816 bp, Glycine max
  Clone ID: PAT_MRT3847_60514C.1
aacaggaaatacctggcaccgcacatttgcctactttatagtattttgcaatttgcacgaactggaaagctatagtttcctttccacattggcaaatattttcaaaaagaaaattggcatcggtgtatcagtgtatggaaaatgaaaatctagagataagtgaactggattaacgagatggtcttggcttcatataaacatgtaagcatagtttatagaaatttcgttgatttgcgttcagttcaactccagtacaagctttgtttcaggattgctcaggttcaggtatttgttaaagagccaccttgaagtgtttagtgcatctccactactttccactgggaaaatattcctacgcttttgccattcattaattggagggagtagccgagtagcacggtatcaactgtttttcataccatagtcacgaagcagactggcttcttcatctgagttgtcaaaccacatggtgatttgtgttctagcattccactcaaactgtaaatgttacatcaatagaagtataagacagatggattgaaaaatatgcaccaatgatattaaagtatatcaaacctgtctctcctgttcttcatttagagctagttgctttgcgctttctaaccaaggtcccagaagaaaaccatcatggcaagccaatagtgtgtccaaatcttccactaggtccagaaatctctggctgaggagggtcattccatggatatcatgtgattgatatgcctctatgaccttaaagaacaattcattagcatattttgcccagatttgtctagtcagatcaactaggtcatacct

SEQ ID NO: 99116 - DNA, 228 bp, Glycine max
  Clone ID: PAT_MRT3847_60515C.1
aatcaagaaggggcaacgggaatactttcataggaaaaaatgttcctggaaaagggcaacaaagatgacaacatgggtaactcctgaagcgaaccgaaaaagtcaaggtgttcgcttggggaagcaaacaagttcttgagctgtgcaaaacaaagaggcaatgtctttattaagaaagccattcaaggggggggtggcgcgccgggtttaaatctgaaaggatcttaa

SEQ ID NO: 99117 - DNA, 665 bp, Glycine max
  unsure (1)..(665): unsure at all n locations
  Clone ID: PAT_MRT3847_60516C.1
gttctttacactcacgagatcttgctcttttctgtcaaaaagcaaaaataataaattttctgaaagtgcactaactcatctttttgtatacgatacatatctgcttgtgggtgtttatctgttccgcttctgcacaacaccgacccctcaacctttccctttataatccctccttgaattttgtgcaaccaactcgagccgttccttcccaattgggttgcttctcatacacacgcccacacaccattttttcacttcccattatgattctatagccttttaatgttttttttatcgataaatgttaattttactaatttttgtttgtaagaaatttaaacccgtcacatctctccttttctctggcctcttatataaccttgactttgttccctttcgtttagcaaacactaagttattatggattcgaattcgcgttaccatgttcagcagcaacaccaacaacccaattctgggttacttcgatttcgctctgcccctaccgcgaatttcaaacaacaaggcgaagttgctgccaatactaatgggaacgcatgggagggctctgaaccatttttgagattcttgaattccggngacacccacgatacgacgtcgtcgcctaccttacgagaattcgtggataataaagtttctaataatag

SEQ ID NO: 99118 - DNA, 238 bp, Glycine max
  Clone ID: PAT_MRT3847_60517C.1
tctcgagccgaatcggctcgagcggctcgagtacggctgcgagaaagcgacagaaaacaaacactaaaaaaaaaaaaaaaacaggggccgcacattattaaactcgtgacccggggatttatttccggacgggaacctcgaggggtacactttttccctaaagggggtctttttaaaccttggtagaacaagggcaaaaccgtttcccggtggaaaatttttacccgccaaaatttcc

SEQ ID NO: 99119 - DNA, 143 bp, Glycine max
  Clone ID: PAT_MRT3847_60518C.1
gctcgaggtactgcaggacgaaatcctttctatatttacttgatatgactagctgtggcattgagctggcccggctagaatgtgaatacttctttaatcaaatgaggtagatggacagagagtgtgaagagtgcactggcagg

SEQ ID NO: 99120 - DNA, 526 bp, Glycine max
  Clone ID: PAT_MRT3847_60519C.1
agtgtggagcacagagtgatagtaatttcagataaagagagagtctctcttgcgtttttctacaaccccaaaagtgacatacccatagaaccaataaaagagcttgtaacaccgaaaaggccctcactctacccagcaatgaccttcgatgaatacagactcttcattagaatgagaggacctcgaggcaaatctcaaattgaatctttaaagtctcccagatgatccattctctcataggcttttattgcttacattttatgtccatcaaatagtaagtcactattatcgtgattggtttcacatttatacaacatgtttggatgtaattttaagaaattaatagttatatatgatttttatgtctgaattgtattttcttacttctcaagagtttacaagcacgctataccttattgatgtataattaattgtaaatcctgtaactaaatcgggatttgtttgcgcattgagccacagagtaaggatatgtaatggtgattggatacttacatgtgatgtttac

SEQ ID NO: 99121 - DNA, 771 bp, Glycine max
  Clone ID: PAT_MRT3847_6051C.1
gacacccaataatttctccatcctcaacggaagtacgagtttctacaaagcaaaaacctgaatacggctgcgagaagacgacagaaggggatcgcagcacgctctttcatctctcactcatggcaacaacactcatgtttttccgaccaaccatgatccgggcctccgctggttctcccgccaagcccgacccgagaaacaggaagcccgtttcctccaactggtgggctcctctgttcggatggcccgcggatccggactacatgggcccattgcagaaggcgagtgagaaatcggatccggagcgggaagtgggcctggacctgggccggcccagatccaagttcacagcggggtgcttcacggagaagaaggcgaaagagctgagaaagaagaccgtggaaacgtcgacgtttcatgacatcatgtaccactccgctattgcatccagactcgcgtccgatgtttccaaagggtacgagaaataaatgtttggttttaattaatgttttttctacccttagactcagactcactcatcgttgtatttcgctttaatttctttcaactatgaactattggcctgttcatgatttgggactcattgtaattaatctatgtgcgtgatttgtctccttgtgttctaaaaaaaaaaaaaaaaaaaaaaaaaaaaaaaaaaaaaaaaaaaaaaaaaaaaaaaaaaaaaaaaaaaaaaaaaaaaaaaaaaaaaaaaaaaaaaaaaaaaaaaaaaaaaaaaaaaaaagaaggggg

SEQ ID NO: 99122 - DNA, 468 bp, Glycine max
  unsure (1)..(468): unsure at all n locations
  Clone ID: PAT_MRT3847_60520C.1
gcgagaagacgacagaaggggcacagggtgcagcacactaaattgtgtgttattgctgcttcatttttatttctgtggataggtttggttggcaacttggcatgtagtagcatggaaagcttcatctagataattttattacctttatctaccttaaataaatgagctatctaggagttagggaagtgttatgaatatttggtttgtacgaaagcattacttactactgtgctagtacaaaaccactgaaccacctatttgtttttttcttggccgttgaagcaaacccaccttggttgagtgggtttgtgtacgttacatagtaagtgctagatgctgaattgcagataatgaatatatgggtcaattntagcttgagagatgagaaacatctcttncttctaaataaactgtgaattctgtaaccaaaaaataaaaactctggattctatgtctattggaatatta

SEQ ID NO: 99123 - DNA, 648 bp, Glycine max
  Clone ID: PAT_MRT3847_60521C.1
tcggcctctttcgcacatacccaaccctttaaatcaaaacctaagaatttgatatgagagagcgattgtgtttccgttagtatatataaacgaattgaagcgtatctactatcttacccttagacatggcaatatcatctagctagctagctagctagcaaatagcaatgttaaaaaaccaaccacaaccagattggcctgagcccattgtccgggttcagtccttatccgaaaactgcgaagattcaatccctgaaaggtacatcaagccttctactgatagaccatccataaaaagttgtaattttgatgatgccaatattccaatcatcgaccttgggggactatttggtgctgaccaacatgtctcagcctcaattcttaagcaaatctcagatgcttgcaaagaatggggcttcttccaagtcactaatcatggtgtcaaccctgatttgatggacaaggtcagggaaacttggcgtgaattctttcacatgcccatggaggtgaagcagcaatatgcaaactcgccaaaaacctatgaaggctacggaagcagacttggaattgagaaaggtgctattcttgattggagtgattactactttcttcactatcttcccttttcactcaaggactataacaaat

SEQ ID NO: 99124 - DNA, 1860 bp, Glycine max
  Clone ID: PAT_MRT3847_60522C.1
ggttcgagataaaatccaactcggcctctttcgcacatatacccaaccctttaaatcaaaacctaagaatttgatatgagagagcgattgtgtttccgttagtatatataaacgaattgaagcgtatctactatcttacccttaggctcaacaatatcatctagctagctagctagctagcaaatagcaaagaagaaactttgtatagcaaaaatgataaaaaccaatagctcccaagattgacctgtgccaatacacccttttccgtcaatatccgcaaggtgaacagattcaattcctgccaggagaatccaacaactccgcgttagataatctagtgatgatgttaaaaaaccaaacaacccaagattggcctgagcccattgtccgggttcagtccttatccgaaaactgcaaagattcaatccctgaaaggtacatcaagccttctactgatagaccatccataagaagttctaattttgatgatgccaatattccaatcatcgaccttggtggactgtttggtgctgaccaacgtgtctcagactcaattcttaggcaaatctcagaggcttgcaaagagtggggcttcttccaagtcactaaccatggtgttagccctgatttgatggacaaggctagggaaacttggcgtcaattctttcacatgcccatggaggtgaagcagcaatatgccaactcgccaaaaacctatgaagggtacggaagcagacttggaattgagaaaggtgctattcttgattggagtgattactattttcttcactatcttcccttgccactcaaggactataacaaatggcctgcctcgcctccctcttgcaggaaagtgtttgatgagtatgggagagagttagtgaagctatgtgggaggttgatgaaggctttgtcaataaaccttggattagatgaaaaaattcttcaaaatggttttgggggagaagacataggggcatgtctaagagtgaatttttaccctaaatgtccacggccagagttgacgttgggtttgtcatcacactcagaccctggaggaatgactatgttgcttccagatgatcaagttcctggtcttcaagttcgaaaatgtgataattggattaccgtgaagcctgcacgccatgcttttatcgtcaatatcggagaccaaattcaggttctaagcaatgcaatttacaagagtgtggagcacagagtgatagtaaattcagataaagagagagtttctctggcatttttctacaaccccaaaagtgatatacccattgagccaataaaagagctggtaacaccggaaaagccctcactctacccagcaatgaccttcgatgaatacagactcttcattagaatgagaggacctcgaggcaaatctcaagttgaatctttaaagtctcccagatgatcaattctgctcataggcttttattgcttgcattctatgtccatttcaaatagtaagtcactatatatgacgtgtttggtttcacgtctttacagcgtgcgtgcgtgtttagtttcacgtcttggatgtgattttttttacatcttagatgttattttaagaagttaatagttatatatagttttcatgtctgaaatgtgattccttacttctcaagagtttacaagcacgctataccttattggtgtataattaattgtaaatcttgtaactagatcgggatttgtttgcacattgagccacagagtaaggatatgtaagagagattggatatatagatatgatattgttttgaaaagctgttttctactttgctctgtaatgatggctaaatttgatggacaataaagattcttccaaggtgtgtcaat

SEQ ID NO: 99125 - DNA, 155 bp, Glycine max
  unsure (1)..(155): unsure at all n locations
  Clone ID: PAT_MRT3847_60523C.1
atcacgcgcccggagccacagaaaaaaacagggacagtttatgaaggaccgactgcaacacacccggagcaacgcccgcggaagacaacgagcacaccaaaccngaaaaggcagaacgaagaaccaccggggcgcccgccagaggcagaaggccc

SEQ ID NO: 99126 - DNA, 336 bp, Glycine max
  Clone ID: PAT_MRT3847_60524C.1
caatcaccgtgctctttatatagctgcttcgtactacaaacactgactagggtgatggagaccattttaagtatcactggttaacacacatcttcacagtaactcatatgataccactgaaactctgaaggatcgaacatgaatttgaaactgcgactcatgattcaagatatataacctatcaactttctatggtactatagactgcctaccatgctgttatacggttcgaagacaaattactgattctaatgatgagagacatcctgactaacacctaccacatacaatgcacgcaccaagtgctcagattacacaatactgacacgaggatgc

SEQ ID NO: 99127 - DNA, 701 bp, Glycine max
  Clone ID: PAT_MRT3847_60525C.1
aacatcacctttgtctctagaaaacaaatttccaaacagagaaggggcaacacaaaaatgaagaagggtctctcctttgtgctgctgctgatccttgtgatcatccactacaaggtagtcaacgccaacaacaacaactgtgttacagaggattgcctcattggtcatagtttggagtcagagttctcgtttggctcccatgtggcaagaatgctctatgatgtgagccaatctgtgtctggccaaacagggaatagcaacaatgctgctgttaattgtccagaaagcaatggttatcgtagctgcttgccatctcaaaacggtggtggccctaaccaaaattgcggtgattacaccaggacttgctaagaaatatattaccagcaggtatttcaattctgatttcaaggttgtcatattattgagattgtcataatctgaagatgcgtgtaataattgttgctgtcggttcatacttgtgttgtggatgtattattgtgtatcacatgtagtcttggttattaaatgttgataagaatagtattccattcgagatggaaaagtttgtgagaaatatattaccagcaggtatttctggaattttgttttctacacagtgaaattccagctgttattatcagttatgagattgtggcacataaaataaaatttgtgtattatataccgttttttctaaaaaa

SEQ ID NO: 99128 - DNA, 341 bp, Glycine max
  Clone ID: PAT_MRT3847_60526C.1
ggatcgatgacttctaggagcccttatttgggttcttagacaactggggtcaggaaaggtggcccaactgccattttgtaaaaggagaactcgctttaatgttttgactattaggaaccttccctgtgaactctttcatggaggtatggtgaacatcatatgtcatcatcactggtttgatcgctattatgataccattcttaaaagactggctttgcctgagaggctcactgactttttggccatgaacagattacttccccatagagatggacatttagcaatcaaagatacttaagatgtccttctcttggacatggctgaagatcttgagctgggct

SEQ ID NO: 99129 - DNA, 499 bp, Glycine max
  Clone ID: PAT_MRT3847_60527C.1
tcccaagcacgaacgccgctgggcgtccgacaccgtgccggagatggcattcgtcagcgccgggacttcgccgggaactgagtacaactccgtcaccgacgagtacgttgaggtcactctcgatgttcaagacgatcacaccatcgttctccgcgacgttgagccggtgactgtcgttaacgtcgacgacggcgtcgccacaagcggaaacgaaactccgacgtcctctgcgtggtcgccgtccatcaggaggagctctcccaaccggtggcggcagttctcgcaggagctgaaggccgaggcggttgcgaaggcgaggcagttttcgcaggagctcaaggcggagctgcggtggttctcgtggagccaaggcggatctgaagcggcgttggtagctcgagatctcaggaagcagcgcgctcagcttgaacgcaaccgttcggatacgaagaaagcgctccgtggactgaaatttattagcagtaaatccaatggcgtt

SEQ ID NO: 99130 - DNA, 487 bp, Glycine max
  Clone ID: PAT_MRT3847_60528C.1
aaaatatcacactcttttcactttttttcttttttttttttgaggaaaaaaaccccccctttacccattatttccttaataaaaggggggggcgtaattttctttatggcattaaatcctcaaacaaggggtcgagcccaatttttttttttgattcaaacaatcccacattttaaaaaaatctcagtttccacctgtggcacagaattcccttttttaaaaaattcccggcaatccctgaagaacaaaaaattcccaaaaaaaaattttaccctgtatactgattgggatggaaattcccgaaactcttttgccatctggtttcttttggccactcaaaactagaaatttcaaaacccttaataggacctcttccctctatagactccaccttttaaaaccattgtggggcccccttccctcccttggaaacatcaaaccccactaaggtggtgcctgtttgtaacaacacctggaccaaaaaggc

SEQ ID NO: 99131 - DNA, 629 bp, Glycine max
  unsure (1)..(629): unsure at all n locations
  Clone ID: PAT_MRT3847_60529C.1
gcgttcgggtgattctttgtattcgtcttcctgcaacgttaaggtatgaacgaatcactgatctaattaaatttcattgcagccactttggtgtttctgaacttgagcatctgagtgtgactgaccttatggaactagagaaactggttcattctgctctttcgcgaatcagatcagcaaaggttttacactctgttcattgaacgaatttcaatttattaagtgtaaactatacatcactcagctttggcaatgaaaatgaaaaaaaaaagctgttgttctaggaatgtcatgcaagcatatcttctttatcctctgggtttcttaaaacgaaaaaagcactttagatagcaaacatcatttgagttttgaacattgcantcaatgaaaaaaatcctgtagggatatttaccggagggaggattcatnntaaaatttctatgaaactattttatatcagtacttttaggaaactgntaaaaggacataaaacatttcttggaactctatctgataatttaagcttatacttttagtacaagtttatagcatttatattatatgccctagtaattaggcaatgtacacttgtcaagtcccaaagcagttagtagtgattcatcactttt

SEQ ID NO: 99132 - DNA, 558 bp, Glycine max
  unsure (1)..(558): unsure at all n locations
  Clone ID: PAT_MRT3847_6052C.1
attcccggngtcgacccacgcgtccgcggacagatccatctgtatcttcccgagctcctttgttttcgacaaacctcccttccttgtaaactctcaccctctcttctttttcacccttttctctattccatatcaatcacaaaccctaattcactttctacagattcattcggaaacaccttttccaatttccaacacacaccaaccatgggttacgaagacaatccgtatcgcgacgaggacggagagcccttgatggactacgacgacgttcaatccgatcgcgagccatctcccgagcctcgccaccagctcgacgatttcgaggaggatgtcgacgagtggcgcggccgagatcggtcgcagacgccggtctacgacactgatccgtcgcggtcgaagccgcggaaaaggctgatcaagaagagcgatcccgggaagcaggcggtggagccggagcttgaggacgaggacgtggaggggtatgttccggagggggggttcgacgagggggacgctgggaggaagaggaagaagggtaaggagggtggggagtgg

SEQ ID NO: 99133 - DNA, 278 bp, Glycine max
  unsure (1)..(278): unsure at all n locations
  Clone ID: PAT_MRT3847_60530C.1
gtntattcttcttccttattttcttccctagtcaangagcntncatcnctanaggttgttttagactnncttaatggtgacaganttnctgcattggtgtgnntntgtngggggtccagcatggcagtccattnntctgtcgtgccccncatnggaantggcagtnnctagacntctccaaatcccgggattgcagccnngaaacggggaaccgcttncttatctatgagnccngtcggcggatgangtgttaaagcaatgtcgtggccngaactttt

SEQ ID NO: 99134 - DNA, 246 bp, Glycine max
  unsure (1)..(246): unsure at all n locations
  Clone ID: PAT_MRT3847_60531C.1
cttgggggaaaagctagaggctagagtcatggatgaccagcgcgacctcatctctaaccatgagcagctgcccatcctgggccagcgtgctagagccccagaaagcaattgcaaccgtggagtcctgtacaccagtgtctctgtcctggtggctctgctcttggctgggcaggccaccactgcttacttcctgtancagcagcagggccgcctggacaagctgancgtcacctccnagaacctgca

SEQ ID NO: 99135 - DNA, 818 bp, Glycine max
  Clone ID: PAT_MRT3847_60532C.1
tttgtagtgaggttgaggggaaaaacaatggggtctctaatggcctctgcaacattgactcttgtattggctatagtgtctctaagcttgccaacacaaatcttagctgataactacttgtactcatcacctccaccacccaagaagtacccaccggtgtctcctccataccactatccttcaccacctccaccaccaaaatattactaccactctccaccaccaccttctccttcaccaccaaagaagccatattattatcactctcctcctccaccttctcccactccacctaagaagccatattactaccactcgccaccaccacctccaccaaagaagaagccatactactatcactctccaccaccacctttacctcctccaccaaagaaaccatattactaccattctcctccaccaccttcaccttctccaccaaagaagccatactactaccattccccacccccaccatcacctcctccaccttacaagaagccatactactaccattcccctcccccaccccctaagaagccatactactaccattccccacccccaccatcacctcctccaccttacaagaagccatactactaccattccccacctccaccccctaagaagccatactactaccattcttctgcaccaccatcacctcctccttctaagaagccatacaagtacccatcttcgccacctcctgtccatcactactccttaccctcaccctcccttcgatcattactctcctccaccatctactaagaagccatacatgtacccatcacctccaccaccagtacacc

SEQ ID NO: 99136 - DNA, 905 bp, Glycine max
  Clone ID: PAT_MRT3847_60533C.1
tgatataaaatgtataacattcagattttttttcgagcaggtgtggaagaattatatttgtgaggtttcttcttcagacatttgcaagacacccggtcggatgactccaaccgtttatggccaaatggaagctgcagtgaatgtaagctatggtttatatcattatggcccattcttggttggcctacaagactgcactttcgttcggaaaatattcacagacatcagcaacaatccctgccctggtctgcagagaaacagccaattgatttatattgggttggttttggtatcagctgctgtaatgttgtctttgatcttttgggtcatctatgcaagagaacggcggcaccgcgtttatactaaacagttcattgaaggctaaatgtgttgggacttaaactacattaggtacattatggttctcaggtacatttgtgttatagattgtattccagggttgggtctcttgttttatgtcatgtagagtttcatcttacaaaatacctatactggagtagagatgtttatgaggaaaaaacagtttatatggtgcaaaaagtattttggtgtgttttgatatcaatttctttttttctaatttaaaacacagattgagattgtttgattcgaatagccgacttggggggttaaaaggttttcattctaatttgttcagtgcaatgcaactactcaattttgtggagtaatgtaggtgtatttggatgaaaagattgagttatttgttacaagttgtgaatttgcccatttttttttaaattgaaataagtatgagttggttttaaaagtttattgtagcaagttgttacttctgtaaggttaggtaaattttgtaaaattcttggaatgccaataatcaggcttttgatttatcaatgacattg

SEQ ID NO: 99137 - DNA, 384 bp, Glycine max
  Clone ID: PAT_MRT3847_60534C.1
gaattcggcacgagggctttagtgcgtgtccttctggtcagaaaacaagaagagctctagcaaagttcatgtagcatgtagttcggtactatcaaaattcaaaagcaaacagtgagacagtgggacctttaaatctatgggatggagcatttcgtgtaaataattttagggaccgtgtggggtgcttttcaaatctcccaacccgcaaacaacgtagaattgacccccgcatgagctttctatatggtgaagtcaatcaccaccaatgagcttgtaacactttctgttccttttcgtgctttatcttcaatagctgaaactaaagatttaatttacggagtctttcgcatatattcacttcaagtgaaatttcatttcttttaa

SEQ ID NO: 99138 - DNA, 183 bp, Glycine max
  Clone ID: PAT_MRT3847_60535C.1
ccacgcgtccgattaatccggccaccgtaatgaaataatcactgccgccgccgaatcaagacgatttaaccgaacgaaaaaaatcttaacacaaggaattatactacaaatggggcggccgttttttaggacccaactttatggacccgggtgtggacacgtataaacttttttttggggctc

SEQ ID NO: 99139 - DNA, 435 bp, Glycine max
  Clone ID: PAT_MRT3847_60536C.1
ggcattgaaggctatcaaagaaggggggaaagttgtgacaatagcaccaccagcaactccacctgctatcccattctttctcacttcagatggtgctgtgttggagaagttacaacctcacttagaaagtgggaaggtgaagccagtattggatcctaagagtccctttccattttctcagattgtggaagcatattcatacttgaagacaaatagagccattgggaaagtagtcatacatcccatcccttgaacatatataactatgcaaatatactatcaagtcctgctgtgcattctgaccttaatttgtgttaataaggttaatatttatatgattgataaggagagagcccaaatgtttctaatataattatgtcaatattgcagtcatatgtaaattggtaataactaataaagctcttattatatgtt

SEQ ID NO: 99140 - DNA, 495 bp, Glycine max
  Clone ID: PAT_MRT3847_60537C.1
attggtttttttcccgtgttgacatcctgctaactcctaaaactttggatatcgattcactaccagagcagagcctgctatcttgctatccaaagatcggacgaccaaacactggggagaaaggaaaacaaactcagactttcacgggtggagcaaatgccttaaataactctaagtgtgcttatacggatgggagtcacgatatgggaaccactactatacatgaaatactaaatcctactgtgcattatcatacgcctaacaaccagctaatttcaacatcatctattacttacgcgcatgattcatgtgctctatcaacctgggatcatgcatggaggagtccttaactgctactgtgcgctagacacatgaaaagccttactagccgctcttgggcttccaatgcaccacccatgatagacgaacttgctctaccctttcaggctccagggggctataggggatcatccacttggaggggccctgtagcat

SEQ ID NO: 99141 - DNA, 252 bp, Glycine max
  Clone ID: PAT_MRT3847_60538C.1
catccctgtacatacacagcatagcggaggacccactccaccgcaaacttatacaccccataaaaacaaactgtacaagagaagtatacctctcctcaaacacacttaagcctaacaaaatgtcaaaagggtaacacaccggcacaacataaaggaccatgactcacacaaccactatcagactaccccttaaagaaatgaaccaacacaactcttctaaacgagaaaccaaccctacaccgaagtcttaac

SEQ ID NO: 99142 - DNA, 246 bp, Glycine max
  unsure (1)..(246): unsure at all n locations
  Clone ID: PAT_MRT3847_60539C.1
gtacattgggacatggctaaattttttagcacatgtacttgttaatggttagcttagatttgatcacatttggtcctggagattatctgatgtggaacggaaatgaactccgttgcaaaaatggtcaattcttttggccgcctaatttgcatggatatctgtctatttttaaaaaaaaaaaaaaaaaatttaatactacctacaaaaaataaaaaaaaaagaattnttacggggcggccgccgact

SEQ ID NO: 99143 - DNA, 647 bp, Glycine max
  Clone ID: PAT_MRT3847_6053C.1
ttgactgccacgcacgcatacttgaattctgtacatctagagccctcgccctttttttttttttttgttaaaaaacaaatcaaaattgaactatcaattttttaacatttcgaccatatcttccaatcgcaatccccttattaatatttcaaaactttttaacctacccacaaaaatcctatggcccctcaagcgtcctaagaaggaccttcatattttacattctgacttctctcctacttggcacacatgggaagatatcatcaactttaaagatcatctcagctgcctctgctgaacataacaatacattttgcttgactttaaatgctccatatttttcgctttcatccatgtttcccacagagccagaaataacatcctttccagaagtacacccctccttctgatgctctccccggattttaaaaatcaactaatcactgtccaaaccagcattatcatcaatgatcgttggaatatcccaaaatgcacggtagaacccctcattaacaagagacttcttttcactagttttgttacccaacgcatcaacttcttttgccattaccatgtaacgccacccaccttcaatcaactactttactggcattgactgtctgaaataacactcacaaggcattatg

SEQ ID NO: 99144 - DNA, 520 bp, Glycine max
  Clone ID: PAT_MRT3847_60540C.1
cagaacattcgggtgtgtgtggactgccacactgcaattaaatttatggcaaagattgttggcagggaaatcattgtgagggataatagccgatttcaccattttaagaatgggtcttgttcctgtggagattactggtgaaataactggaaagtggaaaccaagcatgtcaacattgtagctgcataagcagtaccgaactgaggtggattaaaatgctactaaatcagtgtaaaaaggacagactgtaatcaaggtaaaaaatgggatgcaaagttggctgccatgccgtaagaaagtcatgcagtcaaaattgcttttggagataaagcccatgtgctctcagcttggtgaagagagggcttgggaggtgggatcctgattacacattgtccaatttcatgtaagcattttgaattcagttctgattgcctaccttaatcagcacttgagtgttcaatcacttttacaaatttctggtgggttcagcacaaggtcttggttgtatgtatttcattac

SEQ ID NO: 99145 - DNA, 584 bp, Glycine max
  Clone ID: PAT_MRT3847_60541C.1
cataaatcagatgtgtacagttttggtatccccatctcgacctgcctcccgggaaggctcctctccaatctccgggacccgatgatatggttcgtccgcctaggtgggttcagtctgttgttagggaagagtggacggccgaagtttttgacgtcgagctaatgaggtaccaaaacattgaagaagaaatggtgcaaatgttgcaaattgccatggcttgtgtggcaaagatgccagatatgagacctagcatggatgaagcagtgagaatgatcgaagagatccggcaatctgactcagagaaccgaccatcttctgaagaaaataaatctaaggactcaaatgttcagactccatagattaacagtgccttttgcttaaccaggaagtgacaataaaatggtatataagagtgcatgcttgatcaacctttctgtccaattgttcaatatttctcacagatgttgttcctcgagttattttctcctgtagttatgttgctttccttgaattcttatgtattaacatcccgattcaattaatgatcttgattcaagcaaaggttggaagtataaaagagcttg

SEQ ID NO: 99146 - DNA, 397 bp, Glycine max
  Clone ID: PAT_MRT3847_60542C.1
accatgcgtccgcactcttgcccgtatttgctaatacatacgctcttcccaatgcaactaatggggctgtcgattatggtcaatctgggtctccactctcgcagatttggccactggttgatccaaagcacttgtggaatctcgggggagggtcgttattggggtttggtatggctttccagtgaacatagcatatagcgcttgatgctttctggtaatcttcttgaggatagggtattcgagatgcaggggtgaacagtaccgattatgtatttttggtatctcgcatgagcaaatttggcattatgtaaatgtaccagtgcataagacatatttttggctataattacagtacgaacattgtgtcatgggatgtctacatacttttgagttatgt

SEQ ID NO: 99147 - DNA, 382 bp, Glycine max
  Clone ID: PAT_MRT3847_60543C.1
attaaaatgagttctatatggcaaattggtctatttaaaaaaacgttcaatactacagcaatttgtctcgagtgtcaagcaaatgaaaagcctaaaatttgaatacacgcttgccaaaggatcacttaaaagtttgcaagttcatcttcacgccattcacgaaaactccgaatttgctgaaaagctgaatgctgttgaatcgaaagccgaaaaggacaaacaaaaacaaaagacaatctcagactttcagtcatccaccggaccgactcttttactctcaactcttctttgataagaaaattctttattttttggtgacaaaaaacatttcctttggcgctgtggatgaccaaacattttattttttgtgtgcccattaaaa

SEQ ID NO: 99148 - DNA, 402 bp, Glycine max
  Clone ID: PAT_MRT3847_60544C.1
gatattgtcatttataacgactagttttaggcagcaacagctgactaaagtttcaggagacctggcagcacattgagggcacaaagtcaaaaaccacctgatctatgaaacttaatcccaaagcaattcaactgtagcctctataggctctgtggacctcatacagtgactagcgcacatcgagcataggccaaggcgcctgaagaccaaccacctgcggtaccggcgccagctgaagctcgaacgcggcaggcatatgctcctgcctacagggcgaaaaggaacgggatagagactgctcagttcgcagggctgtgaccgacttcaaggacactagactcaccccagccattcagcgggagagctactcatgtcgagagaacagcactacggagaagctta

SEQ ID NO: 99149 - DNA, 338 bp, Glycine max
  Clone ID: PAT_MRT3847_60545C.1
ttccacacaagctactaaagcatcgtatcttcaaacttgtacggagctattagctcctatgctttatacaccaatgtgaatgcttttgatcactttgagatacccgtaacgacggcgacgaaggacgcttgtgcttcggagccgtgcatagcatagatctgtcgtagttctagctggcggaacattttcttgacagaaaatagggccaacctgtcgctgatggagaacgacaccaatgacatggtcatctaccgtgctttgcttgatgatggtgccactggatggtgccccgccaatggaaatgaggtgagtaaggcctgtgtacctgtgaaaatgga

SEQ ID NO: 99150 - DNA, 408 bp, Glycine max
  Clone ID: PAT_MRT3847_60546C.1
tttttgtagcgcaaacgagggggtttcctacaatactgaatgatttggccaaaattttaggtatagggccactcatattgttgtaagacaagtcaaagaaagcaagctgtgccatgttagctagagactctgggcattctccatcaaaactgttattattaagccttaagtcttgcattctttttagatgacccaaagaggggggtatttcccccattaacaacttatcaatgacattaattgtttgtatattgacatgtattggtatctctaaggggacagaacacttcttgtatggattggtggatcaccacagctccaaaagttgatagggtttccatcctcgtccttagatgcgtcttcactgtgcaaagacgccaatgccagatttatccaagctttattaag

SEQ ID NO: 99151 - DNA, 323 bp, Glycine max
  Clone ID: PAT_MRT3847_60547C.1
tgcatgatagttcagtgtctacaataccatacaaatatggacacccatcagccaacagagttgttgcaggacgcacctgagttgaccaagctgtaagaactctgttggctgatgggtgtccatatacgaatgctatggggcatgatagttcagctgttacaataccacgtgattttggcattggtgttaagttgacaaccataaacaatgtgggagcatatgggcttagatactggatttcaggttctagtattttgggcaccattccttagtcacattttacagcaaactgattggaatcaaagggcaacagtgagaacacc

SEQ ID NO: 99152 - DNA, 571 bp, Glycine max
  Clone ID: PAT_MRT3847_60548C.1
gcattttatacattctgttatcacgtaacgacctaactgcttaacagaaatgttaacaacgaatattctttattcttcctaagcttctagaagatacctacgctatcgttgtgcctttgtatgcacccgtgaatacttaagcttctagcacgtaatctttcagatagctacgagtgtggcttcctcttttaggccttccctctactaacttcttgctgtcatcacatctgggcctggttgcttgcggttcatagctgttacttgtaacactatgggcttgtcaagatgtaaatttccctattagtagagtaagaatatggataattaaaatagaacccatagtataaattattattgatattacattcttctttttaggtgattaacattcatttgaggcatcagttaaggttcttatttctaaatttctacctctaaattattattgatatccatgggcattctgctcgaaagggtgatgggtcgaacctcaagtactttatctcctagacacaggcactttactgcccaggtaatttggcattctcgtgtcttttgttcttaatggctt

SEQ ID NO: 99153 - DNA, 786 bp, Glycine max
  unsure (1)..(786): unsure at all n locations
  Clone ID: PAT_MRT3847_60549C.1
gttcctttcagtcagatactccttcacgctcttcttcattctcctcctcttatcaccttcacacattgcttcaacaacaccaacactagctcacacactaacacaatcagccaccaaaatagccatcacaaaccgcaacatccatagccttaacaatgctggaagaggcaccaaaatcaccggcatatcgcaattcaaacgatacctgcatcgttttgggtacttacaaaacaacaacattagtttcagtgatgaatttgatgccgtcttggaatcggctctctttagataccaacgaaaccttggactccaagtaaccgggaagctcgattccaacacggtttctcaaatgatcacaccaagatgcggtgatccagacacaaacacaacaccccatcatcacaatcacgttcacaaaacgcgcttaacgaagaattttgtgtttttcccgggaaaaccacgttggtcacgttccatgccaatgacactaacctatgccttctcccgtgagaacatgatccatagtttgagcatgaaggagataagagaggcattccaacgtgcattcacaaggtgggcttcggttattccggttagtttcgttgaggtgagtgactttgaactcacggacataaaaatagggttttacaatggggagcatggcgatggtgaaccctttgatggggtgcttgggagtgttggctcactccttctcgccggagatcggccggctccacctcgacgcagccgagacgtgggncggtggacttccggtcgaccacgtca

SEQ ID NO: 99154 - DNA, 780 bp, Glycine max
  Clone ID: PAT_MRT3847_6054C.1
aactttcacagcctaggtctggacagtcctcttctaggcagcatgcatcaaggccggaagcaacacctttggattttgtggtccggccccagtctaaaattgatccagaagaaattagagcacgagcaaaacaagctgcacaagatcagcagcgtatgaagatgaataagaaattgcagcaattgagggcaccaaaaaagaagcagcttcaggctacaaaactgagcgtggaaggtcgtggtatgatcaaatatttataaatgtgaccacgttgatactggatgggtttgtttgtcctgctgcaagcttttcatataatgtgctgcctgcattgatgtggattcttctaaaggtgggctattcgttcagtgatctacatggaaatttgatggagagggatgttatgaaaataccatccgtatgctgcatttgtgtattcatctagtgcagtaggaaatccaaaatacattggacggttatgcattcgtatatatagtcaagcttgtcatcagtttaatgaaaatgtggattttgcattcgtccttggtacaagtaatctttgtagtgcagcgctgcagcagtaataccaaccaaaatacactggacggttgtgtacatgttttaagatttttatttttcaattgaataatcaagcttgttttatcaaactcaaaaaaaaaaagaaaaaaaaagggggggccccggactagtgcgctcgtagcccggggatttaattcgggccgggtccggcaaggggtcccagtttccccaaaagggggc

SEQ ID NO: 99155 - DNA, 408 bp, Glycine max
  Clone ID: PAT_MRT3847_60550C.1
gctctgacgttaatgtcacgcgtgcgtacgcgctgacttcgggtcgggctccctccgttttatcttttgacgtaacaaagtgcacactacccaacagaggtgttacctagctataacggcacttacagagacattcatgacgtaggtcacacactgctcgtggcaagatcaaacataaatcggtgaagacctgctgctataacaaaagacaggctgcatgcatatatgaatttacagtgaaacaagctaccttatcgccagtcgttatatatatatatatatagatatagatatatatattcacgatccttagctcttaaaagagaacaaaacgcgatctacgcctacgtgcatggggacacaccgccacgaattcatggttggggatccctctgtgaactaatgacc

SEQ ID NO: 99156 - DNA, 646 bp, Glycine max
  Clone ID: PAT_MRT3847_60551C.1
tggtccgcctttgcgtcttcgccacttttcccgcggcgtcccacccgcccgcaaactactaaattttgcaactttttctcatctttgatcgttgttggtgaaatggtgggccaaaattggtccggttgccgatcttgggaagaggacatttactggtcccactttcagttcctccacttcgtccaatttctccgtgccgattatgatcaacaccttgcacttccgaaagcattttcagataatttaaagaagaagttgccggaaaatgtgacccttaagggtcctggtggtgttgtgtggaatatagggatgactactagagatgataccttgtactttgtgcatggttgggaacaatttgtgaaagaccactgtttgaaagagaatgatttcctggtctttaagtacaatggtgaatctcagtttgatgttttaatattcaatggagggagcttgtgtgagaaggcaggttcttattttgttcgaaaatgtggtcacactggaattgaacatgcgggtggaagtctcaacaagaaaagggacacggataataattctttggaaagaggcaatatccctccttcaaatgctggtgtggaatgtgctttgcatgagaaatctgtgcatgctaatggtacaaaggagc

SEQ ID NO: 99157 - DNA, 406 bp, Glycine max
  unsure (1)..(406): unsure at all n locations
  Clone ID: PAT_MRT3847_60552C.1
aaaggaagangggaaaanccanacggggaannccaaagcacggaaccagganaanacccnnnnnnannnnannnncaggggacaggaggggancannnaaccncacaaggggggggggggcagaccaaaaccaaaagcgcaaccgaaaccacgaccaagannaaaccnanncaacaagaagggcaacacaacagacacnaaccggggccaanggggagcccccaccaaggccaggggcccnagaagggccaanacccgggggcgggaaccccacgcaggggcanaccacgaaaccggcnnaacaaaggaagcacgaagcgcaaggccagccnnagcancaaangaacccgaccnggaagcaccaacaaaggcaggagagacaacanccccggcgggggacccaagg

SEQ ID NO: 99158 - DNA, 445 bp, Glycine max
  Clone ID: PAT_MRT3847_60553C.1
tatattccttcatgttattggttatctagcttaaataatcttattatcgtgcttttggcagtactctaattatttttagtcaccatttttcacttttcaaggcaaattttgtaagctacatctctatcatgttaaattttgtttggtgattgcatcacattcttctcctgcatgtagcaaaaaaaactgtagtttttcaagtagtgtgaagaatattcaactttctgcgtgtttgtctgtttttattctccaattgatgacttgcttaagtatttatccttggcatgttccatttgtgatggtttcaatccaaaatgcagaaatacatgagtaacatcaggaatctttgggccttataaaataaatgggtttgtggacccataaaaaaacttaaaatagatgtttggggaaaactaagtggttatttttccgtttatttcctata

SEQ ID NO: 99159 - DNA, 884 bp, Glycine max
  unsure (1)..(884): unsure at all n locations
  Clone ID: PAT_MRT3847_60554C.1
ccacgcgtccgattaaagagaaaactgatccagtaaccgatctttgttttactcttagtcatttcataatgagttgttattttctgaaacaattttatgcacttgtgctgcttttattgcatgctgcagtatccattcttggattcaacagccttcccaatagtgcagaaattaagtgcattgagactgagagacaagcactcctcaacttcaaacatggcctcatagacgactatggcattctgtctacatggagggacgatgacagtaacagagactgttgcaaatggaaaggcattcgatgcaacaatcaaactggtcatgttgagatgcttcatctccgtggtcatggtacacaatatttgataggtgtaatcaatatctcctcattgattgcccttgaaaatattgaacacttggatctcagcaataatgcttttgaatggagtcatatcccagaactcatgggctcgttcaccaacttaagatatctcaatctctctcattgtttatttgtttggattattccttctgatcttggaaagcttacacatttactgtctcttgatctaggtggcaatagctatctccatggacaaatcccttatcaacttggaaaccttacacatttacaatatcttgatctaagttataatgatttcgatggggaactcccttatcaacttggaaatctctcacagttgaggtatcttgatcttggtggaaattcattttcgggagcactccctttccaagttgggaatcttccattgttgcacactcttggacttggtggcaattttgatgtgaaatctaaggatgcagagtggttgactaatctgtcttcctttgacaaactgagctagntcactacacaacctttc

SEQ ID NO: 99160 - DNA, 337 bp, Glycine max
  Clone ID: PAT_MRT3847_60555C.1
tggaccatctattaaatagttgtcagtagttatcattggcgataaactctaacttttaacacctgaaattgaactacatccattcactattgaatggaatgcactatttatctaatgttggaagtttgagcacatattatttgccataggttcaaagttgaaatgcaccctcataaaaaatgttgaaatgctttatttgcacttttttggaaattggtttatgcttactttttagtcttgctttcatcttgtcctttcattacctcctgatgctttagatgtgggatttttccccatattcaaacaaatgtttttactgatatttctataccttttt

SEQ ID NO: 99161 - DNA, 374 bp, Glycine max
  Clone ID: PAT_MRT3847_60556C.1
ctagcatggcccataaaatgtctactcattagccctatgacatgatccgcatcttcctctcccctattcgggtcacctagctagctttcaccctcccctctttaaatccgtccctttattattaatgtacactaacccgactaaaccctggatcttggtcatggcatcactccgcaccccagtgaagggtgaagtcgcacatatttgtgaaagggatcgagcttcactacgctacgctaccatcatagttctggatcgctaagctcggttaagtcatgtacatgcatgtattggacctgcacacgaccttgcagaggggtgactataccaacgattacggttgctcatgatctttattgcatgtgatcaatggc

SEQ ID NO: 99162 - DNA, 377 bp, Glycine max
  Clone ID: PAT_MRT3847_60557C.1
ggccaacctaggtgcgtcctgatatggaataagaacaatgtgatcacgaaggagacgacaaccactcacctgacatgctggtctccttttagctagaggtgaatcaccgatggcttttatatacgctcacggaatgcgcctcctttgttccaagctcattacacgaagctgaccctacactagggatacaaactgctaacgttaaaacaacacagtccatgaccatgatttcgatagtaacactcacattttagttgggaccgcaatccatcatgagcacgttgtacaacttcaatgcaacttgcttaaaatagcagagcactctaccacaacttatacccttgacgctgtctatgccatacacagactgcaatttc

SEQ ID NO: 99163 - DNA, 454 bp, Glycine max
  Clone ID: PAT_MRT3847_60558C.1
gggcaaaaacaagtggccatataattgattccgttataaggggcataccaccaagttaagggccccaaaccggtttttaccaaaaacaacatacctggaaagccctcttctttcaaataaagggcataaaaatttaccctttgggtaacatgaaatttttttgccctcacaaattacatgttaatttgccaaacccaagcaaccaactggggtataaagcaatattctttgttcctgcccaaaaaaatgccggggtagttcaatttacaaaaaagtatcatgggcaatctgcaatcgaaaaggggaaggaaggttttcccatgccaaactcttatttagaaatttcaacccccaacaagttgagttagctggatgggattcctattggaaccgaaaatttttgccaattactatatttttccgagttgggggggtttcttaaaattcatttttg

SEQ ID NO: 99164 - DNA, 189 bp, Glycine max
  Clone ID: PAT_MRT3847_60559C.1
cttgttcgttggtgttgttggaagccagaaccctagcagccggcgagaatggcagacgtagaggttagtggtggaggcgacagcggccggcggaggctgccctgcctccaatgaagttaatacttaaaaagttcaacttcaagggggcggatctggacccccctaatgacctcgtcactgaccaactcg

SEQ ID NO: 99165 - DNA, 2189 bp, Glycine max
  Clone ID: PAT_MRT3847_6055C.1
agtaattaaaacttttttcaatgaagttggggcccaagaggcaataaaacccagcagcagcgtataagttccggagcggctccgtccgtatcttcccgacctcctttgttttcgacaaaccctccctccctctcaaactgtcacccctttccgtacgtccattcaaacatttcctctttcttatattcttctttttctctcttcactttcaaacacaaaccctaattcactttctaccaattcattcgcaaacaccttttccaatttccaacacacaccaaccatgggctacgaagacaatccgtatcgtgacgaggacggagagcccttgatggactacgacgacattcaatccgatcgcgagccatctcccgagcctcgccgccaggacgacgatttcgatgaggacgtcgacgagtggcgcggccgtgatcggtcgcagacgccggtctatgacaccgatccgtcgcggtcgaagccgcggaagaggctgatcaagaagagcgacgccgggaagcaggcggtggagccggagcttgaggatgaggacgtggaggggtatgttccggaggcgatgttcgacgaggcggacactggaaggaagaggaagaaggggaaggagggtgggagtgggaagaaggagaagaggatgaagggggagaagagttttgggagcagcggtgggaagagtgggtccaaatttgggagtggaaagaaagggtttggtgggaaggcagggaaggatcatgatggtgaagttaaggagatgtgggatacaattgctgggggagattctgaggatgatcaagagggtgtcaggaatgtggatgatgacaacttcatagatgacactggagtggaacctgcttattatggtagtgatgaaccacgttctcctgttgatgctccccaggcggaggagggtgaagaggatgaagaaattaaggatcttttcaagataggtaagaagatgctgaacttaatagacaggggaagcctgccggcatattactcagagacttgaatcgcctagcatgaggttacagctgaggaggatgctgaacttaatagacagggaaagcctgccattaataaactcaagaagttgaatcttctgactgaagtcctctcaaagaaacagcttcaacaagagtttttagatcatggagtgctaactttattgaagaattggcttgagccacttcctgatggaagcttgccaaatataaatatacgctcggaagttttgaagatattgaatgattttcctatagatctagagcagtatgatagaagagaacagctgaaaaagagtggtctgggaaaggtcattatgtttttatcaaagtctgatgaagaaatcagtgcaaataggaaactagccatggagctggttgataagtggagcaggcctatatttaataagagtaaccggtttgaagacatgagaaatgtggaggatgatagggttccttatcggaggccatcagttaaaaagccggcaaataaatctgcaggaatggaatctagggacagtgatcttgatttggaactttcacagcctaggtctggacagtcctcttctaggcagcatgcatcaaggccggaagcaacacctttggattttgtggtccgtccccagtctaaaattgatccagaagaaattagagcacgagcaaaacaagctgcacaagatcagcagcgtatgaagatgaataagaaattgcagcaattgagggcaccaaaaaagaagcagcttcaggctacaaaactgagcgtggaaggtcgtggtatgatcaaatatttataaatgtgtccacgttgatactggacgggtttgtttgtcctgctgcaagctctcatataatgtggtgcctgcattaatgtggattattctgaaggtggagatccagtgagctcgataaatggaaatttgaaggagagggatgtcatgaaaatacatccgtatactgcatttgtgtattcatttagtgcagcaggaaacccaaaatacatttgccggttatgcattcgtctattatttcgttttctgttgcagcagcaacaccaacctcattaatttaatgaatatgtggattttccctagatttttatttttcaattgaataatcaagcttgtcttatcaaactcgccgattgtgtggcaatctcgtgacgagttctctggt

SEQ ID NO: 99166 - DNA, 190 bp, Glycine max
  Clone ID: PAT_MRT3847_60560C.1
atcaggctcacgatggagggaatattgatgaagagcgtccagaggaaaattatgccggacatgatgtcctgttgtgctgtagacggtcaatcacaagacgacaccgtgcatgaaagttccaacacagtacattgatcttgcggatagggagagaatgagttctagtttgagcatactggtagtggaacta

SEQ ID NO: 99167 - DNA, 646 bp, Glycine max
  Clone ID: PAT_MRT3847_60561C.1
ctgtttcagtttgaaacttcaacatcgatctcgagccgattcggctctagtcttaatattcatttgggtctcgccctattatttctctccgtttctatccctctttttttctctcaaagctttggtttttaaatttgttctggttgaatattttcaaggaactcatgggtgatgataacttgaagaaagaatcagacatggagggtgatcttcaaaggtctctatctttgcgcctaaatcgtagaggagatcgaagtaatcaaaatcctgctaaagattttgaggtgggtttcttttcttctgggagggtacctcaagattaccccatgaagatcgtttggaagaaagggtttgttcggttggttcttgtagcagggatcttgtggatgttattaattcttcttgcattgttgttccatatatggtcttgtcaaacttccgtctcctttttatcagatatctgtggcgaggcaggcatacgtttgccattgctcaacacaagcatcaccgcagtatatatgatgaggctgattaaacaagaggcgaaagcgatatgctccgccccttattgatctgcacatttaaatctattatttacgagggatggagcccatggagtcaaattataagaccaattgtgattgac

SEQ ID NO: 99168 - DNA, 162 bp, Glycine max
  Clone ID: PAT_MRT3847_60562C.1
gcgatctagaactaagtatgcagtgcaatgttgccaacaagcaccatgatcaggacccttgaattttcttcctcgatcatagacaaggggaggaaaattcaaggtgacagacctccgcgctcgttgtcctacactgctctagcaattcaagcactagatcgc

SEQ ID NO: 99169 - DNA, 344 bp, Glycine max
  Clone ID: PAT_MRT3847_60563C.1
acacaaccgagtcctctcttaaccttctgcctgccaccggagttgcaaataatgcttccccaccagaaccctgcggtactggataaacacccgtaggtcccgcacatcaaaacacaccaccctgccttctcacgccaacattactctttctcctgcggcgccgtgaccccgaccgcgaccgacggtacgcgtgtgtaaaatctgcgtggccgtcgaccttttctacgagagcgcctacgcggtccgctgggccgagcagcactacatccgacccggcgacgccgagatcctgctccacttcagcgctaccaaccgtctcgttggcgcccactggggctccatcg

SEQ ID NO: 99170 - DNA, 730 bp, Glycine max
  unsure (1)..(730): unsure at all n locations
  Clone ID: PAT_MRT3847_60564C.1
gtccggaattcccgcntcgacccacgcgtccggaagaattttagttcgagtgagtgatgatacgttaatatctatatttttttgaatatttaacaaatacctgttttttctttttatctctctttatatcatgtttataatacttgtattttttttttaatcttatttgtgtttttttcatcaagtgtccattcacatattgagtgttgatgtataatttttctactagtatatttatctatatgtatgtgtgtacatgggaacggcaaagattggactgaatgaacaaacagagagggagaagatcatagattatttaaacggctcttgagtttttctgaattgtttattccattgaatgaaggaccctagttattaattttatattccactatatagttcagaagagaagggtgcttgtttattttcataataataatgtttccagaatctggattctggtcaaagatatatcacagaccactacttgctcttcacatattcagatagagagagagagagagagagagaggaaggttttgcttcttagtactagtactttttagtattttttatgttgtcttcccctaggtttaatgatgtatgaaaatttgatgatttagagatattatcggtgacagagtggttggaagtggttgctattattattgtttgatagagaagtatttatggggaaaaagaagcgcaaaaacgaaagacttttcgtagc

SEQ ID NO: 99171 - DNA, 373 bp, Glycine max
  Clone ID: PAT_MRT3847_60565C.1
gctcaaattatcatgtatacatatcaacgtctgctgtagcttacacgacactaagacggatgcgggcccattgcactaccatgatgtatactatgtcacagtagccacactcatttgccctgatattactcgccctatacgagacccacgatatggagaacttattgtacgggaacaccatataccttctaactctcgaaacacaagcattcatcgaccctcatgatgagcatgagagcagagctctgtcaacgctgttttgagatagtcgatatacgcacgaccactgttatgctctgacatgagaaagattctgcctggctaggaccgataagtgctatggtgagtcgcttatcataactcgcctgcacat

SEQ ID NO: 99172 - DNA, 282 bp, Glycine max
  Clone ID: PAT_MRT3847_60566C.1
cccacgcgtccgaatctttatataataatataaataagactaaaaaattaaaaaaaaaaaacgaagcgttttgggtttaaaattaattgtttaaggccaaattgtaaatcgaggcacccattttatgataaactctccttacattttgtgtcctctagtaggccaaatatttccggcaattgcaatggcttctatatttctatatgttcaaaaacacaagtttttttagattcagaaaacaatataaaaatctggggttttttattccccaaattatatact

SEQ ID NO: 99173 - DNA, 525 bp, Glycine max
  Clone ID: PAT_MRT3847_60567C.1
tttttgttttttttttttttttttttttttgggaaacattcttaatgcgaagcatagtagcatgcatatatatcccatgctgcatgttactagccgtttgggatacaaatgggtgtcatgcatcttggagggggcatgacatgatataccaataggataattcaggggaaagacctaagctagcgtctgacaccatattgtaagcgactctttcctccttactaaggtttttttttttttttttaactttttcttttctctttaggcactgtgaggactttagccagccttaaccagggctggagttaaggattcctactcaccctcactttttctagaatgggaaattcttggaaacttgagggcgacagttatttaatgcgctggggctactctttaattacttttcctcaatcgggggaaattttggttccgacaaagctcttcatatcttacttttagcgatatataaaaatagggaattttttttccctttaagagccttcttatgggaataattaacgg

SEQ ID NO: 99174 - DNA, 617 bp, Glycine max
  Clone ID: PAT_MRT3847_60568C.1
gagaatgtaaacaaaaaatttcatgacccctttgagggttagtctttgcttcattctcctcttcctcactacaacaagtgcacaagccccagtttacagttacaattcttgcatgaactcaacttctattagccccacatacaaaactaacgttaagagcctcctctcatggatcaccaatgattcatccataagcaaagggtttaactacaccaccataagcagcaacaacggtggtgacaacgacggttatggcgatgctgtttatgggttgtacagctgcagatacgacatcacaggatacttctgccagttctgtctcaccactgctgtcaacgaaatctctcggctgtgtcctgacagtgttaccgctatcctatggtatgatgtttgcatcctccgttactccaatcagagtttccatggcaaagttagtttaagcccaacgtggaacgttaccggacccagaaaaatcaagaattcaacagaaactaagagaattgaggatgctatggagggtttgattacaaaagcaactatagagaccaagcagttttgggcagtggaggagttcgattggggtgacaatgagacattgtatggatgggtgcagtgtg

SEQ ID NO: 99175 - DNA, 353 bp, Glycine max
  Clone ID: PAT_MRT3847_60569C.1
cccacccgtgtcctttcgcctgggcgaaaacgcacacggggtatactagatgtcggatgcaggtgttgccaacttaggaggatggctctctgatatagaagtacgagtggatgccaacagctccatgggcctgaccattgcacatcaggtacaatttgcactggagcggaggatgactgctgcatctgctgcgaagggcacaaagaggctaccgttgcgcatgaaagtgctggacgtacaacattgtgcacgatgcatagcaccgcggaatatacaaagtggtaagcttgtgttggagctcacacgagaattgtgacctggaggcttttcagtgtgatctggtactccaattt

SEQ ID NO: 99176 - DNA, 519 bp, Glycine max
  Clone ID: PAT_MRT3847_6056C.1
cgcatggccaccgccgttaccgtacggccttggactgccctctagggcggcgcgccccccccccccccccccccccccccccccccccccccccccccccccccccccccccccccccttttttttttggaaaatccagttaactcatactcaaaaggacccagccaaaaatttatcattgtttttaaaaaaaactggcccttttaaaaaaaaaaaaaaaaacccacttttcctcattttttggaaaaaaaggatccctccaacaggaaaataacttgaagggggtaccaaaggtttaaaggagggggttacattttggaagggtttgtttccaaacaaatcatggggatgggggtttttcgtttaaaaaaccctatttttaaaacagttttaaaagccttttttgggcccaattgggggaccaaactccgaatattttgcttttgaaatccacatttggggggaaggggctaaaaaatgccaaaataaaacccccgtcccaaacactgtttttttttt

SEQ ID NO: 99177 - DNA, 261 bp, Glycine max
  unsure (1)..(261): unsure at all n locations
  Clone ID: PAT_MRT3847_60570C.1
cccttaaacccccccccttcatgtacccttttcttttctcttantgctctaagcaaaaaccaacantccgnancaaaacaaccaacntgggcagcaagangnaaaaattcccctttaaaattttntncttnttnaaanttnaaattntttntctaattntntntcttcnaattttctcagnccttccccaacnacnatcnangacnttntcngttccaaaggnttacnacgggggttcctccnggaggaggtgaaatcnta

SEQ ID NO: 99178 - DNA, 645 bp, Glycine max
  Clone ID: PAT_MRT3847_60571C.1
tctatccactcagcttcagattgcatctgtatctcatctgctgctgcattcagtgacaattagtatgtcttcacctcttctttctgctacggccgttctggagttcaagcagacatcgtgtagtcaagacattgacaaatatctcacgagtgatgtgcacttcgttattagtttgttggcttcttccttctgatgtctccctgccttacatcagtttgcttttactgcggaatctgcgacacaagactcataaaatgtcaacgaatccccccagcgcaactataacaacgaatatttggatcattctggcctcttgcctcctgcgtgctggacaagagcttgtcaaataagttggcaatgccaacggacaaaatcacttaatacgatccattcttctaacaacagatcacagcgcagatggaagtatcacatacggcactggctttaccatttataattcttctctcagcgatgtacactataaatcattaaatacaattcgctggcaatgcttcatataataagataggcaggaccatggctctgttgaacgtcttacttaacttcattcacgctgcaatgcgccagagcaaagtgattattctgacatatccagtgcctgacctttcactgcaacgaaacggg

SEQ ID NO: 99179 - DNA, 133 bp, Glycine max
  Clone ID: PAT_MRT3847_60572C.1
cgatggtatcacgatcgccacacatgcttcgaattgaagtgaaatgacacattgcgagtccatgctagatgcagcgtcacagctgcattggacggattaaagagaaatgcatccgatgggacgaccagtaaac

SEQ ID NO: 99180 - DNA, 125 bp, Glycine max
  Clone ID: PAT_MRT3847_60573C.1
acgcatgcgtacggacgcctgaagacaaccgactggaaggggcaagattgttccaccatctggaagctgggttatcgctctgcgaatattaactttcctgtcaaggatcatgctgcactaggaaa

SEQ ID NO: 99181 - DNA, 257 bp, Glycine max
  Clone ID: PAT_MRT3847_60574C.1
ctcgatcgacggctgcgagaagacgacataagggtactatattgtcatccgtacctctcatctaccatgggcaaacgagcccgttgacgcgcaaagactaacatcgtcttctgcaccttctgtcatcctgatccatgaagtcaggtgacatgcgggggtaccgtatagtcatccgaacctttcgtcaaccgaggcgaacgaattcgatggtatcaggatgatgttggtcgttcgattctgattattctcaaaatttc

SEQ ID NO: 99182 - DNA, 167 bp, Glycine max
  Clone ID: PAT_MRT3847_60575C.1
cgtacctcagctccgaattcggctcgaggctatgaggggtgaggggctgcgcggcccgctgtagttctccacagaggaggtcgtctaatattatctactgccaggagagtcttgtatgcgtaacgagctgcctgatccactcactgtgccagaggcccgacacctgt

SEQ ID NO: 99183 - DNA, 277 bp, Glycine max
  Clone ID: PAT_MRT3847_60576C.1
ctcggcctgggcaagctgtcggtgggcgcgccctacttcgacgcggtgatggcgccgctgctgctgccggcgctgctgttgatgattccggccacaagactgcgctggggccgagacgagggcccggcgctgtggcgccggctgcgcccggtggtgctggtgatgggcccggcagcggtggcgctgccgctgctgctcgaggccggcttcgcgcggatcagctggggcgccgcgctgacgctgtggctggccaccggcctgctgatcgcgacgctgc

SEQ ID NO: 99184 - DNA, 416 bp, Glycine max
  Clone ID: PAT_MRT3847_60577C.1
gttggataacatgatttggctgcttgtggtagagttttaagagaacaaaatggcactttcgttttgcctataaattgggatcttgttctgtccttaatgccagtttgtgggtaatcctaataggagttagagtggctaggtcctgtgggttttgtttgtaacattcaatccgattcttatggagttacaccatttgaaagctgcatgtgataatctccacccttcatacgccttgttgcaaaaaatccttcaagaatgcagatggtacctatccaatttgtccatacttcaagggaagctaataagacctccaatggcttagcggaatagggattatctatgcatgctatagatttaggacttttgatgtagccccatgcgtaattcatttttctttgttagcttacttagccgct

SEQ ID NO: 99185 - DNA, 154 bp, Glycine max
  Clone ID: PAT_MRT3847_60578C.1
tgcatcaagcagcgtgatctctaatactctagatagcaggtgtgccgacttgtggcatgctatggcacttcactgtatggaggagcaattgaatggactcttgtagactagcactttgagaggaactttgatcgacgctggctataaagaacat

SEQ ID NO: 99186 - DNA, 434 bp, Glycine max
  Clone ID: PAT_MRT3847_60579C.1
tccacttttgccattgcaatggcttcctcggccttgacccaaagcagctccttttcgtatgacgtgtttctcagcttccacgctacagacacacgcagcaacttcacagactttctttttcaagctctcataagaaaaggcatcgttgccttcaaagacgaatccagagcacccgaccaagcgattgaggattctcgccttttcattgtggtcctttccaagaactatgctttctccactcagtgtttgcatgaactatcacagatcttccattgcgttgaattttcgccaagacgtgttctgcctattttttatgatgttgatccatcagatgtgcgaaaacagactggatggtacgagaaagccttttcgaaatacgaagaaagattcttggtaaataaaaaagggatggagacagtgcagacatggagaaa

SEQ ID NO: 99187 - DNA, 191 bp, Glycine max
  unsure (1)..(191): unsure at all n locations
  Clone ID: PAT_MRT3847_6057C.1
cttaacatagtctcaaactctagagctgtcagaagattatgttttctcgtttttgttgaagctgttgtaggaaaacaatnnnnnnnnnnnnnnnnnnnnntncatgctcatagctcggtctttctttctggctccattggaattgactaggctctcatttcatagatcatgtaggatttcttctctcaatt

SEQ ID NO: 99188 - DNA, 2093 bp, Glycine max
  Clone ID: PAT_MRT3847_60580C.1
ggcctttgaggtctcagggctccgaaaggaagaggaagaaggaggaggaccgcacccccctccagcctccagcttttattttcgttgattgttccttcctccttcctttctctttaatcccgaacaaacgctgcctcctcgtttcttctattttgactttcaaatcgcgtgcaattctaatttcctcacctcaccttatcatgtctgcgattttctatgatcatctgtcttccctatcctatttgttgtttcacttctcccctttgacattaaaaatcactaacaacaaccaaataattattttacactaaggaaaattgttctagttgggtgctatcttgtaattggttatatatgatatctaactccactaactacaccctaattcttcaattgcgtctcgagccctgcctcatctgtaccaagtacaaattttaattgttaaacatctttgtttgagagtaagcatggatagtgctttaaggacagcgactgtatcagatatgtcgcctgtttatagagatgggtttaaagcaggtctagaagcagtgcgtaaatatggtctacaaaggacccttcttcatatcaggttggcagggacttttccatgctaggaacagaggccccccctttaacagatttgaactcattctttctagatataacacttggcctgttactagtagcgaaaccgaggccaaggtgtgtaaatattatagcttcacaattagaagaagatgaactacttgtaaagagctatagcgcaaagtctatcttgattactttcaccccagtttttaatgtatcacaatgtatctaccaccaattcagtatttccccatggggtcctggatttgggctctctgctatactgagattggttatggacgatatctgaattgcttgaatgcattctggcatcctgaatgcttccgctgccgtgcttgcaacctaccaatctctgattacgagttttccacatctgggaattacccttatcataaatcatgctataaggaaagctaccatccaaaatgtgatgtctgcaagcacttcggcacatccattctggatccagaaatattgccctactcacgaacatgatggtactacacgctgttgcagctgcgagcgaatggagtcccaagaggcaggatatattgttcttaagtatggccggaagctctgcttagagtgtcttgattctgctatcatggatactaatgaatgccaaccccttcatgctgatatacaaagattttatgaaagcctaaatatgaaactggaccaacaaattccacttctattggttgaaagacaagcactgaatgaagcaagagaaggagagaagaatggccactatcacatgccggaaaccagagggctctgcctctcagaggagctcagcactttctcgagacgacctagacttgggacaacaatggacatgagagcacagccatacagaccgactacacgctgcgatgtgactgcaattctcattttatatggtcttccaaggttacttactggatcaatcctagctcatgagatgatgcatgcatggctgcggcttaaaggttatcggactctaagtcaagatgttgaagaaggtatctgtcaggttttgtctcatatgtggttggagtctgaactttcttctgcatcaggcagcaactttgtatcagcctcatcctcgtctgcatcacatacatctagaaaaggtaaaagacctcagtttgagaggaagcttggggagttcttcaaacaccagattgaatcagacatttcccctgtttatggaggtgggtttagggcaggtcaaaaagcagtgagtaaatatggtctacaaaggacccttcatcatatcaggatgacagggacttttccatattaagtacaaagataccccttttaacagattgtttctcattatttctagatataaagcctggcctgttattattagaaaccgaggccaaggtgcttaggcataagcttccacgaattgttgattttttgtacttgtaattattgataccgttcattcacattttttcttttgatttatcagactgctactttttggcatt

SEQ ID NO: 99189 - DNA, 570 bp, Glycine max
  Clone ID: PAT_MRT3847_60581C.1
tcctagctcataaaataagccaagcatggctgcggcttaaaggtatcggactttaagtcgagatgttaagaaggtattgccgggttttgcctaaatgtggttggattctaacttttttgggcatcaggcagcacttttgtatcaccctcatcctcatttgcatcacatacatctagaaaaggtaaaagacctcagtttgagaggaagcttggggagttcttcaagcaccagattgaatcagacatttcccctgtttatggagatgggtttagggcaggtcaaaaagcagtgcgtaaatatggtctacaaaggacccttccccatatcaggatgacagggacttttccatattaagtacagagattccccatttaacagattgtttctcattctttctagatataaagcctggcctgttactattagagaaaccgaggccaaggtgcttaggcattatagcttcgacgaattggtgattttttgtacttgtaattattgataccgttgcggatatattgattacattcacatttttttttaatgtatcacactgctactttttggcaccac

SEQ ID NO: 99190 - DNA, 515 bp, Glycine max
  Clone ID: PAT_MRT3847_60582C.1
caaagtctaaatttggagtctcctcccagatatggaaacgaaaatatgtatcaaccaccaattcagtatttccccttggggtccaggatttgtgctggctgctatactgagattggttttggacgatatctaaattgcttgaatgcattctggcatcctgaatgcttccgctgccgtgcttgcaacctaccaatctctgattacgagttctccacatctgggaattacccttaccataaatcatgctataaggaaagctaccatccaaaatgtgatgtctgcaagcacttcattccaacaaatcctgctggtcttattgaatatagggcacatccattctggatccagaaatattgccctactcatgaacatgatggtactccacgctgttgcagctgtgagcgaatggagtcacaagaggcaggatatattgctcttaaggatggccggaagctctgcttagagtgtctagattcttctatcatggatactaatgaatgccaaccccttcatgc

SEQ ID NO: 99191 - DNA, 258 bp, Glycine max
  Clone ID: PAT_MRT3847_60583C.1
ccacagctgtatgagttaaactgtgtaaactataacaattagctaactttgtttgagtctttctttaaactccgttgggcaaatgatggcactatctacgcagaggccacctttggtgtgagtgcaatctatttgggccaatgaaaacttgatatttattggctccttgggcttttccaccacgaaatctccaacattgtagttgacccactccccaggcccacgcaagttacactctcagagagaactctggccgtc

SEQ ID NO: 99192 - DNA, 310 bp, Glycine max
  Clone ID: PAT_MRT3847_60584C.1
cccgcatatggggctaggcgggtcattagtaccattgtgactggtgataggtgcactgcacatgtataccgtgagacggaggattccctgactcataatgcgttttacagtgcaggatctgacaagggacctgtggctggtgtggcagactatgagcatcatcaaggtggtgaaattgttgaccgtcatcatttttctgtaagatagaacaactcctcatactgatgcgattttcctctagcattggaaactgacaagaaacagtcatgggcaatctaacgaccagcatatcgaagagccacaggtacaa

SEQ ID NO: 99193 - DNA, 461 bp, Glycine max
  Clone ID: PAT_MRT3847_60585C.1
ggctcgaggctctccgttcgctaaggagcctcgtctcacatagggctatacgagaggctcctctgatatcacgcatcacgccggataagaacgtgcctacatcgcataccaccgatgtgctaccgcaacccagaacctccacgctgctgagttccagaagagaccttgatgatgtccctgacttgcacaggaaggatctgaagcccatatctgagtctgtaatcgaaggggacactgttcttatgcctaaatatagtggaactagagagaaggcttgataccatatatggatagctgatgagagacgatgatatactgaggacctggcatgaatgatgtcaagaacatatctgataatgaacaggctatgtgctctgctacactagaagagtttctttatgttctgatattgatcggtcatggactaatgaacattttgacccggagcttacactcggaac

SEQ ID NO: 99194 - DNA, 216 bp, Glycine max
  Clone ID: PAT_MRT3847_60586C.1
ctcaaaccaatgcgcatagttaaacagttcaaaaaataaaatattcattgcagctgagttataatcaatgactaatacaattacctgatcaggcttgtcctaatccgaaactcttccatcaaaaaatcctgcttgcttatcacatctcgtgataactcctatgtaacagctacataagatccattggagttgatttcaaaatcacaacggtggaac

SEQ ID NO: 99195 - DNA, 177 bp, Glycine max
  Clone ID: PAT_MRT3847_60587C.1
tgggggggggggggggggggggggggggactaggaataggccctataggagggtatgggtacaaaagggcccttggggaaaacttggttcaattcttaaaagccggttattgggcccaaggaggaaaaaaaaacccgattgagggcccgagggggttgttacccaattgccccccaa

SEQ ID NO: 99196 - DNA, 421 bp, Glycine max
  Clone ID: PAT_MRT3847_60588C.1
ggctcgagcgcgacgatacccagagtgacacttttccgtacaatcttcctttagataaaaacgaagagctgaggggcgcggaatgggcactctgcaggctgccgacgcatcgccgagccgacgggatgctcgtgacatagcgggggacccctgggtaacgcgggaccctaggtctgacagagtcgaggatactgacggctcagaggccgtaacatggcgctgcggggcaacccactgcgctacgctctgtggcaagtcaagcttgcaaggcgagaacgaggagaggatccaccgaaaggcatcggaacctgactatgaactctgagaaaggacatcttcgcaggacatgaatgacatttagaatctcatcactgctgaaccgggcatgatgcatttcatgactgatgtactgagggatcca

SEQ ID NO: 99197 - DNA, 366 bp, Glycine max
  unsure (1)..(366): unsure at all n locations
  Clone ID: PAT_MRT3847_60589C.1
tggcttggaacctttgggctgatttatgtgcttggtgagaagatgatagaaggggacagtgaaatagagagcggccctagcgagcgactggcgcctagccgacttcctacaagctgctactactactactactactattgccgaccgaagaagacgttgactagaaatactgttactggaaggttcgaagaggtcatctattttgatatgccgaaggtggggccggtcgagcctactcttattccgactcctgcgcctgttggcctaggccttggtactgttcataataagtctattgataatggtgttgntatctttgttggttctactcttgtccttactgtttacgtccctgtttctcctgct

SEQ ID NO: 99198 - DNA, 326 bp, Glycine max
  Clone ID: PAT_MRT3847_6058C.1
aaagagttcaaaataaactagacataatttccaagatccataacaactaagggttcagcatccacaaggtaatcagggggacacaaccattgggttccttggtaaaaaaacacgggacaacaaacggggggggggtatataaacaggggggggggacccattgggaacccaaagggaacccttaatcttcttctttttgggggggggaaccacagggggggggcattttctgcataaagggggaggggtctcttccaataaattcattttcagcaatagcaaaaaatcccaggaaggggggggggccaatatatgaggcgaagcta

SEQ ID NO: 99199 - DNA, 381 bp, Glycine max
  Clone ID: PAT_MRT3847_60590C.1
taggccgcggccgcccttttttttttttttttggattgcacatttgtagctcttatataattattagtgtgatattgtattccctactatcaacaggagacataaaatccgatacaaacagccccacctttataggacagtgtgggatacttaatctagccggggcagacccgtgccctcaaaatagacaaacaacccgaaacatgaagtttgggcctgttatacctctcccagccaccgcaatacattaccaggtacaaaaacgcatataatgttggtcatactcttcctcctccacttcctgctaagggacttcttaccaacaccggtatgggggtactcgcggtactctgccacaagaaacgtttcatgtttgctctc

SEQ ID NO: 99200 - DNA, 111 bp, Glycine max
  Clone ID: PAT_MRT3847_60591C.1
tttcaggcggggctatgccctcagttcaaaaagtagcatcctcggttcgggttgtgataacttatatgacattacaagagaagacttggcttctggaggctcttgggggaa

SEQ ID NO: 99201 - DNA, 432 bp, Glycine max
  Clone ID: PAT_MRT3847_60592C.1
gaagatgacaaatattgagttattatcagcagtggtgaaatctcttacaagagacactgaagagaggagggaagcagtgggtctgttgctagaactctctgcccttcctgcagttagacggaagattgggagaattcaggggtgtattgttatgttagtttctatccttaatggagttgaccctgtttcttcacgtgatgcagcaaagttgttggatatactatcaaataatactcaaaatgcacttcttatggccgaggctggttactttgggccgctagtgcagtatttgaataaaggtgatgcatcatttttcaacactttgctcttatgatatgaagcatccattgataatgttaatacaagtgatttgagtagtatagttggtagattttgtagaaattagaaatttagcacctgttttaccaaagc

SEQ ID NO: 99202 - DNA, 271 bp, Glycine max
  Clone ID: PAT_MRT3847_60593C.1
gctgcgagaagacgacagaagggttcaccaaattataagatgaccacaagtttatattgttggttgaggaattagaaattaaaaccacagtctgttgtcaacagagaatgcatgcacgacttcaagttccaagatgtcttatccaagtatcatatatttttgtgatggcaacagctgaagtccctcgtgacccttccctatcataactttcaaaagcttataccaaaggggttgagtttatcaaaagggttaatatctcttaacatatcaa

SEQ ID NO: 99203 - DNA, 320 bp, Glycine max
  Clone ID: PAT_MRT3847_60594C.1
atcaaacacaaacaaattcttttttccgcggactttttaaaaaaaaatctctaacactaaaatttaatcaaattccataatataccaattaaaataaaaattaataaacttcaaaacccatttttactataaccaccatcatttataaaaccttcttttctacctttaaaaccaaaccccataatttttttctttctttttaaaataacccacttttttttctcatcaatccccaccaaattattccataacattatcttttccttctctaccatcaacctccccccctcctttcaattctctccttcccattttttaca

SEQ ID NO: 99204 - DNA, 283 bp, Glycine max
  unsure (1)..(283): unsure at all n locations
  Clone ID: PAT_MRT3847_60595C.1
ttcaaaacactcataacacaaagcacaaagcaaagctcatccttgagttaaaaaatggcagcagcttcttccatggctctctcatccccattctttgntnggnaaggcgtgaagntgggccnatnagcccnagaagtgggaagggtnagcatgaggaagaccgtcaccaagcaggtctcctcaggaagccnaanntacggcccagaccgagtcaagtattgggcccttctctggcgagccccgtcntacctaaccggtnattcccaggcgattacggctggga

SEQ ID NO: 99205 - DNA, 333 bp, Glycine max
  Clone ID: PAT_MRT3847_60596C.1
gaagatatcaacaagcataccgagccttcaatcgtatcaggaacacggagctcatctctgctcgagagctcttctacgctcattgccaaattgtggctgagactgagatcttcggtggcaagtcacttggcagaagagtgttggagcttttcacagtaccacgaatcaagccgtgcgactgtctcttcctctattattgttatcgctcaacagttctctgggatcaacatcatggcgttttatagctcaaccatctttcaagaggcaagttacagcgtgaaacagtcgctgttggcttctttcggctttggactcgtcacattcgtcttcgca

SEQ ID NO: 99206 - DNA, 477 bp, Glycine max
  Clone ID: PAT_MRT3847_60597C.1
acggctgcgagaagacgacagaaggggtacgatgatacggagaggaagcacaaaagaatatgcaattgctaacgcgcttttaaggtaggtgaaactcgttattacggacacaattgacaatgtttttttttctctaaatacgcgctaacagtagaagcactgaacaacacgtaatagaactcacgcagtcacacttgcactaagaactatcatgcagttgttgattacaattatgatataatacataggtttatatataatagacttccgtctcattataattatgtgtaaaagaaaaaaaattatttcaaaataagtattattttaacttttcaatagaataattattaattttattacttttatcctttataatattaacggttgataacaaagtttataaataaattaataatgatataagattaattttataaaattaattttttttcatctattttttttttttggctatgt

SEQ ID NO: 99207 - DNA, 326 bp, Glycine max
  unsure (1)..(326): unsure at all n locations
  Clone ID: PAT_MRT3847_60598C.1
tgcaaatatatattcttaaattttgagtataaaataaccagcatgtggagggtgcaagcaaaacacacactggagtgcaacaaaagttttaacattgaaaggcaataattacacttttgttgcatttatatctacactaactctcttcctgtttcttcgtagtcgtcaagatcatctttcaacaggcgaatgaaaagaaccagtgacacctaacaggtaatagaaagtttatattcggtgtacatggggagcgtgcanaattcaacaaaaagcttcttctttaaaaatgagcccccctcaagatcttgaattccagtgctaagaag

SEQ ID NO: 99208 - DNA, 583 bp, Glycine max
  unsure (1)..(583): unsure at all n locations
  Clone ID: PAT_MRT3847_60599C.1
tatgatgtatatgggccctataatgattcagtaatgcaaggaaaagatgccatctcgaacagatcttgaagcaaaccctggaggttctgagttggtcattgttaatcaaacaattgatcctgctctggaagaactgatacaaattgcacaatgcattgcattagactgccctgtctctagtttggtacaaaggcttgctgaacttgttacaagtcatatgggtggtcctgtaaaggatgctggtatcatgttagcaagatggaccgaaacaagagcagagttaaggacatctcttcacacaattgtattgcctcttgggtccttaaatattgggctctctaggcatcgtgctttgctattcaaggtattagctgacaacattaatatgccttgtagactgttaaaaggtagtcattacactggtgtggaggatgatgctgtcaacattataaagttggagggtgaaagggagtntttggttgatctcatggctgctccagggacacttatcccagctgatattttaagcaccaaggatagtgcctttaagtcttacaatcccaagattttgccaagtttaccc

SEQ ID NO: 99209 - DNA, 626 bp, Glycine max
  Clone ID: PAT_MRT3847_6059C.1
ttttttttttttatttaaatttataatatgagaaactttgaaaattctatgtggcctacgtcaagaaagttttttgcaaattacaacagaactgcatgcttattcgattattgcttatttcctactccacactccccacaaataaaaacccacatcaataaaaacatcaagattcatacaaataagaaattggcaatggatagattgttggacatccaattcaatcaaccagaagttactataatccaacataaaactcaatgcatattacatgacttaatcaagcattgggatcatcttcaaagcttctccttcatcctctcaaccgcggccctaagagtttcctcatccttgcagaaaacaaatctgactagattctttccctcttctggattcaagcaaaacacactgcaagggattgccaccacccccacctccttatgcagatatttacaaaatgcaacatcattttccattccaaaatgggtgtgatctgctaacacaaagaatgttccattgggtgggaataccttaaagccaacggcctttaatccttccaccaaaatagccctcttagctatataatccctcttcagctctacatagtaagagtctggtgctctaag

SEQ ID NO: 99210 - DNA, 478 bp, Glycine max
  Clone ID: PAT_MRT3847_605C.1
ctcaaatcaatgggaattatcagtgcacgcacagcactatgtgctcttgcctgactacttcagttgtagcaaactatggccttctgatgaccaccgcctttgctcccagtcctagctcctacaggagattgcttcttgatacgagcaccagacgaagatacccttctttgttatccttgatggtgacttgaagaccaatgaggatctttacatgatgactgaacatatgctagcctagacatctatgcacagtttgtatacattgaactgctatggaatggcttgctggacaagaaaggacatgcgggctcaagtgatgttcatgttaccagacggtgaccattgatgaaggaacgttagctctattttatgactttgacctacagtcgtagaggatgggatctattatatgaattttcctacacggatggtatgcttatgactgatacctaccattgtacatggtatggaaagccta

SEQ ID NO: 99211 - DNA, 190 bp, Glycine max
  Clone ID: PAT_MRT3847_60600C.1
tgctcaagatcaagcgcgcagactgaatggccactgtgacgagcatcgtatctaatgattaaactcggcagttgtggaacatacgctcactgtgccgcatgacttggcagaggactagatccggcttctttggctgcattaccttcagaactctcaaggtttgacgtctgtgcccgacaggctttaaatc

SEQ ID NO: 99212 - DNA, 294 bp, Glycine max
  unsure (1)..(294): unsure at all n locations
  Clone ID: PAT_MRT3847_60601C.1
nacgcntacanagtcgnaanttgnaatncggntcgangtcctgtccaatnncattnnncnannagaagnnnnggtaagtggaagcnnaacaaaanaagagtgtgngtgtgaganatggntanngattcgnggaagaagntggtgtagatgttgttgatctttctctgcanttgtanancatagnaggaacanngctcnacnccggtgtacctgtaccataatgttccggngggaacagttanngcttaacagtgagtactaacttcaagtgnggnncnccntcacttngnctgt

SEQ ID NO: 99213 - DNA, 634 bp, Glycine max
  unsure (1)..(634): unsure at all n locations
  Clone ID: PAT_MRT3847_60602C.1
gctcaaataggattgcatccgtttgaagattaaaattaaaagcatttgtaattgcatggttttgaagatttagtttgttgttatttaaaatatttgatttgattgatttgtcgtcgggtggaacaggattgtgagaaaagagaggctggatggaattgtgatgtttgcggatgatagcaatatgcatagcatggagctgtttgatgagattcaaagtgtgaagtggataggtgcagtttcggttgggattcttgtccattcaggtggtgcagatgaatcttcgaccctacagggtgaggaggaggccccgccaatgccagtgcaaggtcctgcttgtaatgcgaccaataatttggttgggtggcatacctttaataagttgcgatatgctggcaaaagtgcagtttacatagatgatctggcacctgtgttgcccagaaagcttgagtgggctgggtttgtgttgaaatccangttgctttgggaggatcttgatgataagcccgactggattaaggatcttggagaagtagaagggattgatgaaggattagagaggtccacttcgctgctcaaggaagactatgtggatgacccacttgcgggttgcagatcccaagtnttgctttggtgg

SEQ ID NO: 99214 - DNA, 322 bp, Glycine max
  Clone ID: PAT_MRT3847_60603C.1
gcgcaaccctgcacctgcacccgtaccgcagtgacaacatcggcgtgcataaactctaaaccctactatgtccgaagacaagtacgacgtgctcctgtattacaagtacgttgaaattcccaacctaaacgacctcctcaccttctaccactccaactgctcctgcctgagacttctcggacgtgttcgcctttcttctcacgacgtcaatgtcaccgttggcggcaacttatcctctctcaagaatgacatcgaagccctcaaagcctacagaaccttgtttcaccacactgatttcaagctcgacactagtcatcatcca

SEQ ID NO: 99215 - DNA, 835 bp, Glycine max
  Clone ID: PAT_MRT3847_60604C.1
ctcgagcggtttggtttcacacacacagaagaaaaaaaagagagagaagagaaacacacaaacacaaacagaagcatggaggtggaagtgatggttccaccggtggacttcaacttcgacagcaactgctcctcccccttcatcaccgccccttccagcccccaattcttcgcttccaacaaaccaaacttcttcttcagcgcccccaccagccccacacgtggcacctcctccttcttccacgactccccctcctcttcctctgttcttccccatgaagaacaacaagatttcgagttcaatttcagcggccacctcgaccgcccttctctctccgccgccgagctcttcgacggcggaaaaatccgtcctttgaagccgcctccgcggcttcaaactccggtaacatccccaaggtccaaactttctccccgcaagaagaagaaagacttcgacccttttgcagaggcaatgaaagaaactcttaagagagaagaacaagaagaaacacaacgaaggagggaaagggtttcggtttctggtcgtaaaggaagcaggtcgttgtcccctttgagaatctccgacatcgtcgtgtgcgactccgaagacaaaagcgtttcttcttcaacaagcaacaacaactcaaaaacatcctcgtttttgtcttcgattcccttcacgagaaaatggaggttcagggattttctcctcttccgaagcgcctcggagggaagagcaacggacaaggatcctctgaggagaaaatacgcggttctgtcgaagaacaacaacgaggatgttccgaactgcatcttccggtccacggagagtgatt

SEQ ID NO: 99216 - DNA, 592 bp, Glycine max
  unsure (1)..(592): unsure at all n locations
  Clone ID: PAT_MRT3847_60605C.1
ctctgatgtttaatctgcttggccttttgagggttcgcgtgaagcgtggtgtcaaccttgccgttcgtgatgttcgaagcagcgacccttatgttgtcatcaagatgtacaaccagactgtgtatgaccatgacacttttagcaaagatgacaaaatgggagatgcagaatttgacatctttccctttatagaggccttgaagangaatgaattggccttccaaatggtactgtagtcacaagaatacaaccaagcaagcataattgcctggcagacgagagctgcataacttatagcaatggcaaggttgtccaagttatgatccttagattgcaaaatgtggagtgtggtgaagtggaaatccaattgcagtggattgatcttcctggttctaagggtttatgatcttatgacttatgaggtgtttgtgtattaacaacttcatgcatataagctggcttttgccttggactctaagacttgttgaggaacaaattactgaacttgtgtttattcccggaatgtatgtgatgtattagtacagtttagaacttgtaatttttcatgtttaaaaatttatcttctggttct

SEQ ID NO: 99217 - DNA, 388 bp, Glycine max
  Clone ID: PAT_MRT3847_60606C.1
aaccaaaaatacaaggatgatgaaatgtcaaaaagcaaaaacagatgggaatgtactttaagtacaaacaaacaaagtggggtggccggctacaaatgctttgcaaatttttcacacttaaaagcctgggggcttgtagccgataaacctgatgcactgcacttggcaaacgttgtccaatccgatgatacggatgaaacccttggggtatgcattcttaacctcttgaaactccttcaacacctgagaaccatcattcgcaccaaacataggcagcttccacatggtccaaaagcgttcatctattatcctggtgacctgttgtgctcacggtacataaaccgtgctcaaactctaattccaagcaaggatccatcccttcctaaaa

SEQ ID NO: 99218 - DNA, 860 bp, Glycine max
  Clone ID: PAT_MRT3847_60607C.1
aaaaaaaacacacaagcaccacaataacaaaacaaaaatacaattcaaagatcacattctccttcttctcatgttatgttaataaggtttctctttctccttccagaaccaaaatcccatttctggaaaagaaatggaggaatcagattcaacaccaaagtctctgatggagaatctgcttggccttttgagggttcgcgtgaagcgtggtgtcaaccttgccgttcgtgatgttcgaagcagcgacccttatgttgtcatcaagatgtacaaccagaaactaaagactcgtgtgattaaaaaggatgtgaatcctgagtggaatgaagaccttactctttctgttataaatccgaatcacaaaattaaactgactgtgtatgaccatgacacttttagcaaagatgacaaaatgggagatgcagaatttgacatctttccctttatagaagccttgaagatgaacttaactggccttgcaaatggtactgtagtcacaagaatacaaccaagcaagcataattgcctggctgacgagagctgcataacttatagcaatggcaaggttgtccaagatatgatccttagattgcaaaatgtggaatgtggtgaagtggaaatccaattgcagtggattgatcttcctggttctaagggtatatgatatatgatcttatggggtgcttgtgtattaacaacttcatgcatataagctggcttttgccttggactctaagacttgttgaggaacaaattactgaacttgtgtttattcccggaatgtatgtgatgtattagtacagtttagaacttgtaatttttcatgtttaaaaatttatcttcaaaaatggttctgggcc

SEQ ID NO: 99219 - DNA, 331 bp, Glycine max
  unsure (1)..(331): unsure at all n locations
  Clone ID: PAT_MRT3847_60608C.1
ctgccagacgacaacaaaaagaggganttgttggaacaaaggggtgcttccaacacancgccggtggtgcttatacacagctcccttggatcaccggtgtctggagggattatattcacgatgcctgctccactggggggaagaataatgcatcgccgatgaagagaagaggctgagcttggtctacgcgctagtggcggtaagctatcaagcaacaagacatggaggaggatccgggttcaagggggtaatgggaagtcagggggactatagtgggatactggaaattactccctgggaagtgaagctgctacttccaagactcatgtac

SEQ ID NO: 99220 - DNA, 479 bp, Glycine max
  unsure (1)..(479): unsure at all n locations
  Clone ID: PAT_MRT3847_60609C.1
aaagtccgcccacgcgttcgctcattggttccctttgttccaggggaatgctcgattcagctcttgaattcaagaaccagttgctgaaagaaaactgcaagcccaccgtcgttacttacactattttaatagaagcatctcttttgcagggtgggattgatgaacaatgaagctcttggatgagatgttggaaattaatcttgaacctgatatgttcacttacaactccatcataaggggtatgtgcagagaaggttacgtggatcgtgcgtttcagattattagcagcataagtagcaagggctatgccccggatgtcataacttataacattctcttgcgaggtcttttgaatcagggcaaatgggaggctggttacgaattgatgtctgatatnggtgcaagaggttgtgaggctaacgttgtgacgtacagtgttttgattagttcggcctgtcccgatgggaagggtgaggaag

SEQ ID NO: 99221 - DNA, 430 bp, Glycine max
  Clone ID: PAT_MRT3847_6060C.1
cttccctccccaatgtataatcacgcccagggccctactcacaagaacgactactaagaaaccatcccaccctcccttcatatcacagcaagccctttcggacagacctctcccagaactgacccagccttgcccagaaaggccccagatgggggaaccaaaaggtcattcccgaagacgcatgaaaaacccagaaaccaaacatcccatacctccatccagggcctgtattatcactaccaactgcaaattcgctagctaccaaccaccaaaaccacatgccccctaaatgcagggggggcaccccgaagctccaaaaccgaccaaggtatctaaccaacagcacaaaccgccacacacaacgaacgctctgctctatcccgccctacccataacattacatctgaaaagcgaccccctcccttgctct

SEQ ID NO: 99222 - DNA, 315 bp, Glycine max
  Clone ID: PAT_MRT3847_60610C.1
attcggctcgagctcgagccgaaaaaaaaaaaaaaaaaaaaaaaaaaacaaaaaaaaaaaaaaaaaaaagggtaacataaaagaattataaaccttattccttttcggggcccatcttctctagcggtccctctttccgtttggacctgtattctgtttggggccgttctttcgattctcgttcggcattcttcattcttttctctagtcctggtctttctccattttttacaatgtgttccattcttcgaagcgtctttaattgtaatctatctttcgtctccttgtggttccctgggttaaatcggccttttc

SEQ ID NO: 99223 - DNA, 302 bp, Glycine max
  Clone ID: PAT_MRT3847_60611C.1
acgcatgcacatactcaatctccatcggaagatacgctcgttgagaccaatatagcgcaaatgattgcgttctaaaaggcccatgcaagctcaaattggctcttgcacgacactgaaaatcaacgcattgaagagctagacgtctatgactttactggcgctggatgcatagctttgtccatgcataatactgatgagttcatactagcttttgctgaatcatcgatgaactctgcttaccagagaaaacgacctatatatcttagcactaaaaataccattttaaagaactattattgaag

SEQ ID NO: 99224 - DNA, 729 bp, Glycine max
  unsure (1)..(729): unsure at all n locations
  Clone ID: PAT_MRT3847_60612C.1
gaaacagtaacatatcaaaatttgattcttagttgacaaaattgtacactgcccaaaagatgattacatgggcatcaaattcaacagccacaagcaatagtaaaaggtaataagaaaaatgaagagtacaaactacatggtgatacttcattgcctgattttttgagtttctcaaaactgttaacaaaaaatttgttgatgctttgccaacactctatctggccgcagccgtctcttgtctgaggaaattcagctgattaaccttttcttttcttagncttggttttcttgggataagatttcttctcagcatggtcatcatcttccattagatgctcaaactcttcataactagcaaatggagatacacctttcttaccaccactttcatgctttcgttttcttttgccagcttcctcctcatcaccatcagaggcatcatcaacatctccaacctgaatatcaatgtcatcatcatcaggtggagaagcatcaacctcttcctcttccatatcagnnggtatatccatattcatctctgcatcactaacatcaccaatcaagtcctcatcttcctcatcagctacttcatccaaatcatcataatcatagtcactgtctggtcctaaagttggatcantagaatnnaacnnnntctcaatctcttcattnncactctcatccccnnnatcaacctcaccatcatcnncatcnaacanctnntcnnnt

SEQ ID NO: 99225 - DNA, 257 bp, Glycine max
  Clone ID: PAT_MRT3847_60613C.1
ggaaaaaaatgggggccatttttcattcccatttttcaattaaaatccaactggcaggtgaaaaattttgtgggggggaaaacttgcataaatgagaaccggcagggtaggtgggctggaaaagacttggaaataaccggacgccaaattggctagattttttcttcccattaccttatttctggatgtcgtggaaggatgatgtaaaggaaaaaactggcgtagatggggtttattattttgggggggggggggaa

SEQ ID NO: 99226 - DNA, 790 bp, Glycine max
  unsure (1)..(790): unsure at all n locations
  Clone ID: PAT_MRT3847_60614C.1
aaaaaaaaaaaagggtattttccagttttggtttccaaaaaattttacgggcagtaaaaaaaaagccatgctcccatttttgggaaccagaaaataattaaaggaaggcttccttggaactttcanntttttttttcaaaaaaaaattttccatgtgaagnttataaaaataataatntgactgttaatnaanattanattgaattaaccatagatnacattgactgggatgatcatnaagaaaaacgcaaagatcaaagtatatttgggagctcttaataagaagaaattgnctgggaagtttcaggttttaaaaggtagattnaaanagatnaaggccaacatccagaaaacatcaagcaaggaaaagccacaagatgagcaagctggttcagtcgatcaaattaagaanaaatatgnattttcttcttccaatgaaacaagcgtcgntaaattggcagaaagcaagntacagtagaacatnaaaaaantgcagggtatcaaccttcgaaccacagaaatgcaagataaagcaaaatcattttcaacattggcaaaccaagtgctgtggactgcagaacaggaaaggcgaaattaagaagcaccaacctcatggattacaccaaaaattacaaagccccccttttacccctcttgtacttatgcttctttattttgtgactggattctcatctcagtttttgggttgatattgaatgaaagtaaattaagaacaggggggagaatctcctcctgagggtcactcgatctaaaggatcagggcttacga

SEQ ID NO: 99227 - DNA, 494 bp, Glycine max
  Clone ID: PAT_MRT3847_60615C.1
ggctcgaggttgtgcttcacgactcgtttgacaaatatcacagacaaaatagtatttgtgacctttgcaatgaaacataaaatgtgtttgtagtgcagaagagaatttagagtcataaagaaaaggatgatgacatgctccgtggattcgaacaacaaagatttggacataagcttctatgttttcaagccaactgcagtcattgttgatcatctagttcatggactccaacagctttgcttactcactcagaatcttggttgagtacaaagctctatatttaggagcatgcatggaaatactatcatatggtatggagcatggcataaacggactagtgatgaaaaagataagctgacagcaaatcttcaatcaatgctaaccaataatgtgacaggaatggcagttctgggtgagcacaatttccttgatgcataggcttgagaaactaagagatggcttctttggctgtgaagttctacactggagacata

SEQ ID NO: 99228 - DNA, 254 bp, Glycine max
  Clone ID: PAT_MRT3847_60616C.1
ggaaaattatcccttcagaagaaccgtcgcatctcatggcaccttgcttctgaccttgttgaagaagagcctgaaaagggtttggttgaagagaaggaagaaacagtgtttcagaagaagaaggttttgccttgcctttgcctgagggcattgtgggagagatctgtcagcttgcaaggaacttgacatgaaatctaactctggaggaggctttggctgagtatgaaggaagggttagtgagaaagattgttgg

SEQ ID NO: 99229 - DNA, 429 bp, Glycine max
  Clone ID: PAT_MRT3847_60617C.1
gaaaagagatcattctttcttactgtctgtgactcaccaaatagcttgctgacattggacgaagaatggcttctttcattggactctctttgttgctgctctttatcaattaccccttgctttccctctccaccaaccctggaaggaacgctctggatgcttcgagaagcaggatttctgatcccaacattagtgccgtagtaggtgcgacccaacactggttcatccctgtactgcggctcacatgttacttgcgactgcaacaataatctgattcaggctacacttggtcgaatgtaacatttctggaactctacgcccggaacttggccagctacatcatatgcaaaacttggagctctacatgaaagaggtaacacggaagattcctatagaactagagtacttgaaaccacttattagcatgga

SEQ ID NO: 99230 - DNA, 625 bp, Glycine max
  Clone ID: PAT_MRT3847_60618C.1
aaagggtttggttgactcccttttccaagctccacaggatgctggaactcactatgcaatcataagctcctacaagtacctcagcactggacttcaccagtacttgaacaacaaaatggatggattctacattactccagcttttataaacaagcttattattcacatctgcaagaacttcataaccctacccaacatcaaagttcctctcattcttgatatctaggaaagcaaaggacaaagaaaatctttccaatgtaagcttatctttgccaagatagaaatcaaccccatcataataagtactaaagagtgtaaaagtgaaaatacagaagatccagcaaaactaatcagacagaaataccataatactacagaatgatcaagaaagaaagaatacactctcttatcaacaatcttgatgcagaactagtcgtctagtaaaaccacacaatacactatgaacaaccagatataaataccactctcatgaacattactaataaccccaccaatgtgccacttgcaatatagtcaacagaaaagagaacccccgtgttgcatcatggtcgccggtgacaatttctcgacactctatgcacctctcatgcgtaataaacgtgtg

SEQ ID NO: 99231 - DNA, 307 bp, Glycine max
  Clone ID: PAT_MRT3847_60619C.1
ggtccagcaaagaaccagttatgaacattatctagaaaataaggagagactattaaacattctgagaacaaggactgttgcattagggactgagagcaaccacttccccactttgagaccccggaattacataactagaacgaaacgggtgatggaccatacccagatctactattctggttcactagccccttaggagcttcacttttgtggaacgtcaaaatctccaaacatatggcagggtcggtcggtcccagccttaggcaaaaccaactgatctactgagaggtgtacgtcaggcagataa

SEQ ID NO: 99232 - DNA, 284 bp, Glycine max
  Clone ID: PAT_MRT3847_6061C.1
gataccatgggacaaggggacctaatatattactaaataggcgtataaacatacatgtcaaacctatatacattttattcgccgtttccgattgaaacctttaacaacggaatatcacccctggcttaaataaaaaaaccatccaaataagcaccaaatctcctttcttaaaagtacattgtcaacgctgggagagtctaattacagagaaactttgggatcctctcttaaaaatcccagttttgccaaacacaaatattcgagacaagaaagaatcactttac

SEQ ID NO: 99233 - DNA, 870 bp, Glycine max
  unsure (1)..(870): unsure at all n locations
  Clone ID: PAT_MRT3847_60620C.1
ctcaagcctttttcggcaatggtatggaatatggccccgcacaagatttctgggagcgacagttccaacttcgattcgacttgaagagagggaggaaggtggaaattggcaaattataagaatacgctgaaatgtcagcgcttttcaatttccattcatttctaactgtgatacttctgggaatatgtgcctgcacttatttcaagatgcagtttccggcgatccttgaccagaaaactgggtttccacgcgtccgtacggctgcgagaagacgacagaagggggaagtaaagaacagaactaaacactaactggatcaaaactaaagggtattcttccggcgattgtattgtatattgacgctcacagatttctgggagcgacagttgcaacttcgattcgacttgaagagagggaggaaggtggaaattggcaaattataagaatacgctgaaatgtcagcgcttttcaatttccattcatttctaactgtgatacttctgggaatatgtgcctgcacttatttcaagatgcagtttccggcgatccttgaccagaaaactgggtttcgtggtttcttctggaaggcggcaagaataggggcgtccgttctatgcttgaccgcagtttgatatgcaaaattcagatttctaaattcaaattatttgcagatctacaaaatgagagcttgtacttttgatttcattggagcccctgaaatcatagagttagctatctattttttttcgttgttgaaacgaattggagtttttgccattaatccccaagtttattacatggaattcgaatttccagcccaaaaaaaaaaaaaaaaaaaaaaaaaaannagcggccgctctagaggatcca

SEQ ID NO: 99234 - DNA, 674 bp, Glycine max
  Clone ID: PAT_MRT3847_60621C.1
ttctgtacggccgctcgaagacgacaggccgggacagaactaaacactaactggactaaagggtattcttccggcgattgtattgtccatattgacgctcacagatttctgggagcgacaattgcaacttcgattcgacttgaagagagggaggaaggtggaaattggcaaattataagaatacgctgaaatgtcagcgcttttcaatttccattcatttctaactgtgatacttctgggaatatgtgcctgcacttatttcaagatgcagtttccggcgatccttgaccagaaaactggacttgatggcatgacatatatgctttcctgacaggtttcgtggtttcttctggaaggcggcaagaataggtgaacgtttaagcccgtgggtagctgcgggttgctttatgatgggcgtttcaataatcttcttctaagttttgttttactcaatagggcgtccgttctatgcttgaccgcagtttgatatgcaaaattcagatttctaaattcaaattatttgcagatctacaaaatgagagcttgtacttttgatttcattggagcctctgaaatcatagagttagctatctattttttttcgttgttgaaacgaattggagtttttgccattaatccccaagtttattacatggaattcgaatttctagcag

SEQ ID NO: 99235 - DNA, 1021 bp, Glycine max
  Clone ID: PAT_MRT3847_60622C.1
actgtttgtttcgttagttgtctcgatgatttcttcgataatattataaaatgatgctaatataaagtacagaactaaacactaactttatattaaccaaagagtatgatttcaatgtagtgaattagagaattaaggtcaaaaactccacttcgtttcaacaacgaaaaaaagataattaactcgggtgaaaaaatgagtttcaaggactccaatgaaatcacaagtacaagctctcattttgtagatcggcaaataatttgaatttagaaatctgaattttgcatatcaaactgcggtagagcatatagaacggacgccctattgagtgtaaaacaaagcttagaagaagattattgaaacacccatcataaagcaacctgctgctacccatgggcttaagcgttcacctattcttgctgccttccagaagaaaccacgaaacccagttttctggtcaaggatagccggaaactgcatcttgaaataagtgcaggcacatattcccagaagtatcacggttagaaatgaatggaaattgaaaagcgctgacatctcaacgtattcttataatttgccaatcttcttcaccttcctccctctcttcaagtcgaatcggagttgcaattgtcgctcccagaaatctgtgagagtcagaatttccggtgatacgatacgatcgtgtttcttcgtcggaagaatacccttttggtcctgctagtgtttagttatgttctacgaaacgagagaagaggaaaggaaacagcatatccataccctgacaacacggatacgctatttctcctggaacgcaacacgatcgtatcaccgcacatgcagatccgcagcgaacagttgtctcgtaacgagtatttcaactacgtttcgctcagaggagtgtgagacaggaagacttgccagttatatgataagattgcgttgccacgtcggtgcttttccctttcgctccttctcgtgccatgttatgcctggggtccttcccctgctctcatgtcgcagt

SEQ ID NO: 99236 - DNA, 3528 bp, Glycine max
  unsure (1)..(3528): unsure at all n locations
  Clone ID: PAT_MRT3847_60623C.1
cgggcgttcanatcgcatacagaacccccgaataattccggcgtcggctgcgtactaggctcgaggtaacaacgaacaccagataacaccaccgaaacacctcacggcctggtgcctatatcgacaacacccacattatgtggcggccaacagcagcagtggcgatcgcgtcactgctcacattaccctcagcactcgcagagatcagcctaagctcccagaagtctttcgttcgcactgagaacctctttgcgtccgacccctacctgtccatctacggcgacaggcccgacgattgccctccttgtttcaactgtaaccttgacgacttcacgtgtcttcagtttgccaactgtaccaaaagcagcggcaagtgctcctgtcctcctggatttggtggagaggactgcagtcagccactctgtggatctctccccgaaggaaaggacaggcttccaaggcaagggaaagagtgcgaatgtcatgaaggatgggagggaataaattgcaatgtttgcaagacggacaacgcatgcaatgccatgatgccgaatggagaagatggtgtctgctatcgcgagggactggtcgtgaaggagaactaccagatgtgcgacatcacgaaccgcaagattatggatcagctcaaggaaaagaaggcacaggcgacattcagttgtaatgctgagagaggcgagtgtaatttccagttctgggttgaccagagggagagcttctactgcggcctggagaactgcgaatggagcgctgaggcgacagaatcgaagaacacgacgagctacaagtgcaaggatatcaagtgcgcctgtattccggatcgcttcctctgtggagaggatggcagtgttgacattggcgacttcctggaccaggagatcaagggcccggctagcttcagctcagtgagcaccgccagcggctcgcattcggctttctctgagcctgctatgaacggcttgatccagaatatcttcggcgacgaatcgattactctcaactgtggcagtggagaatgtctgtacaagactgaggtccctggatacgagcgcccggtcaagaagatcaacacacccttgatcgcaggcgtcatcgctggatgtggattgttcgtcgttgctgtcattttgattgttttcttcctggcgcgccgcaactcaagacgttatggacctattcaacttggcgaggaggaagaagatgatgctgctaaactgcttgcggaccacaagccagcatctctcgccttcgagaacgtctcttaccacctcaagggcaggcagatcttgtctgacatttccggtgcggttcaccctggtgagctcatggcaatcatgggcgcctcaggagctggcaagacgactttcctcgatctgcttgctcgtaagaacaagcgtggtactggcctcggcgatttctgggtcaacggcgagaagatcaccgacgacgacttccgcagcgctatcggatttgtcgaccaggacgatacaatgctacccacgctcactgtacacgagactattatggattctgctttgcttcgactcccgaaggacatgagctgggctgtcaaggcacaaaaggtcgaagacgttgagaaacagctgggcatctatcacatccgtcaccaacttattggctctgaagaaggctctggacgtggcatttctggcggcgagaagcgcagagtgggcatcgcatgtgaacttgtcaccagcccttccattctcttcttgtacgaaccgacttccggtcttgatgcatacaacgccttcaacgtcatcgaatgtctggtcactctcgtcaagtcctacaaccgtactgtcgtcttcaccattcaccagcctcgctccaacattgttgctctgttcgaccagctcgtcttgcttgctcaaggtcgcactgtctacagcggacctttctcaaaatgccagaactactttgacagcatcggctactcttgtcctcctggtttcaacatcgctgactacttggttgatctgaccatgcacgccagccgacctgacaatccaattcccgaagacagccacacctacggcgaggatctcgatggcagagccacagtcgccagctcgaccatggcagtcaaaagtatacctagcatcatcagcaatcccagcattgaggaaggtagaccaaagaacaagcgcaagtcaagtattcgtcaacaacaggagaggcagctcttcagtcggaagagcaccgaccgtgctcccgctcccgccagtttaaggagtgatggtgacagtattctggacaaagacaacaagtgggtcaagatggcaaggcagaacgcacagggatcgtccatcaatgaagatggtcacgatctacccccggatgctggcaacaacaccaacctcgatgtcctcgtctcatcttacgaggcgtccgacgtcaaggccgaactgcattccgacatcgagtctgcaatctcagacgcctctgaatctaacggcaaccctcttcacgcacccaatggcaactcctctggcaaagttcgtggctaccgcaagcctatgctgcccacgcaattcctcatcctctcccgccgcacctggcgcaacctctaccgcaacccacaactaatgctgacacattacgccattgccatcctgctcgccgtcttcctcggcttcctcttctacggcctgaccgacgaccttaagggcttccagaaccgtcttggtttcttcttcttcctgctcgccctcttcggcttctccactctcacgtccctcaccaccttcgcgccagagcgcctgcttttcgtccgcgaacgtgcaaagggatactacacacctcttgcctactacttggccaaagtcgtcttcgacatcgttcccctgcgcatcctgccacccgccatcatgggctgtatcgtgtacccgatgacaggcctagtaccaaccgcccccgagttcggcaaattcatgctcctcctcgtgctcttcaacctagcggcggcgatgatctgcctgttcctcgggatcgtcgtccgcaaccagggcgtagccaacttgctcggcgtgctcgtcatgctcttctccctgctctttggcggcttcctgctcaaccacgagaccatccctaagggtctgctgtggttgcaatcgctctccatcttccacttcggcttcgaaggcctgatcgtcaatgaagtgcgctacctgtctctcgtcgacaagaagtacggcctcaacatcgaagtgcccggcagtgcgatcctgagcagtttcggttttgatgtgttggcgctgtggcgtgatgttgcggggttgggagttgtgtcgggtgcgtttttcgtgcttggatttgcggcgttgcatttcttgcttgtggagaggagatgagtggggaagataattgtgttgtttgagatgaggggaagctattgacttgtgggtgttgaagagtgatgtaggatgttcatgtgtaaatgtaggtttcttggaatagatgtgagagaatatatatgaagtttttctg

SEQ ID NO: 99237 - DNA, 1763 bp, Glycine max
  Clone ID: PAT_MRT3847_60624C.1
ggctcctttgtctttcactctttgtatttttcgctgactccggcgtcactttccgttgagtctccgtccaccggcgtggcgatggactcggaatcttcaaactccgattctcaaccgcaccctctctcgaacccaatcgacgacgcgtgccacgacatgagctccctggaagagctcgcgaaccgcggcgcgtggcgttccatcattgacaaggtctcacgcgcccgcgccctctctctcctccacaagccccacgaccacctcacctaccttgccttcaacgccctctccttcaccaaactgcgtcgtttcaacgaagcctctgcggaactcgattccctcgaagacctcgacagctcccactaccgctacgaaacctaccccaaaatctaccccaatcggatcggatccatggtccccttctccctccggtggctccacgccctaatccccatcaaattagggcaacgtcagcaaggcatggaccgattctacattcttctcgatttcgtgcgcgggaagattaaggaaaaggagaaactgagcaacctcggcgtctcccttaatctgtggagaaaaagagaggtttttgtggtgaattgcatcatagggaaccatttaagtcagaaagagtttggggtgtgcttgagcttgatgaaggagcttctctctcgcgattgttctgaccctttgctggtttcccagcttgggtacatgcagttgcagattggggacttggagggtgcgaaagtttcgttcttgaaggtggaggagttggggaagagtaatgggtcgttgagcgaggttgagtttaggaaccttgtgaataggaacaaggcgttggtgtatttggttgggaaggattatgtgtcggcggtgagggagtacgaggagtgcattgagagggacagtgcggatgttgtggcggtgaacaacaaggctctgtgtttgatgtatctgagggacttgtcggattctattaaggtgttggagagtgcgcttgagagagttcccactgtggctctcaatgagactcttgttgtcaatttgtgtagtatgtatgagttggcgtatgttaatcactctgatattaagagaacgcttagtaattggattgctcgtgttgcacctgatgattttgatgcatcttgtactcgtacatgagagttagcggagacatggtgcgtttgttgctttagtgtgtgcttaaagcacctagaaatgcaacttgccagcatgaagaaggaaggtaattgatggtcaaccattcgacagtaaattcattctgggccttgtgctcactgttggccattcctgatgaagaggtacaaatatggacaaaaataagttggtgtttggttcacatcttgttcatctgtaagctttcaaaacccaaaagtgtcaaaattctatacaattgagaagctaacaaaactcttgcaatacattcattaaattcataaagggcattgcattgttttagtgttggtttctttattacagtatcctgctgcaaaaaaaggaagatctcagtatttttagttggcttattcctgttgactctactgcaagtctccaaattgatatttgcatatagcttttatttcctcatcggacctcgcttctgtttattgaatatggttggtagacaatgacataaaaaatgtaataccaaatccttagcaactgatgatttgttttactacaaggagctgcaatttttcgtatcatttgattgaatgtgtactgtttttggctcacgc

SEQ ID NO: 99238 - DNA, 563 bp, Glycine max
  Clone ID: PAT_MRT3847_60625C.1
gttactgtcacatgccaaggctgttgaattataccgcaagcactttcaggcaaagcaagggggaaccattggcattgttgcattttccttcatgtatgacccacttagagatgaagaatgtgataggcaagcagtgagtaggggcttggcttttgacatagcctggtaagttgttaagaaccaagaagcagcagttaacacctgcaacaaaatcattggaaaaaaaatgtgaagagttttgcttatgacaatcatgcctacacaaactatttttatttttgaacatgcgtgaaaacaaaaatgacccatgcatggcacgggtatcttactaattattaatgaaaagaatcacagcacacgatccttgtattttttatttttgaaaaactacaaatgttgattttgtgatatgtcaaaacttagatcccttagtcttttggttttaaacatgttagatgcggctgaaatgtaaggattctagtgtaacctaagattctttatttatgataaatgctaccagcaaaccctatacccttgttctttgctggaaaaaaacaaacccc

SEQ ID NO: 99239 - DNA, 207 bp, Glycine max
  Clone ID: PAT_MRT3847_60626C.1
cgctcgagccgctcgagccgtgccaactttgaggacttacttgtctgctcaagttgttctcaaggcgaggtaggcccatggggttctcattgacaaaatagtttctctcagctgcaatgggaacatgcatactaacgatgtgcttctcttctggtccaggcaaggcaagccgtgcactgtactaaaaggattttgggagttatgatt

SEQ ID NO: 99240 - DNA, 146 bp, Glycine max
  Clone ID: PAT_MRT3847_60627C.1
gtacttaccaaacttaataatgataattgcctgtgttaatccaacaaagaatgggtcgttgaaactaaagaaaaacagactaagattggcccaaactgaaaaaatacaaaaaaatggcttgagatcaagcctaaccacccaaaacg

SEQ ID NO: 99241 - DNA, 346 bp, Glycine max
  Clone ID: PAT_MRT3847_60628C.1
gttcccttacccatcccaattctcatgggctacctgtgttgcgatgcccactcctgaatcgccacctgccacccccaccacaaacccctcgccgcaacaccaatccgacactttccctacgccgacatcgactgcgccgtcaacggatttttctccgacaccttactgggccgaggcaggcacggtagagtctacagagccaccctggacgcctgaaagcttcttgccgtcgtcaaaacgaccaaacttgtcgccaccagcacctctaaaaaccacgctcccaaatgcaccggctgcggtaactgcaccagtcccgccgaaaacgagatcgagatcctcttccaaa

SEQ ID NO: 99242 - DNA, 1282 bp, Glycine max
  Clone ID: PAT_MRT3847_60629C.1
tagatatctctcttgggataaattttcattttctttcttttcgtaatttgcttcatcgttatgcctctggaccttgggaacttggcgttgctactggacctgacttcgccgcggagcgtgattctggagaggaaagcgcgtcccgccggatccgacgtcgttttgtgcgcgccgccgtccaagagggactacccctcctcctcctcctacgcggtggtggcgcgtgggaagtcgaactcggagaagaacggcgtggatttcgacagcgacgaggaggaggaggaggaggaggaggggggaggcggcggtggggggttcgtggactgggagacggaaatgcggcagagagtgagggagttcgaggagaggagggagctcgagaagaaggccgaggagttgcagagtcgcgttggagaggaaggcgaggaggaagaaaccgaggaagaaaagaggatgagagtcaggaaagagctcgaaaaggtagctaaggaacaggcagagaggagggccactgctcagttgatgtttgatttgggtcagaaggcttatgggaagggatcctatggacgtgccattgagtttcttgaagctgcacttactatcatacccggacctacattattcggtggtgagatacaaatatggctggctatggcttatgaagcccataaccgccataaagattgcattgctctataccgacaattagaaaagacgcacccaagtgttagcatccgacgccaagctgcagagcttcgttacattttacaagcgccaaagctcaagatatcccaggaggagatggtgactatacccttgattggttctacttatgacagctatgcggcaacatggagtgataaatacaaggacaatgataaaaaaattagtggatcagtcacgaatcagcttccatcatctaaagattaccttggggactttcttgtatggaaacctcctgtcgggttagggaaaaatcgagctttctgggttggcctaacaatatggttgggattagttggagctgccctctttattcaaagataaactacacttaaaacacggagtttgagttctccaatttgtgatgtataccttctaatttgttgttatagtttttctttttagtttatatgatgtgaagtccatgttgtaacattattatagaatgtatggaatagatttgtaaatttattgtgtgtatcaaatagatgaagatgttatattatcctactaaaaaacttttatgttggcattacaaaggatgtgcagcaattctatt

SEQ ID NO: 99243 - DNA, 424 bp, Glycine max
  Clone ID: PAT_MRT3847_6062C.1
ccaaaaaaaatgtccgggaacaaaacctgccggcccgggtttggagaattaagaacgtgcttacaataatatgggtcctgttcaacaactaacaaaactagaagaaggtaatgaataccgtacacttcctactggggaacaaagtacaaaagaaccgcgggctcctaatcccaacaagttgactcaacgtttaaaaaggagcaaaaacaaccttgaaggttgggaaggctcttttgggttttagagcacttgtgctgcctcctgtggaaatgttaaacctggctcaaattcgcctctctttgcagaaaaagtgggcgcattagtcaagcaaaatctacattagttaaacttctacagtatgaccctgaaaagtctcctgaaaatgttcgataccatggccctcctcaagtaatgctagcatact

SEQ ID NO: 99244 - DNA, 252 bp, Glycine max
  unsure (1)..(252): unsure at all n locations
  Clone ID: PAT_MRT3847_60630C.1
gtcgcatgcnacgcntacgtaaagctcgggaattcggctcgagnnataatagcntcaancagnaaagttatntgnctcctgantcannntnacntggtancntgntcttgagactggcaatntcggtttcngctcaggtctataaccggagcaggccatgtggctcagtgtctgtatgatgcggctnctagatctcnatgaactcnaggcanntncccanggagagnatcataactgcttcaggnagttnac

SEQ ID NO: 99245 - DNA, 242 bp, Glycine max
  Clone ID: PAT_MRT3847_60631C.1
aactcacatatcaaaattgaaattattaaataatttgtctgctattcattctctcgacagcggtggctactaccataacagatcatgaaccctcatcacttgccccgcacgtgctcgactacaccacctctacattctactactacacggaaaaagataacgatgatctttttcacgatcaaaacaaatcctccatctaatggctgcggttaccaacggttaaccattactgcacccaacct

SEQ ID NO: 99246 - DNA, 479 bp, Glycine max
  Clone ID: PAT_MRT3847_60632C.1
ttttttaattagattaggggaaagacgattaatagcgtttgttcaaaacatgtaaactattttaagagaaggttagcaattgtagagtaattaaaaaaatcaattgaaaaattacattgatggttgaaatcataattctaatcttttctaattgataatctcttgacttatgaatcttccttagatttgcacctattccactcagtatcccttcatttgttatgcttacagaaaccccctgatttttcatcaatttaaaagtttaacagagatgactcatgtgcattagacatgatatataatgatttttcgttcctaaaatatccttttcttctcctctaaacacattaggaaaaataaaataggttgtaggggggaacatattgttctcgccttcttctggtaaggctgtaatttatccaaccaaatattgaattgataacttagtgaaattaaattaactacagtacattagaaac

SEQ ID NO: 99247 - DNA, 258 bp, Glycine max
  Clone ID: PAT_MRT3847_60633C.1
gctcggcactcggctcgacctatcatcagcacttccttagttcaatatgggcttagcccttcactctctctctttcttcccttatgattgctactcttgtcgagtgcatgctttgcctttagctccagcaagctcaacgagtgccatactcaacaatctcaacgcgctggaacccgtccatcgcgttgagtccgaaggtggtgtgattcatccatggtactctcaacaccctgagctgtattgagctggtgtcactgt

SEQ ID NO: 99248 - DNA, 351 bp, Glycine max
  Clone ID: PAT_MRT3847_60634C.1
tccttttgtgctaaataggtggatggggaaactgactatcccccagggcactttccgaagtgttaagagaatgcctctttctatagggggaggagctggtgcaaagaatgctattctcatgaatatgccaaatgctgttctttcaatgtggagatattttgatggagatctcgtatttgaagcttctaagatgactaatccctacattaagtgtgcagtctctttctctatagcatgtggaaattggggtgaagacaccatcaattgagaggcttttccccacatgctggtgcagtgcggagagatacaggaacaagttcgatttgaattgtcacaagaggaataacttac

SEQ ID NO: 99249 - DNA, 821 bp, Glycine max
  Clone ID: PAT_MRT3847_60635C.1
gctactttagatggaagactcttctaaatcctcctcttcttcttcttcatcttcttctccttgcatactgcttcatacattcatatggtgcagcatctgattgagaagtgtttgatctttcacatgacaaaggaagaatgcatggaagctctctctaaacatgcaaatattaatcctatcataacatccactgtgtggaaggagctagagaaagaaaacaaggaattctttgagcagtacatgaagtcgaaagctaaagacgacagaatgtctcaggaagagacaagccaaataatacagaagatgatgtcagattcctctaaagatgagccattgaactaaatatgaacagcgattgaaaacgatatgacctttgtgattttcatgcaacaactggcccaaaggcactgatatccctacgctatacggtacttttcctctacactctcgtcagcaataagccctcactgacacttatatatacatgctttcactccctacatgcatggatctgttatatttatatatgctagtcttttctaattacctatatatgttatatatatatatgctattgtgcctatatatatatggctaggttatccacgacctagcaaataacacaatgccatgtcagccatgtaatttcatctcagatagtatatgtatcagtatatatgcatgtatattatcacatgtatatgtttgtatgggattagctagattggttgtatccaagaacagaaatataaattgtctccttttaaatatttacatgcatatgtggctacatatttaatttgtgaaaggagatgtagata

SEQ ID NO: 99250 - DNA, 474 bp, Glycine max
  Clone ID: PAT_MRT3847_60636C.1
ttctgttataacatctcttgtcattgcattgaggtttgagtattgagagcatttcaaaacgccatggctaacccaattccaattcgtccatggtctcgcttggcctctctaagatcttctcctgctccagagtcacatcctaaacctcacactgcagaaccttctctcaaaacaacaaacattttttctaatgacaacaatgaaagtgccaccaaatctctatcaccaacaccaccagatgttcacatcccaattcaacaaaacctcaaacccactacccccatcacctttccacctaccaaactgaaggctcaggctcagcttcagactaagatatctgaagaagaagggaacattgaaaagcctaatggaaatggcaatggcatcggccaaaaaaatgaaaaagagatgacaaccacagaaaacgaattaaagaaagagaaaggtattcagacaaagatttcgggttctggg

SEQ ID NO: 99251 - DNA, 350 bp, Glycine max
  unsure (1)..(350): unsure at all n locations
  Clone ID: PAT_MRT3847_60637C.1
agngaaaaagnganncangcgtacgtaagctcggaattcggctcgagngaactcanattaattagttaannaagtctcancananacnttcccaactgtttcattcattatgnaccttnagcntttannnagacancgngatcaanggccgttcctgtgaggacntgaagctcnngncagctgtgctgntagccattagatggnnatngccntgagaaantagagnngtnngannggacnttcggctaggacctngtggggcannaattgggncnggtgctngaggtnngnntnagcctcnngtggtgcatgctctggtgcaggagcaagctcaagcncttgctccaggt

SEQ ID NO: 99252 - DNA, 293 bp, Glycine max
  unsure (1)..(293): unsure at all n locations
  Clone ID: PAT_MRT3847_60638C.1
cgcgtttctcgatcacacagaacaattcaattcatcagcgtgtctccacatgttcncgcgtggancctacntcgccntttncnnnnnnnnnnnnnnnnnnnnnnactgattggnttanttgcacgtaaaggagcgtntaannattcgcagcacgtgttgttattnnnnnnnnnnnnnnnnnnnnnnnngtggcggcagtngtagtatntggaaattgaggnttgagtggggtgtgtgaaaaatggctgccaggagtgatcnccanacggttcctcttncgntgctcctgaggc

SEQ ID NO: 99253 - DNA, 376 bp, Glycine max
  Clone ID: PAT_MRT3847_60639C.1
tggaacctttgggctgatttatgtgcttgtttatgtgcttgcatggtcgtgagaagatcatagaaggggacctcttcagagacgttatagttgtggaagcaagtataatccgccgagtcatccaagttccgccgcgcacctaatcctcatgcatacacaaccgcgccacacagccccggctccaagttccggttcccgcgaaatcgtaatcgcccgcggtccggaccccccccagttaacgccgccaacggcgcccttcgcaccccatcgccccttcccggcgttaccgagaaccgaagaacgagatagaccctatcggagcgcgccgagtccccagttcgccagctgccaacgacgcaataccctcgtcccgaat

SEQ ID NO: 99254 - DNA, 165 bp, Glycine max
  Clone ID: PAT_MRT3847_6063C.1
agggtcggcatttgaaagagatcaagcagcttgcattgaagatctctgtctcttgcaggttgcatgcactactcctactggagtggtagtatcacaagctacgattccgggtccagctttaattgcatatctactctctatgcactatagccactccattcacta

SEQ ID NO: 99255 - DNA, 274 bp, Glycine max
  Clone ID: PAT_MRT3847_60640C.1
agggggcaaacaaggggactctcaccacatcaatctaaatcacttttgggtaacagtcttgagtcgccgcccctacaaatataaacctaattggggccttggtgggatctcctaacacccttcctaatcggacccaaactcaaatcaacggcgctcgcttttcaagttctctaccgggaaaaacactgcgtttaccccttaatcccccttgtgaaaatcacccctgctgccactattggcatcacaaccttgctcccgtccggtttccccccca

SEQ ID NO: 99256 - DNA, 267 bp, Glycine max
  Clone ID: PAT_MRT3847_60641C.1
gtgtaccagctcaatggaatcagtcacttagatgatataataaaatgaagctgtttgcatgcaaaaaaaaaaaaaaaaaaaaaaaaaaaaaaaaaaaaaaaaaaaaaaaaaaaaaaaaacctcgaactagttcccaaacccactgtactggaagtatttttaggagcaactgacacaaccagaactactcttacgtgggaaaaatgcttgatgttaaaaaatccttttgcgttgaaaaatgttaaagcggaacttgacatccaagtt

SEQ ID NO: 99257 - DNA, 433 bp, Glycine max
  Clone ID: PAT_MRT3847_60642C.1
ggaggagaaacccccaatatgagtttattacccgggggatcaaactttcactattcatacataactcacgggaccataaaaattaaatactatcggcggcaaacaggatgggggggttaaaattcaacaggcctattacacccatagaaggcgaaatcttaaacttactgcgataaaaaacaaaggtaggattcgataaaggggtaaaaaagggacggggtttgagggttccaaggggaactcttttcaccgggggcaagagcatatggtctaaatgaggcccccttgcgaggtgccatggggtacaaaattccaaattctttacattgaagacttgagatcatgcataggcgccctttaaaagagggggcattgggaatttgagcatgaccattaggccctcttggggggccatggggctgcttaataattt

SEQ ID NO: 99258 - DNA, 435 bp, Glycine max
  Clone ID: PAT_MRT3847_60643C.1
gggaaccggattttattattctttaaaaaaccctcccccaaaaagaatgctaaggaatgatggtccaaagcgtaccgtttgggaccaaaacgaaatcctatacactacggattcggatacccgggtgcgtattaaaaacgccccccctggtcaaaactcccaaacaaccaaaaaaaaaaaacccggcctacaaaaacttacacgtgcaatccaaacccagcggggaacaaagggggggagagccccccggacgtgggtcccacgtgccgaacaccaccattggtgggggtggtttcacgcgaagaggttgcaggagtcccagggaaattagggttggaacccgagagaacccgaaacccttgtatatcatcttcggtgagccccacctttctcgtccttgcgggaattggaggggtcataatagcattttcaacc

SEQ ID NO: 99259 - DNA, 382 bp, Glycine max
  Clone ID: PAT_MRT3847_60644C.1
gaccgaggctctatgctctggagagagagagagcatctaccttcgatgggtgaatggagggacactaggcacagggtctataaatcgtgttggcgtgacttagaagaatcctatacacgcatcatttactcatcacgttataatctgaacagaaagtgataatatactagttaaaactggaccatatgatgcaaaacctcctcacgcattaaacgctaaggagattacaaaagaaccccacactgcaacaccagctcatgcctttcttgcaccatctatgcttcactctacctatgaataccatactattgaattaatgacctataattcttatcaaatccaatatgtatatggccactacaaagctgaccctacaagatgt

SEQ ID NO: 99260 - DNA, 195 bp, Glycine max
  Clone ID: PAT_MRT3847_60646C.1
tcgtggatttgttggttgacaaatcttgtgcgactgtgtaatttatgaaaggtagcgtattgagattttctttagacaaacttctaaacagatgattaatgtattgcggatagttactgaggacaaggatgagtttaggtcaaaactatattatgttttgtgaaaaaatagtgaattgcaagaagtttatttttg

SEQ ID NO: 99261 - DNA, 359 bp, Glycine max
  Clone ID: PAT_MRT3847_60647C.1
cgcattgcaccctgatacaatattctgccttaccgatctagtcggaagtgtcaacactttgctgtgggagatcgttacaaccttgcgggtgctgtgcacaatctacgccactgcctttgacctcatgacaggctatttgggaatgattgctcccatcaccaccgggttcattgtatgtgctaacattctgatgcgtggtgccttctatccaactatcataaaccacactgtgacattcatgccatgctgacttgagctggaactggaccaaccaattgatctactgaaccgtccctctcatacgaagctgaactgctggacttatttactacgttggctacatcacacacactcacgag

SEQ ID NO: 99262 - DNA, 374 bp, Glycine max
  unsure (1)..(374): unsure at all n locations
  Clone ID: PAT_MRT3847_60648C.1
cntcctttttttttttttttttttttttttttttttttttttggggaatggattttttttaaatacttaattcccaactatttctttcaaaaaaaccaaacattccaattaaaattatccccaacaaactcccacaacaattgttaacttttttcaccttccattccccttgatcttcaaaaaaaaacattatttttttcatattaaaattaccccccattaataaaacaaattgcaaaactccccccttttttccttggataatgtaacaaatttttcccattatatccttcaccctccacatgtggttattttaatctcacaaacaataatgaaatcgctgaaatctttacaccaaatcctcccaaatttct

SEQ ID NO: 99263 - DNA, 269 bp, Glycine max
  Clone ID: PAT_MRT3847_60649C.1
atataccatataccatggggggcccttggggcatataagccacacgcgggaaaagaacaaacgatccggactctgcaaaattgaggtagatgtaccacgacggaagaaccttggtataacactaacaccgacatttgatgcgaaagaccacactggtgtgtataccggagaaacacactcaatgtactgtgcataagataacctcctatctacctgtaactgacctactagtgggctccatgcctgggacaatgagttttaaaatatat

SEQ ID NO: 99264 - DNA, 570 bp, Glycine max
  Clone ID: PAT_MRT3847_6064C.1
gctttagaaaacatttttttactgtttaaaacattatctaaagtgttttaaggactaaaaacaaaacaaacataatttgcaagaactaaaaacaaaaaaacaattttgtaaggatgaaaaagaaaaaaaaaacactaaattgcaaggactaaaaaggtatttaaacctaagtttaaacaattttacatccaacatgttagccaggtttgtaaaagaaaattaatacgtgtcttacgcatgggtcttcgcatttggctgtatacgtttgtgatcctcaaccatcatgccaagtaacacagcaacatcttgtactctataagccacacacaaacaagtttaatacaatcacatcacctaatagcaaatttaactcaatccatgaaataatcaatttaagaattccaatgggaggtttcacagctatttaaatgtctaacctgtcataagattcagctctagtataagcttgaataacccaattgtatgtctctgtatcaggcttcatgtaatctgttatgtaacaaattaaagataatttaccttgcatagaattaataatgaagaaagaga

SEQ ID NO: 99265 - DNA, 109 bp, Glycine max
  unsure (1)..(109): unsure at all n locations
  Clone ID: PAT_MRT3847_60650C.1
gtcagctgcttatgacactaagacatatcgcagacagatgctgataggaggaaactatgtcttactcagtactaccatatatctgtgctatncagactactatagtgct

SEQ ID NO: 99266 - DNA, 269 bp, Glycine max
  unsure (1)..(269): unsure at all n locations
  Clone ID: PAT_MRT3847_60651C.1
tgcagattcttgtgcgggtatcctatataaatactcatcatcattcgttattggtatcgccgcagacaccaccaccttaagcagaagaataccagacaaatccaaccaccccactgcctgtcattaagttgtctacaaatccctccacaacaatggttcattgttcttctctttcaacccacttgggagaagcgcaccaggcnccaagaaggtgggaggtttttcttttgtccccccgtaaaaaggaccgaattttcaagccccaacgc

SEQ ID NO: 99267 - DNA, 243 bp, Glycine max
  Clone ID: PAT_MRT3847_60652C.1
tccttctaactcctctataccttactcaatctttctatatctaccatagatagttttcttttatcactctacatccctaatttcacatcatataaaccatctacacccaacaaacaccaaacttgctttcataatctcaaaatttcacttctaaactattaaatccattccctttacaatcatgattaaaacattcctcctatatcctattactaaatcctttacacttttacattattatcc

SEQ ID NO: 99268 - DNA, 313 bp, Glycine max
  Clone ID: PAT_MRT3847_60653C.1
ggaaatcaaataactctttgtgggtagattatgacaaaggaaactccaaatgaagagaagaagatgaaatagcaataaggtgaagcttgccacattttgtggacttatgatgatacgtgtgagacgcctctggtgtgtgtctcgcacgtgcgtattgtgatttttctttttttagctatggccggaattgctatttcttgtttacttgattaattccttttttgagtactctagtggtataccatcacacactaccaaaagtaacgatagcccaagccctatacaaccaaaccctaacacacacccatttgat

SEQ ID NO: 99269 - DNA, 311 bp, Glycine max
  Clone ID: PAT_MRT3847_60654C.1
cgtctgcgcctgatctctgagggctctcacacactggttcggtgctcctaatctcaaattctatgattaccgttcccaatttctccaccgatcacaacatgaattcaactggacctactaccaaaggctgaacgttcaagctcactgcctccagatccattccacgatcgcagctagctaatctgcaattccacctactaagacatggtcgattccttaatgctgaccaatacccctagcgtcttcgtgctgatactcctgtgcacctgtctgcacaactcgattatctcactccttatgttactgaattc

SEQ ID NO: 99270 - DNA, 319 bp, Glycine max
  Clone ID: PAT_MRT3847_60655C.1
caaacaagttctctgcctataacaagtttgtggaagcacattcacttacactatcgtgcgctttttccttttcctcttcatcctccccttttctcaaatgctccttaaattcttccccgaagcgaaaaataatcagcttcattactgcttcgtggcaagaactctctggagttttactattctcctcgattcctttcacttgccttaaagctatatctaataatcccctaagggagtctctttataagaaaatggatgagagaaatacatttgctgtaaaaaactcttctacattcaatgccttaaccgtcaattccct

SEQ ID NO: 99271 - DNA, 489 bp, Glycine max
  Clone ID: PAT_MRT3847_60656C.1
gcagcatcagccatcacacctcccaacgtcagtgccgcaaacctcaacggggaggctggaggggggcccatcggtgttctgtccacatccagccccaccaacacgggatgcaaactagacgagaagaaaagtgaaaagaaagagaagaagagtgggctcctgaagcttctagccggagcatccaccaagaagaagtcacgctccccgccatctgtgtctccaacccacgacccccaggtggccgtggacgccctgctccaaggtgcagtgggccccgaagtgtcctcactgtccatccacggcagggcagggtcctgccccatagagagcgagatgcagggtgccatggggatggagcctctgcacaggaaggcaggctccttggatctaaacttcacatctccttcccggcaagctccgctgtccatggctgccatccgccccgagcccaagctgttgcccagagagaggtaccgcgtggtggtctcg

SEQ ID NO: 99272 - DNA, 234 bp, Glycine max
  Clone ID: PAT_MRT3847_60657C.1
ggcacatgtgagtttgttgctcaagacaactacaagtaatgtgatgaaacttaaagtccctgctgtcttcggggctataagcatggttgccaggtcagatcaatcgtaggaaaagttccctccacgtcatgaaatcgagcgatagcgctcctcatccggatgtgacacgcccaacttggacgattgctgcggaaacccacaatacagttggcgctgacaatattcctcaaaaat

SEQ ID NO: 99273 - DNA, 2508 bp, Glycine max
  Clone ID: PAT_MRT3847_60658C.1
tcgacctagcgtccgctcctttcctcgtcaccaaccaaccaagagagtgagtgagtgagggagcaatggagaagattgcagcactcgctgctaatactatccacacccctctcttacccaacaacaccactcttccaaagacttcatcttttcaaccctttttttctaaccagctacttggcctccccttatcttcttcttcatcttctgcttcttctttaaccgccgccaaacggttctcttgcaggcctatcaagtgttccgtttccgaagccacagagcccaaaacagagaagaagaggcaattgctgagaagaggggatgtgaggaacatagctattgttgctcacgttgaccatgggaaaactactctcgttgatgccatgctcaaacaaactaaggtatttcgtgataatcagtttgttcaggaaaggataatggactcaaatgatttggagcgcgaaagaggaatcacaatactgagtaaaaatacatctgttacttataaagatgcgaagattaatataatagatactccgggtcactctgattttggtggtgaagtggagcgcatcttgaatatggtggaagggatccttctagtggtagattctgttgaagggccaatgccacagacaagatttgtcttgaagaaggctttagagtttggtcactcagttgtcgtggttgtgaataaaatagataggccttctgctcgcccagaatatgttgtcaactctacttttgaactcttcattgaattaaatgcaacagatgaacagtgtgactttcaagtaatatatgcaagtggtataaaagggcaagcagggttgactcctgaaaatctggcagaagaccttggtccattgtttgaatctatcattagatgcattcctggaccacgtattgacaaagatggtgcccttcaaatgttggttacaaatattgagtatgatgaacataaagggcgcatagcaattgggcgtgtgcaagctggagttttagaaaaaggcttggatgttcgagtatgtacttcagatgattcatgtagatatggaagagttactgagctttatgtgtatgacaaattcaatagggtccctgcaaataaggtggaggcaggagatatatgtgcagtatgtggaattactgatattcagatcggggagacaattgctgataaagtatctgggaaaccactaccttcaatcaaggtggaagaaccaacagtgaaaatgtctttctccataaacacttcaccttttgttggccgtgagggaaagtatgttactagtaggaatttaagggacaggctttatcgtgaacttgagcggaatctggctatgaaagttgaagatggtgaaacagctgatacatttgttgtcagtgggcgtggaactttgcatatcaccatacttatagaaaatatgcgaagagaaggatatgaattcatggttgggcctcccaaagttatcaacaagaaggtggatgaaaaactgttggaaccgtatgagattgcaactgtggaggtaccagaagagcacatgggagctgttgttgaacttcttggcaagagacgaggacaaatgttcgatatgcaaggagttggattggaaggaactacactactcaaatataagatcccaacccgtggccttcttggattgcggaattcaattttaactgcctcccgagggactgctattctcaacactgtttttgatagctatgggccttgggctggtgaaattagtactcgggatcaaggctcattggttgcttttgaggatggaacaagtacttcttatgcaatctctagttcacaggagaggggacagatgtttattggtcctggagtggatgtttataaaggtcaaattgttggcatccatcagcgacctggggacttgtccttgaatgtttgcaagaagaaagctgcaaccaacatacgttccaacaaggaacaaacagtgattcttgatacgccattggactatagtctggatgactgcattgaatacatccaagaagatgaactagtagaggtcacccccgcaagtatccgaatgtccaagaatccaaaaattacaaacaagaaaacaaggtagactttcaccgtgaagctgtaacttgcaaatgctttttgagttaaccagttaccgctggtgtgctgaagcgcataactcattaatgtgttgctgctaaagtgacgaagaagtaaatcattaccattgatgtaatgtcacatatattcttccaaagatgcagacagtataggagctggctgaaagccgtattcattatagatattggtcatcacagttgattaaagggatgaagttacactgaattttgttcaatttgtaaagtctatatattagcagtaaggaacaagatattaattcttcatcatatggttattgattggagaatagcaatgcaacaccttggttaaatttccaatgagatttctaatgcattctctgatttttttaaaaaagggaattt

SEQ ID NO: 99274 - DNA, 209 bp, Glycine max
  Clone ID: PAT_MRT3847_60659C.1
aatttgctcttgcaatgttcccaacttaaccctatattctttcatgaagaaaatacaaaacaatgctacttttgaaaatttaagaccatataacatcttctgccacatactccaaatctagtggggcaatcattaaacaaaactctaaatcttaagaaagcaatgataaaactgcttatggccctactgttttaccactaagcatttat

SEQ ID NO: 99275 - DNA, 204 bp, Glycine max
  Clone ID: PAT_MRT3847_6065C.1
gttttaacagcttgcgcccatgagctgtctttgcaaaggctacctcgacgcgctcttgattcgcaacggtttcaaggacgcggagtacatttctcttgccctgggtggcacaaacctgacatcaacaccgtgaatgtcagtggaccatgctgaggcggttgatttgagctttgaaatgcgcacgaagctctattttaagcccgt

SEQ ID NO: 99276 - DNA, 215 bp, Glycine max
  Clone ID: PAT_MRT3847_60660C.1
gttgaagtcactcgaatgttgatcatcgacagagcgagtcgcaaatattgagcttaatcacattctagttcactagttgagaatgccaataacgatcatgaggcgaccaagaaggggtatgtcatacgacgctgatggtatatatattccgaacacctcactccggtgcttgcgtaaaggtgcggtggttaaggaagacgagagagatgctccga

SEQ ID NO: 99277 - DNA, 306 bp, Glycine max
  Clone ID: PAT_MRT3847_60661C.1
gctacaatgtttgcggacgtttttaaagaaaccagcctaccgacccctgcctgggaacgccaaggttttatataggggcacctaaaatcaaatcaccggcccgcggtttacaacggcgggactgggaaaaacctggcgggacccaacctaaaccccttggaacacaaccccctttcgacaactggcgttataacgaagaaggcccgaacgaatggcctttccaacagtttgccaacccgaatggggaaagggacgggccctggaaccgggcaattagcgccgggggtggcgaggttaccccccagg

SEQ ID NO: 99278 - DNA, 789 bp, Glycine max
  Clone ID: PAT_MRT3847_60662C.1
gtcgttttcgttcagagagacagaacaaatacgaaacgacagcatgtggtggccgttcagcagaaaagagaaagagggttctggattttcatcttcttccactgccgaggaagttactgaaggaatcgatggcactgccctcactgctattgttacagaaacaatgcaggaatttttggaacccctttcatgctgtctgaagataacatcgaactacaatttgccacaaatcatataggtcattttcttttaacaaatctgttattggatactatgaagaaaacaacacatgaaagtaagaaacaaggaagaattgttaatgtctcctcacagggtcatcaattcacctatcgggaaggaatcctttttgataaacttaatgatcaatcaagttatcaggcattccgtgcatatggacagtcaaagcttgctaacattttacatgccaatgaacttgctagacgtcttaaggaagatggggtagatattactgctaattctcttcatccaggagccattgccaccaatatccatcgttacaatagtgtattgactggtaactgccgcattgtactattaaaaagaaaacaatgcttatatgttacattaaatagataggctgttctgaatattgaattcaaactcattgagcaggattaactcttttagtgtcctttgtaaacaatttcacatgttcatctggagccagcctttgtaatatatagcttaattgactcaccaaatcatgttgtcttcaaattttatatggaagtatttttccatgatgac

SEQ ID NO: 99279 - DNA, 1324 bp, Glycine max
  Clone ID: PAT_MRT3847_60663C.1
gtccggaagagaagaggcttcccgggttttccactgcgtccggtcgtcgttttcattcagggctcgagcgaaacgacagcatgtggtggccgttcagcagaaaagagaaagagggttctggattttcatcttcttccactgccgaggaagttactgaaggaatcgatggcactgccctcactgctattgttacaggggcatctagtggtattggtgctgagactacccgtgttcttgctatgcgtggtgttcatgtaattatgggggtgaaaaatatgaatgctgcaaaaaatataaaagaaacaatacttaaaggggattccctcagctaaagttgatgctatggagttagaccttagttcaatgacatctgttcgaaaatttgcatcagagttcatttcttctagtcttccactaaacattttgatgtaagagtacaaaggctacattgccaaaaaaattcatagatgtgttcgtgttcaatacagttgactgtttctctctctgcagataattcttaagtgtcctgtttgaaagattgcatggcatggtattggtttcccacgtgtccgccacatcttcagaaacaatgcaggaatttttggaacccctttcatgctgtctgaagataacatcgaactacaatttgccacaaatcatataggtcattttcttttaacaaatctgttattggatactatgaagaaaacaacacatgaaagtaagaaacaaggaagaattgttaatgtctcctcacagggtcatcaattcacctatcgggaaggaatcctttttgataaacttaatgatcaatcaagttatcaggcattccgtgcatatggacagtcaaagcttgctaacattttacatgccaatgaacttgctagacgtcttaaggaagatggggtagatattactgctaattctcttcatccaggagccattgccaccaatatccatcgttacaatagtgtattgactggactaccaggtgtagttaagaagttgctgagttatgtagttaaaaatgttcagcagggagcagcaacaacttgctatgtagcattgcacccacaagtgaggggaattagtggtgagtattttgcagatagtaatattgccaaagcaaactcacaaggaagggacattgatttggctgagaaactctgggacttcagcatgaatttgaccaagtagaaatgtagaatacttggtggcaattgtcaatgcagataacattcattcttagtgaatgaaaaatgttagatgatattaatgctactctgtattattttactatttttaatgagatgcctatctttta

SEQ ID NO: 99280 - DNA, 248 bp, Glycine max
  Clone ID: PAT_MRT3847_60664C.1
acggctgcagagaagacgacagaaggggacttaaagtggcaagtttcgtcttactactagcgatataaggtgatgctccaataatggctctatcacgattatgtcgatcggatgatctctgcacttcaggctacgtgatgatggttcggagaaacgtcttgattgtaaccttcggattcaaaacagtttagttgtgtgtcacggttctgatgcgggtctcttcaaaaagtcaggcttgttggaagtgg

SEQ ID NO: 99281 - DNA, 432 bp, Glycine max
  Clone ID: PAT_MRT3847_60665C.1
cccacgcgtccgtacggctgcgagaagacgacagaagggggccgaaaccaaaaggcaaacccacagcacaatatgctatgctatgctctctaatccgtatccgccgtcacgctcctttccaccacactctccgctctctcttgccgattaaccgtttctcctcctcctcctcctcctccgcctccgccgccgccgccgccgccatggttgctcacgcgaaggacgaggcgtaccttagcgcggcgattccgaagcgcgtccgtctcttcgagaccatccaggcggagcagcgcacgcagcgcctctcgctttcgccggatcctatcaaggtcactctccccgacggcaacgtcaaggacgcgaagaagtggctctcgacgccgctcgacgtggcgcgcgaaatctcgaagaatttggccaacagcgcgctca

SEQ ID NO: 99282 - DNA, 353 bp, Glycine max
  Clone ID: PAT_MRT3847_60666C.1
ccttaggctggattcctttaaagcggccgttttttttttttttttttttttttttttttcccggcaaaggaccaagcggtggggataatgtatccggatttaataaagataccttttaagagtcacactacaaacgaaaatgggaaatggaaccaatttctaggtaaaaccaatttccccaaggtcaggggcaacaggattaaaacatttaccttaaaattaaaactttggcggtggggggttccagggggccaattcctgcccccccttattttggtcttaaaattacctttagccccaaattgaggcctttggcgaaaccctgggcacctttttcacagttcctgtttttt

SEQ ID NO: 99283 - DNA, 299 bp, Glycine max
  Clone ID: PAT_MRT3847_60667C.1
aacaatggaaaaccatatacattccttgggacgtaaaaattaggggttctaaacaattatgcccaaataacttttaaaagtcttccatttcgggttaccccatagggacccagggttatcctttttattggaaaaaaactttgtagcctcaaattgattggagaaaggaactgggccacgggtcatatagggggtcgaatagggggtaaaatgggcctttgcctgtgacgcagtgtagaactatgaatcccaagattgccaacagagccaatctcccattggcaaggacctttttcatg

SEQ ID NO: 99284 - DNA, 277 bp, Glycine max
  Clone ID: PAT_MRT3847_60668C.1
ccacattcacctgaacttttagtgaggattccaaagcatggcttcccttgcagcattcggtgcttctgcttaccttggcatgacaaaaatgcttggaaaccccatcaacctaacatgtgccacaaggccagctacatatgactatatccctgccttcttcaagactgtgactcttacttccaaaaagaaagctgctcctataaaaaaagctgcagatgctgctcctgcctacgatgagcttgccaagacgcttgggcctgacctaatgatcttcttg

SEQ ID NO: 99285 - DNA, 428 bp, Glycine max
  Clone ID: PAT_MRT3847_60669C.1
gagcacaatggtattaactggcctcaaattgaaaacataacccttttttatctgcccatttttgtcaattaatttgctatgtaaattcatcctgggagggatattctgagctactttctcaacaagaagatctttgccattttcatttgaaccaaattttaccttggcaagcaaaaaaattatactattaaagccggcgataaacctccattgggaaccaaccacttgagtgccatttcttgtttgggctattatgaaccaacccttttctaccgcatgtgtctaagttgaaacagaacaacttgatagtaaaagggaaagacctgctttttatgctatcgagaaaattcagttaggccacatccaaatggtttggactttcttcggaattccgaattttcctgaaccctgggggggagaggtataat

SEQ ID NO: 99286 - DNA, 487 bp, Glycine max
  Clone ID: PAT_MRT3847_6066C.1
attttatcctcaatataatgaggttcaggctcagatggaaacaaatttgaataactcgcctcttgatgatgttgaaactcctaaaggctccatgttggatcttaaaatttgtcaatctaaaagggcactttccaaaaacacaggtggaggaacctttctgcgtagtgatctattggcaaattttttgacagagggcaattatagagcaagcgacgatttgcatcccactcatcgtattaaaggaatgaataaaatggtggccacaggtggtattcctgagaatacaggtatagcatgggcctgtgctatgaatagttcttttagggggcgtgccagttatgatatttacactatgtgctatcaagactgtgaattatggaattctgcttagcacaagagcgattactatgtaattaaatccaaacccgtgtgctgttgcatggagcatggaaattctgaagcttaccggatttcattgcgatatcat

SEQ ID NO: 99287 - DNA, 368 bp, Glycine max
  Clone ID: PAT_MRT3847_60670C.1
actaaacacttggttccttcctaacatttacctgggacccaatagtggtcaacatgaccatttacaatcacaattcagctacttaatgctcattgtaaatcacaaccttaccagaaaatacttattagaagtttacagccaaaaataagtctgttacggttaagcgcctaacagtgacaacttttcttgattaccaccatccttgtattttttattgccattcacttcacaggtgcaacaactaattataactggtgagccaggagagtacaacaaccatgcattgcattcacttgactgaacttttgtcatgtcttttaaatcggggttgcctgatctgtattggagggaaagatcacagatccacg

SEQ ID NO: 99288 - DNA, 667 bp, Glycine max
  Clone ID: PAT_MRT3847_60671C.1
tggtggcggaagtcattttgcactttatttggagggtgatctattgaacggatcaagttcggtttcagaaacttatgggaatccttgccttgcacattctcaagaatttgaagtgaaggaagtagagttgtggggctttgtatttccttctaagtatgaggaaatagtggaattgagcagaacagaggcacctgggatctgtcgctggtaaatgtctctggatatgtttcaatgcctccctgtttgcattttattgaatggtcatgctgagtcataaacatgacgatttctgatagaaagggatgcaaagttgattgatagacgttatggtgaagaaattccatgtagcatgcttgtaaatattagcaaggctgtatacactatatacaggttcatacccatattgcaaaatggccgattttgtgtggaataaaaactggagcgaattcatgtgattatgaatgatgttgctagtgaaggaaaacgaaggataaccctattgctcaagcattgttgaagttagctgttctgcaaaccgagatgctttagaagaaagaggatgtcttttatatcatgcataagataagaggtgttcacaaatcacaagggatattttgataggctggactatatttctatatctaatgccaatgcttctttcatatgc

SEQ ID NO: 99289 - DNA, 197 bp, Glycine max
  Clone ID: PAT_MRT3847_60672C.1
ctaatggaagggcaacaaaatactgtaatgggaatgcaatttatggactgacacactttacataggagcggaaccctaccgctccgatccctcatgcagggaataaagacgttagcgaccgatccttaagcatttcaaaaagaattcgaacgctgccgtatctagaacccggtctgcggaccctgacactaattata

SEQ ID NO: 99290 - DNA, 366 bp, Glycine max
  Clone ID: PAT_MRT3847_60673C.1
ttttttttttttttttttttttacgctgcgcgcacgctactcagcttgaaaaaggagttgcaaaccattacggacccgcgggtcaaccatgtgattatcggaccgcgcacctgcaggcgtacaaaaatttagttatactgtgacttattagcagctttgagaatgcatgagtaactttcttttctttgggacaacaaaagtcttttacatttacattagaatactcttccttgtagcgtttttggcaaaggctgggccaactaatatttggactacaaaaacttatggaaattggatcacagtgcgctgaagatatggtagaccttgcttgcatggtgggtttactcgtgcgcctactttcctatg

SEQ ID NO: 99291 - DNA, 365 bp, Glycine max
  Clone ID: PAT_MRT3847_60674C.1
ctgctcctgggcggacgcgtgggcggacgcgtgggcggacgcgtgggcggacgcgtgggttcacaactcaaaaagtcacaagctacagttggcatttcacaacaccaacaacaacacagtacacagcctataatctatattcttctcttcccactataactctcatttgctactacagaagcaggaggcattccctcacacttattcactgtagaaatcataaagaaaagaagagaaaaagaaatgaatgtgctcagcatcataggcatccaccaccactatcaatgattgactaggacttgactactactcttcatgtctcttttagtcactgtgctctagatttaccaaatgggggcagtcac

SEQ ID NO: 99292 - DNA, 291 bp, Glycine max
  Clone ID: PAT_MRT3847_60675C.1
aaaaaaataaaaaaaaaaaaaaaaaaaaaaaaaaaaaaaaaaaaaaaaaaaaaaaaaaaaaaaaaaaaaaaaaaaaaaaaaaaaaaaaaaaaagggcggccgccatcttttggggcggccccccccttttattctcttcgccccggtattttattccgtcccggttcctcctggcgtcccagctttcccttttgggagtctttttagaccttggcgtttccttggtcatagctttttcctgtgaaaatttgttttcccttcccatttccacacatctttcgacccggctgc

SEQ ID NO: 99293 - DNA, 909 bp, Glycine max
  Clone ID: PAT_MRT3847_60676C.1
ggctcgagcatgattttaagaattaaaaaattatttttaagtctcgaaaaaaaaagctcaataatttatagatctttatgtttcattataatgaaaaaaaaaaatagaagtaaaaaactttcaattttttttatattctagtaattttagaaataaatttaatttaaataaacaaagataaaattgataatgaagaatttaagggtttagctttaagttaaaaaatattattaaggggaagaaataaggaattaaattaacctaaaatttaaaaattttaattttaatttaaagatttaataattttttttttatataaaataattttataactattagaaaaagaataaaatttaaaaattagtaaatattaaaaaaaaaaataaaaactaggcaaaaagattttcgaatgtttaacaaaaacattgtctcatgaatctattagagataaaacctgctcagtgaaaattaaacagcaataaataaggtagcataataacttgtcttttaattgaaggctagaatgaaaggtaaaacgaaaaatcaacttttttttttttaaaaatttaatttgacattttagttaaaaggctaaaataattatgaaagacgataagaccctatagaacttaattataaatttaaaaattaaaaggtaaaaattttactggggaagtaaaaaaataaaaattttttattaaaattactattaaaagaataataaaccttttaagaaaaaaaagttaccttagggataacagagcaaaaattttttagagatcaaatcaagaagattaaatgctacctcgatgttgaattaagaaaacatctaatagaagaaaattagattataggtctgttcgacctttaaattcttacatgatttgagttaagaccggtgtgagccag

SEQ ID NO: 99294 - DNA, 467 bp, Glycine max
  unsure (1)..(467): unsure at all n locations
  Clone ID: PAT_MRT3847_60677C.1
tcctccttcttgggggggggggggggggaggcaaggagaaaaggagaaaggaagaagagcctgcctgttgctgaacaagcttagtagtgcagaaagatagtgtttatataagatataatgaatgtgtaactatgtggagtaacaataatagaataaatgttaggaccaagaccacgccaaagactggggggaggggtatgacagagaagcggaaagaagaacatattcaatgagaaaagatatacctgatagttcgcactaagaagaagaagggaacgagagatgatgatgacgtatgatgaactggcctatagctaagtaccactgccagatcgagagaggcaggcagggcctggttgtacttggacggttttggcgtgaggggccgcattggtaattatgctagttgcaaatgtgcattatgtgagccggngaggtagcaaaactgcatttagtaagcttagagg

SEQ ID NO: 99295 - DNA, 275 bp, Glycine max
  Clone ID: PAT_MRT3847_60678C.1
gctcggattcggctcaatcgagcgattcggctcagaacgcattgtgtttctctcttaccgcggcgtagatctaagcagtttgggaaaccctaactgctctcaccactctctttgctttttttcctctccgatcaacgacctctttcgtcgccctaagtcatggcaggacttgcacccgagggatcacagtttgatgctcgtcaaaatgataccaagatgaatgagttgcttacatctgatggacaggatctcttcacatcttatgatgaggttta

SEQ ID NO: 99296 - DNA, 385 bp, Glycine max
  Clone ID: PAT_MRT3847_60679C.1
gggtttgtattgataacacttatgttcaaagaatggattcgaatctaagcaagaggcacccaatgtagataccttaacacaatctaaatttaatacccaaaggaagagcgcctttagaagagctcccacacaccaaaaggtttcttatcaaggggggggtaaaaaccacaccccctgaacctgggagaaaaggggtcatctttggtatttcatggagaccaaacttttctatcttaaataagttctggtgggagaaaaagaacccggggaataaaaaaaaaaagggccccagcccgcccccgagggaaattaatgcccaaaatgggcccacagaaaaacaccccctccaccccaaaaaaaacaaccaaagcccggggattaaaaa

SEQ ID NO: 99297 - DNA, 372 bp, Glycine max
  unsure (1)..(372): unsure at all n locations
  Clone ID: PAT_MRT3847_6067C.1
agctgatcagggctcangtggtggttttagaactctgattcaattgcttcctgtgctgttaagtgttgcttttgaacttctgtgcatcctcagaacctatatatgctctttcccgttcctacccttatgaattccagtttaccactcaaaagggtgtcaatttttttgtgaaatcaacaaattttgaggaaaagtatccacctggtagcccggatcgtatagcaattgatcgtcacatagagagggattattttaacattcttgctcagaattgtcgtgttgagatgcaacgtcagcaatggggatttataagagaaactccatattgtgatatgttacagaagtttcagacagctgcttcgtgaatgaact

SEQ ID NO: 99298 - DNA, 273 bp, Glycine max
  Clone ID: PAT_MRT3847_60680C.1
gctatagatcgggagctagctctctagaggacccaatataacatacacgctcacgcacccggggatgtgtcgtattgggtcacctatagtgaatccactggccagttgactacaccgtgttgaccagcaaaaccacttgggtaacccatctcaatacccttgtaaatcatcttgctttacacagctgtcgtaatagctaacaggcccgcaccgagggcccttccgaacagcctcgcaaactgaatggcaaacgggacgcgcactggaacgcgc

SEQ ID NO: 99299 - DNA, 154 bp, Glycine max
  Clone ID: PAT_MRT3847_60681C.1
aagacattgagggaagcgtgactaggagccatgacccagcagttaaaatctagcttgtatgtgcacccacggggaaagcgtttctttaggaaggaagacataatctgtctaggggatcatgaacgctgctgataatataaaaattaataacttt

SEQ ID NO: 99300 - DNA, 690 bp, Glycine max
  unsure (1)..(690): unsure at all n locations
  Clone ID: PAT_MRT3847_60682C.1
gatgattcgacacgccatgttgtgcgtgctctgttacggaattgtagttatgaagtcactgctgtttccaatggtcttcaagcgtggaaaggcgctggaagatccagaaaatggcattgatcttgtcctaacagaggtagctatgcctattttgtctggaataggtcttttgtgcaagatcatgagccacaaaactctgaagaatattcctgtgattatgatgtcatctcatgattctatgggtatagtctttaagtgtttgtcaaaaggcgcagttgattttttagtgaaaccaattcggaggaatgaacttaaaaacctctggcagcacgtttggagaagatgccacagttctagtggtagtgggagtgaaagtgcgacccacaccagaaaatttgcaaagtcaaagaagtaatgatgcatgtgaaaacaatagtgacagcagtgatgagaatgactatggaagcagaaacttgagcgttcgagatgggaagtggcactcagtctagtggtagtgggagtgaaagtgcgacccccaccaagaaaaatttgcaaaggtcaagaaataatggatgcatgntgaaaaacattagntgacaggcagtggtggaggaatgaactattgggaagccagaagacttggaaccgttccgagattgggaaagtgggcaccttcaagaggttcattgg

SEQ ID NO: 99301 - DNA, 257 bp, Glycine max
  Clone ID: PAT_MRT3847_60683C.1
gccaaaagaccacacaaagggcgaaccaaaaagctctgagaatccacaaccaacctctaaaacaaaagtgggttttggggcacatacaacctcccctggtaaaaattacaaggccaacaataaccaattttgccaaggtccttaatttggataataaaaatttcaaggaaattacctttgaaggtttgcccaatttaaatttaaaattgaagaattgggttcaaccaccaaaatgggtgcctttggtggattttttc

SEQ ID NO: 99302 - DNA, 1072 bp, Glycine max
  Clone ID: PAT_MRT3847_60684C.1
ggttggtaaaggtttctgtgtgttgcgagggaggattgtgatgtgagtgatgggaagcagcgaagaagtggttggcaaagaagaggttatcgcaaaactcaaggacgatggcgactttgacaggcttcgtttgaagatcgttcgcaagctcaaggacaacgaagagttgcgacaacatattacctcaattgtgaagcaatcagtggcactcaatcgtgctggagcagaaaatatgaaacctagacaactttctgatgccatacatgaagaagttggtgataaagtaatgagccagatatccgatagtttatggcaaataatccgatccggggatgacatgaaaagtgaaatcatggaaacagtgcaatctgtgtatgacaaattggcaaacccgaaagggaaagatgaggttatgatgtccatgtctgatgtgatgccaattcatagacaaggggaaacagcttcagctactgagattgatgatactttgcatgaaaatgagcctgatgagccgccaggtttcactctcttgcataatcatttgaataataactatcatgaagagcaggataaagggaaggtgcaagttcagaagcaaggattcactgcagagcagaaagaagattcccatccatcacaggatacacttggtgaagatgatgttaatagcaatgcaccgccccctggattttcaatggatgtggagcaaaaaccatcttctgattgtagtgatgaagaccctgatgtacctcctggttttggttgataaattggaaggtgtttcaatttttcttctgttctgcagccattgctggcgttcgatgtcacaggagtcctattttctgtttttgatcatgatgaaccagctaaaaacaagagacaatctggaggtctcttgacatccccattcccgatctaatattggatgcattattttttctgattggcttagggtcaactattacctgtaatatttttgtatgaacttatcccaatttttctgaaatggatgctggatcttcacaatgaattttgttaaaagctattgtccaatagaaactcgcctcaatca

SEQ ID NO: 99303 - DNA, 364 bp, Glycine max
  unsure (1)..(364): unsure at all n locations
  Clone ID: PAT_MRT3847_60685C.1
ttatatnnnccctgtatggcggccttttccttcacttacccctatttgtttttccaaaaaaggaaaagagtcctatccttctgagtaataggaaccataccgtgactgtcccaagccttattctataataccgtacttgggtccaatccgcgcaacaaacaccctgtcttatgttgcccactgatccctgcactagtccataaaaaccacatcaacgttacagccaccaaggcaacactactggtcatgcacatattgtgccttatccgcaggggcttatttagcatgctgctccccctattcgaaacaccccccaatttaacccattatcggcgggctaacgattcactttcctaccatgggc

SEQ ID NO: 99304 - DNA, 230 bp, Glycine max
  Clone ID: PAT_MRT3847_60686C.1
gttgggttgatcgcacgccttgttcggcgaagtgagtagtgcgtgctgaatcgaatgacgtggatgctgcgacacatggctgcgagcgatcgaacagtgatgcactgatattcatcatattgtactggtgcgcagatctagcccacgaaggtacaccatctggtgatctgcaacatgtgcaaaggctatgtcagacgccctgactaagctgaccgcgtaatctgaaccct

SEQ ID NO: 99305 - DNA, 795 bp, Glycine max
  Clone ID: PAT_MRT3847_60687C.1
ggaatcagttagggaagccggaattccgcggcatccctgttgatttggagtggataattgcatgggagattggattagccaatataatagacaccgactgtagtgaaggggttgtacgaatagttggtattgggccagactctatattgagctattgaaaacataaaaggtaaagcatgagtgggtgcacaaacactgcatcgagctagaatgaaataggttctcaagtttaattatgtctctgttctaaaaaaatttaaattctattagagtacaatgcaaatctaggggggtcataaattgaaatttccaagctagatggctttggggacgaagaggaaactaaaaagcacctacatgtctccattcgcatttgaaagggccttttttctcctccgggtatacatttttttggtgctctttacagttcttggttcagattcatcttggatgacttgtttggcttccattccgttctctttcctcaaaaccttccaggtttatagaatgagcaaacatggaagagggaagaaaattttgatgtagcaattcaacgacattgagcatagaagttagtatactttctcctagttatgtttttgtacagtacagaagtatatgtatattttgctgctgtcatttttctcggggatgttaatattaccaacgcttgtgtaaatattattgttttggtttttttaacaagtccctgtggttaaatcagttatttattctctgaagcaactattaactgtagagaaatgctattttggaaccccctactatgtcacgatt

SEQ ID NO: 99306 - DNA, 254 bp, Glycine max
  Clone ID: PAT_MRT3847_60688C.1
atcacgcggacgattatcaggactcataccctatatcaatggtaacacatataccagcattgactatggacatagttacaataacagctcacaatcacaataacaattacagctcaaaatcaagattaaatgtacgtatcatcgaatcattgcagatctcgtagaactgagctgaaaacaatggcgaaaccaatgtactctcgtaagtcaccttgcaagtcaacgctgactttcactctgattctgactttgat

SEQ ID NO: 99307 - DNA, 3620 bp, Glycine max
  Clone ID: PAT_MRT3847_60689C.1
gttgtcttgtaggattatccgggtaatgagctgcaagaatgtgaaggaaagtcaaagtagcccttccaagctcttccttagtcactggggcaggaaatattacacaacgcacgagcacataaaataattcttgtaaagaattgacaagctctggcaactacatcggaaaaaaagatttacaaaatatccttaagaagaagaaaactagaatggaatggaagaatgtgatccaattaaccaccctgaattctcattttaaaaataaaaaattcacacttgattcatgtttgaccctaaaaagcttcaactcagacacttggctttttctttcttggtttcttaccctaatagaaaggtagtgtggacaccacaatgtctgtcctctggagagcaaagtatcccacaaaaattttccaccctttttacaccacttgtccttttcactcgactccctaaccttctttgtctatcttgaaaagtaaagctgctatactatactatctgcctttttcttttgttttttttttcccttctttttccttgctcctgcttcctactatatcggtttttcactttttctttaggttgattctttgaactgttgttggccatggatggcctaagtcgcttttggggttgcttgcttgaaagcaacagtgggagctattctgcagctcctcctctgatgctcctgaacaagttctccagcaaaccagtcaagtttctcgaagttactctgctccccaattctctttcctccaaacagtactgactctacattctcctgcttcaacatctcttctgctattcctactagcatcttcacattgccgggacttgaatctgtatccacattgggtccacatcgccccatacttgacccatttgcctgaatgcggacataattggtgctgcggcactgaccaaaggccatggcgatggcctggtcgacgaggtcagaggagccgtcggcggaaatgcgggccatgggcctggcccaatccttggccttccagcgtttgactcggtcaaagtcgtaactcacctccaatagttgacccgttccgagggacagaacaagaaggtcctccacgcctcgcacgaacggaaactcttgcttgttgtgcagcacgtgcgtgattgccgcccccgttgggttactcatcgctaaacctccgtccacggccacgcactttgtttgaccatccacggaacgcatctgaaccggttcgaacaaacccggttcggccgaggtggcacgacatacctcccacaaccggaagtcgaagctatccgtttccaacgcgtccgcacgtgagaacaaaaacggcgccgtactcgataagtcgtagcacggaatcagaaccggttttagagtgtcctttagagtcaaactcccaccaccattctccgccgtgaacgcttccttcaccgctttctccaaacccgccgtcgccgacgacaccgagccggaacctccactggaaagtaacctcttcagcaacccccggttgcttgcgctgcctcccgcgcggtagaatttgtttcctttctctgccagaaaccgccacgtgtcgtcggcggagaaaatcgggcggcggtggtctttggtggagaagagcatcgccgtgaagatgccgccgactccggcgccagcggccacgtcgaagtagtctgcgatggtggcgttctgttcgccggatttcttcttcagcgcggcttccaggtaggcgagggcttttccggcgagaatcccgcgcatgccgccgccgtcgatggcgagaatgcatatcttgccgcgctggttcttgactgtggagacgcaatccactgcagcggtaactgccggagtatgagattccggcttaggaggtatttgcttggggaacctctagctttggatcgtcgtagccgaagagaaacttgctttcgagaatggagaagatttcgtaactaagcttatccgtctcaatgctcggttcttgcatttccaactcgttactacaatccatttttctctttttgttttccctgaaaagggaattttttttgaaacaaggctttttctttttcttttcttgttctcttttggcttggtctttaaaacatcttgcgcgtgtattgcatgcagtttgaattgcgtgtcaaaataaattacctgcaatgggtgacctcagtttgacaagaatgctcaaccatccaagaaacagagggaccaattctaaacattgccttctgagtttaatgacaaattgcccaaacacaaatatatactatttgtctcagttctaaaacaacactcgctttcagagtttgagtaacagactattcattcaatgagttgtacaaatcatcgggtttggtctctaatctgtaaacgctttcttgctctgtgttaaatgtatctctgtgagttcttttgccgaaagtggctaagcttgctcctctatgtaaacatcaaatggaagcaaaaagccaaacattaccaacaagcaccgagcaaaaaccagaaaatgccaaatcaccacagctgcagcaccatatgcatatgtctattcgtatgctcccaaacatatatatacccattcattctttctttttaccactattataatttactgttgggcaggcttctacaggttctgtaccccctctctgaagagggcaaagggatatttatcatctgaaacttgactgggggcgagaggcatacacacccggcttaactattaattttctaaaataattcgagttatgaatatgtattcacgtactccggtgtaatgccatcaaataacccttggcctatctaaaccatttttctaaaggtcaaaatttaacacatctcacatagtatgtgtggcaatcatttttacgtagatttctgccatatcctcccaaaaattgatgtacttccaataatttcacatgcattctgttcacagtccagtttgccccaccttgcatcaactcgttcacaggggaatatcggtttggcaaggcttctattaacaacattatgcacatgacatagccactgagaaaattcagcatgtgatccagtcagtacaggatttgctctaagaacttctttaaagtgatctcgacattccctgcaagggtatattcgaggtaacatctgtaccagttcttttacatccttcttctgttgtcttgtaggattatccgggtactgaaaagagaacttggtcattaaaaaactcatagcccttccaagctcttccttagtcactggggcagcagacttttccttgacagcagtatcagcgagttgtacagaagttgcagtttttgaaagtgggcctttggtggaggaagagatggacaagaggggtcctgaagatgggtggtgatgaaggcctatgaaattagagagatggtgttgaacaaagcttgagacttgttcaatgttatggaacaaggtctgcagtggattctcaggcatgttacctgagatagcgtgggagaagatccgtgcccaaattcaatggctagggttttgagttgcgatttaaggataccgaataagttacgaaacacacgaagggaatccccttctgtagtcttctcgcagctgtagcacgcctgggtcacccaaa

SEQ ID NO: 99308 - DNA, 312 bp, Glycine max
  Clone ID: PAT_MRT3847_6068C.1
gatcgacagtgcccgtgcttcagaaagtgttcgtaactacactaacgatcctttttctgggtatcctggggtatgctacgccctgcttctcttcttacaatactcacttcgttgtctaccccttcaaccctgtcaatttgctatcttctcccaccgtgccagcaccgcgcgccgggccagcgtcgtctgcaactgcgtcgacgaggcaccggagaaaatcacctagctcggcgacgaaaatgcgggactcacgctcgtggaggccaagaacctctactacttcctccaggacaagcttggctactgcggggc

SEQ ID NO: 99309 - DNA, 240 bp, Glycine max
  Clone ID: PAT_MRT3847_60690C.1
catggagctacacaatattgaaacagccttatcaaatgaaagagatcaacacattaatgaagtcaagaaacttactgcaatgctcaatgaaaaggaggctgcccttgaggagatgaagaaagaacttaaagcaaggccaacagaaaaaatggttgatgatctgcgcaagaaagtgaaaattttgcaggcagtgggttataattcaatcgaggctgaagactgggaagtggctacagtggg

SEQ ID NO: 99310 - DNA, 274 bp, Glycine max
  Clone ID: PAT_MRT3847_60691C.1
tcttattttaagaaaattacagggttaaatatcagttacaatttttgaatattctactcacgtgcccaaaggttgatgtgtcatttggaaacggtgttataaatggttaagattaatagcagtgcttccaagtagtgttgcggatcatatgtggcaacacggctttcatggtaggaataagggcgagatagagagatgttttgttctttggtgtgcggttatgtggtgcatttgaaaaaggaggaatgattgcatcttcaacaagagggatttg

SEQ ID NO: 99311 - DNA, 735 bp, Glycine max
  unsure (1)..(735): unsure at all n locations
  Clone ID: PAT_MRT3847_60692C.1
ccacgcgtccgaacattgtgaggcaaccggtccaattgcataaaagttggagaaatcagaaatgagtactgtggctatatttctgatctttttacttttgctatcaagatcaaaagcatcaagcaacattggtgtgaactatggccaacttgggaacaatctaccctctccacatcggtccattgagttgctaacaacaatgaaagctggtcgtgtgaaaatatatgatgccaacccagagattttgaggcttttatcaaataccaagctcaaagtttccatcatgatcccaaacaatgagatctcaggcattgctgcaaaccaaagcatagctgatgaatgggtgaggaacaatgtcctaccctactaccccaacaccatgatccgctacctactcatgggaaacgaagtgctgagctacaattcagagcaaggccaccaaatgtggcgcgatcttgtcccggcgatgcgtagcatcgagagatccctcagagctcagaacatcngagacatcaaaattggtaccccattagccatggatgtgttacaatcaacattcccaccatccagcagcgcgttcagatcagacataagagacagcgtgatggtgccaatgctgaagttcttggaccaaaccaagtcctttttcttcattggtgtatatccctatttcccttggtcaatgaactcctacaatatcagcctttgatttgctctatttaggggaaattccag

SEQ ID NO: 99312 - DNA, 346 bp, Glycine max
  Clone ID: PAT_MRT3847_60693C.1
tacggctgcgagaagacgacagaaggggaagcaagcacgacaactaaaatagcccctgaagcaagcacagctcttcttgttgggtagttctgaacaagaagctgctccttgtgctgaaactgaagtacattgttatgatacatcaggacaactgctgtgctagacagtacgcacttgtgtacttactgatccacaatagatgggtacacgccaagaaactctgagtgatagggttgatcaggaatgctcattcatggctgacgtgactgcagctctgttcgcataatcagagaaacacggtgatagaagtgcagtttcttttaccaaagatgacaatgatgcaata

SEQ ID NO: 99313 - DNA, 458 bp, Glycine max
  Clone ID: PAT_MRT3847_60694C.1
ccacgcgtccgggaacggggaactgggggagacacaaactggcttttgttgttgcactaaatctgttttctgctgcacctttctggagttatatatatatatatatatatatatattatgggattaatatctataattcttcattaaaaaaaaactattgtatccgagaattttatttttcacacatgctgaactctgggagcggcgttgctatatctataaattaccatgctgtgttattttcacaatgcattgcgggaacaaagatttggtcgagaagtcacaatacagtacaatctctgcaatgagccttggataaagtatagaataagcactggtgctgacaagggtttaaaaaaggcactttacacatctccacctttgaagaaggggaagttttgtatttagagacacatttgtgcagatatgaactatgttttactggagagaagatgctc

SEQ ID NO: 99314 - DNA, 242 bp, Glycine max
  unsure (1)..(242): unsure at all n locations
  Clone ID: PAT_MRT3847_60695C.1
gtagttacttaacgaggagggcccccccccggggcgggaaaaggaaccgagcacgacaacgaccaccacaagaggacnanagnggacagaaagcggagcgggaaaagaacagccgagacgacgcgaaaggagaagagcacgggagacaaacgcccagcagaagaaccacccaaagaacccgccagcagaagagaagccaccagcgcacaaaggccccaggagagaaacaccaaagcaaacaa

SEQ ID NO: 99315 - DNA, 208 bp, Glycine max
  Clone ID: PAT_MRT3847_60696C.1
aacactaaatctcttaacacattaaaaaataaaagtccttatgttattatttaaactacatacccccaagttccaccaaattactcaatcttacaaataccatatccccttaatcacgtataaaaaaccctctccccaacatcaaaataataatatcctctatataataaagcatatcattgccccctcccaaccccaaaatattaaa

SEQ ID NO: 99316 - DNA, 246 bp, Glycine max
  Clone ID: PAT_MRT3847_60697C.1
tatggagacatagattagccgcgtgcttatgctttcacaggaattagaacgtgacgatgcacaagaagggaaaatatttatccctagcccaagatgtttttaagagaaagctgtggctagacaatgtgctttgagagagtatcataaactatggcatctctcataacaagaagaagaaaaaatatgctgaagaaaactactaaaaagaaataagaccaagagaaaacactaaaataaagaaaatgt

SEQ ID NO: 99317 - DNA, 188 bp, Glycine max
  Clone ID: PAT_MRT3847_60698C.1
ggaacaaggaaaaagcttccaaattttataaatgagggtaaattcctcattgggaaaaaaaagttttattttggagcaggatctcccggggttcggaacataggggggggggtcggtgctttttccaaaatgtgaacatggcactagcctcaacttaaccattaatcttctcctggattttttgcaaa

SEQ ID NO: 99318 - DNA, 250 bp, Glycine max
  unsure (1)..(250): unsure at all n locations
  Clone ID: PAT_MRT3847_60699C.1
gnaaaactttcggnagatttnatccanttgaaatnnccaaaaatgactgggataaacttanganttcaattattgaaattgaataagtanacaatttaattggattggtcgnatggtatcaaaaanatggagtactaactcccatttcttatttattattgaattaaccgntcnacttgctttgttatcgancatttctttttgatttnaaaaattttccggaaaannttgaatcnantttatangcgac

SEQ ID NO: 99319 - DNA, 1406 bp, Glycine max
  Clone ID: PAT_MRT3847_6069C.1
acggctgggagaagaaaacaaaaaaggggttttccttattccaatagcgaggcgagacatcgattccaaaggtgcgtttctgctgtgctagggtttctgcatcttccacctccgtcgcgatgaaaccaggcttcatctgattccgatttcccttcgctccttctcctccttaacattcatcttcttcgattcctctacaaattatgattattattatgatgaactccatcttcgcctcgcataaccttcgcgtcttcggtcccggcttgaatcccttcgcaccttattgcatcgccaatcactcccttttcctttccctttcctctcgctaaattacaattccctttctttttcctctccaacttctccttctccgtttctccgaacatgtaaattcggaggacaccgtctttgattcggtctatttttttgggggttactttacttcggttacgcgtcgtcgttttgcttttctttgtcgtcgtttttgcgttgcgttgattgctgagaaagaaagaaagaaagaaagatgctggaggaacagcctgttgttttgttcaggaagagcccttccaggaggcgcttgagatctgcttttgctaccgatgataggggttggacctcgcttcatgttttcgctcgaaaaggcgatctcaaattggttaaaaaacttctcaatgaaggaatggatgtcaatgtgtctgcatggggccccaaatcaaaaggggtgacccctctccaccttgctgccgaaggtggtcacattggagtgatggatgtactacttgagtgtggtgctgacattgatgccagaactaagggtgcttgtggctggacgccgctccacattgcagccaaggaaaggaggagggatgctgtgaaattcttgatagagaatggagccttcatgccacctgatatcagtgatagcagatttaacccaccgcttcattactgccccggactggaatgggcctatgaggagatgaagcgacttcgtcaggaagacttgtctgctggagagacatgttacagctctgaaagttaatttgcttttcagggatttggttggtgtttgatagtgtgtttggatgccattcagaggagatcaaagttaatataactagcttttgcgtcacctttacaaatttgacatgaaaatatgctgatacgtacattcagaaagcgtatccagacatgcactgtatctgtattgtatgaataaatgtacaattgaaataaaactactatgtagtgtatggggatgttttactattttagcatcttggatgcccttgtttatggaaacaattatgtacgattattaatgtgatatgctgtgattgttgatgttttcaaatacgtgttgtagactatgttcaaagtattgctattgttattctgtt

SEQ ID NO: 99320 - DNA, 270 bp, Glycine max
  Clone ID: PAT_MRT3847_606C.1
caaaaaacaagagttggttttaattccccttacaagatacaaaacaattgcattttttggcccacgacttaccggggggattccttgaataaaaaaaatccaaatccttttttgcccgtcccagtcgtccttaaagagtgggctttttttcaacaaactggtgataaacctaaaataagacacagtgttgatcgttttaaacatcatattggtttccaaattccttttttaaaaaactgaacaaatgcagttacgtggggatcctggggc

SEQ ID NO: 99321 - DNA, 378 bp, Glycine max
  Clone ID: PAT_MRT3847_60700C.1
aaacaattaaatcggccctttacgacaagggaaaaaaaaaaggcccatacaaatttcccgaaaatgccgaacattttcagaggcaaaatcaaggactaaaaggccttcctgggggttaaatagcccaataatttttgggggaaaaacaaaaggttgtaagcagtaccagaactaaaccctaagcaattcgcctgggatctcaaagggcaaaaaatttcgcaccaattttcaatttaccattttccaccaaaaagggccgacccaccctgaaaagaatcccccggacacagggttcgtccaaatcccgccgtttacacccgcgcaacggccggcccggcggttgaagcgggggccccaccggggaacgaggggaatccg

SEQ ID NO: 99322 - DNA, 261 bp, Glycine max
  Clone ID: PAT_MRT3847_60701C.1
ctacatacaacataaacaactacatttttagccctcactcacaaatccattcctctcacgttatagcgacacttctgatgaagtcgtcacaaaaagcaactgacttggcttacttattagtattgttgctgttaattgtttacaaggatggagataatatcaccagtaccagcaacagcagcaacaacagccagaaacgcaaccgcgaaatcgccagaacccgacgtagagacgctgacccggatccaccataacccgaac

SEQ ID NO: 99323 - DNA, 414 bp, Glycine max
  Clone ID: PAT_MRT3847_60702C.1
aataaaaccatggctcaaattatatatttgtcattatcacttgggccctgacacaccataccaacgcttcataacaaacatatgcataccaaattacaagccgcacaatcggtagctcgccccatagtaacgcataagcacacacacacccaccaaaaggaccacacttaacaagcaacaatgacgataaattactactaaggattcaaatctcaaatctgacaccttacgcaaaactgagaatccacacatttttgaatcatgactctctcggaggcgctgttaaaagccataacggcacattttgaaaatatcacaattcttaacatacacctcaccacacgtatccaaccgaaattaatgtcccgactagcgctacagtatacaaacacaacattgtggataacatgcaca

SEQ ID NO: 99324 - DNA, 690 bp, Glycine max
  Clone ID: PAT_MRT3847_60703C.1
gagaacttctcaagcggaatcacgtgaaatgttccaaaagaagcaataagaatttgattgctcaagtctacagaatgccccattatacttccaaggtataaacactcaagtttagtatatttaagagtcctaccattgcaacatgcaacattgcattcaaccagaacaccacaaaaacatcaccctattctctattgtgtaatcaaatatcattaaccatccatggcacaaagaagcaagtcatttcgttttaggatcccatggctatcagtaccatctgaatcattcgctcgtcgtacaagagaaagaccaaaatcccctccccactcagacacaagtgtgcctattcatagaccatctaagccttctgtgatagccccttcagagttatctcctcttagtcccacgaaaactgaggaagccccaagagctgaacctcaaaaagagtcaccaccccatccaacacctccaccatcaacttcagagagcattgagtccccagtgaaggttcaacctaagccaaaacctctttctccacagcctccacttcgaccttcatctcatgcagactctccatctcaggttcatgttgcaccctcatcccccaaaactcatttggcctcagataatggagccatgaaggtgccaaagcttgttgctgaagaaaccactcctcctgcatcatctttc

SEQ ID NO: 99325 - DNA, 400 bp, Glycine max
  unsure (1)..(400): unsure at all n locations
  Clone ID: PAT_MRT3847_60704C.1
gggtacggaagttgcatcaacttctcctatttatctcaaatcaaagtactcatacagctataattggcacctacgcttatcccagatattttggatcagaagcaaataatgaacttaagcgaactagcctccatatatacgccctagctatacggcctccacatgggaaattggatcctcttcatttccttttctctccatttcttccatttttataaacttttagaaaaataaatcaaatggaaatgatgcattctttatgagaagtaatatttattttctaaaaagcttattaataaaaaagtggaaaaaaaagagaaatggaaagaatccaaacccttccacatgacacttaacaaacctaatgaccttttcncgcaagaatgtttatatatgcaag

SEQ ID NO: 99326 - DNA, 330 bp, Glycine max
  unsure (1)..(330): unsure at all n locations
  Clone ID: PAT_MRT3847_60705C.1
anacnccacccgnncncgncacgcggnacncaagcncngnangnggctccgagnncnncacncaaagagngagaggccngnncccagccncgncacngnggccnnccgcgcccccacncncccngngaacccgnnnccnctgccagncgacccggnaccaccnnacnagccnaccanccnccgnccncnccccccccccgccccacncccnnnncnngctnncnngccacgncagncgacggcccnnacnnaccaccnccccccgacccccaaccgcgcccnnccacccnnnngggccncaacanncgnncnncnnncngcncnnngang

SEQ ID NO: 99327 - DNA, 427 bp, Glycine max
  Clone ID: PAT_MRT3847_60706C.1
cattaagagaaggatttcttaaatcattcaggtgtcaagaacgtaaccagggacagctgaaaaatattagcccttgacatattcattacgatgatactaaaatagatatctctctatcatactaataccaatataactcttaacttggaaacttacgtgcaaagccttataaatgtaactttatctcgtaatatctaattgaaaaattaactctgtatcataccataaccccaggctatatgatatgtaaaataaatgcgaataaccaaataggagtcacttgtattgtcaaatagatacgattgataagtgacccacaagttatgaacattcttgacctaagaatcacatattattatggattaggggcaaacgacaccatcaacacgatttcttgagttgggcacgttgattagcacaccggggt

SEQ ID NO: 99328 - DNA, 520 bp, Glycine max
  Clone ID: PAT_MRT3847_60707C.1
agatctcctgtccctgtctaaaaacccagaaccctagccctcgccctaaaaccaaaatctcgttgcagtgttttcgcctttcctctcacaccaatggccgactctgtaatttcgattcagtacctcaaagatttcgttaattctcaaatctatgacgatgagaaatgggccttcaatgcgaaattgctgcgtgctgctggattgttcgcaggatcaatactacttatgcgaaactatggtgaccttatggcaatctgaaagtagaagaactagttgtctgtcatgagttactattatctactttaccagtaatatgatgtttatgctttttttccctttctttttatcagtaatttgaaaatgaagtggtttttttggtttgaagcttttggtgaacgatggcaatgcttttccgattgggtttactttaatagtaaattctcacatactctggctaagatgtgttggatatgaaatacagtaactattttcgatgttcttagaaaaaagaacgccccct

SEQ ID NO: 99329 - DNA, 227 bp, Glycine max
  Clone ID: PAT_MRT3847_60708C.1
cgacccacgcgtacgacaactcttcttgtgtaaaagaggcagcccctatatctctgttctggggtgattattcttatgaaagtggatgaaagcaccttgaataaaatatttattataataaaaatattgcatttaaatggaaaaaagaaaaaattaaaaaacaaaaaaaaaaacaaaccaaaaataaacccgaaagcaaaaaaaaaaaaggcgggcgttctaataaa

SEQ ID NO: 99330 - DNA, 333 bp, Glycine max
  unsure (1)..(333): unsure at all n locations
  Clone ID: PAT_MRT3847_60709C.1
ctgttccttcctgggacncaccnnnatctagaactggaaccagtatcagagtcaaatccacttcactctacagtgacttctttgtttttgagttttctcaaggagtgtgcttaaagtaattagaggatcctctgaccgagaaggctcaattgctatcctctttttgctccttgactatcagctctagaaataaaccttacctaaaaccctttaacaattgttcaacactgtatttctatcacgttagcttgcaataatcccaaaactccatttagatggctttttcttgcaagaacagaagccatgaaaaaggtccctagtattacatgctgc

SEQ ID NO: 99331 - DNA, 1600 bp, Glycine max
  unsure (1)..(1600): unsure at all n locations
  Clone ID: PAT_MRT3847_6070C.1
ttcccgggtcgacccacgcgtccgcccacgcgtccgcccacgcgtccgtacggcatggcaaaagaggagaggatagggtgcctttagattgggatactcgactgaaaatagccttaggtgctgcagtgaggcattgctcgtattcatgttgagaatggtggcaagcttgtacatggcaacatcaaatcctcaaacattttcctcaacaccaaacagtatggacgttcgtctgaccttggtcctgcaaacatttcaagctcacttgccttgcaatcatcattcgcatcggattaccgtggcctctaagttaccaacatgagtgcgttcggcagcttttctcgttgcgtttctgctctgctagggtttcatcttcttccatcacctccgtcgcaatgaaaccaggcttcatctgaatccgattccccttcgccccttctcctccttcactttcaccttctccgaatcctctaccaattattatgatgaactccatcttcgtctctcacaaccttcgcgtctttggtcccggcttgaatcccttcgcaccttattgcatcgccaatcacaccctttcctctcgctaaataccaattcccctctccgattttcggggttactttacttggtcgttttgcttttttctttgtggtcgtttttgctttaattgctgagaaagatagaaacatgctcgaggaacagcctgttgttttgttcaggaagagcccttccaggaggcgcttgagatctgcctttgataccgatgataggggttggacctcgcttcatgttttcgctcgaaaaggcgaactcaaattggttaaaaaacttatcaatgaaggaatggatgtcaatgtgtctgcttggggccccaaatcaaaaggggtgacccctctccaccttgctgccgaaggtggtcacattggagtgatggatgtactacttgagcgtggtgctgacattgatgccagaactaagggtgcctgtggctggacaccgctccacattgcagccaaggaaaggaggagggatgctgtgaaattcttgttagagaatggagccttcatgccacctgatatcagtgatagcagatttaacccaccgcttcattactgtcccgggctggaatgggcctacgaggagatgaagcgacttcgtcaagaagatttgtctgctggagagacatcttacagctccgaaagttaatttgcttttcagggacttggttggtgtttgatagtgtgtgtttggatgccgttcagaggagatcaatgtgtgtcagatcagagttaatatgactagcttctgcgtcacctttataaatttgacatgaaaatttgttgatatgtgcattcagaaagcgtatccagacatgcactgaatctgtattgtgggaataaatgtagaattgaaataaaacaattatgtatgtgtaactattttagcatgttcgatctcttgtttatggaaacaatcatgtacgattttaatgtgatatgttgtgattgctgatgttttcttttacttgtagactatgttcagaattcagagccagttcaaaaaaaaaaaaaaaaaaaaaaaaaaaaagcggccgcntagagga

SEQ ID NO: 99332 - DNA, 284 bp, Glycine max
  unsure (1)..(284): unsure at all n locations
  Clone ID: PAT_MRT3847_60710C.1
ccgacccattatccgactccctggagcgttgccagcacagcgggagaaacaaccaaacgggggaactacaacnaaacacgcggcggaacacacgcaaccccgcacgaaaaaaaggaagggagagggcaaggacggggttacatcatcgcagaaggcaacaaggcgccttaccgtggacttggcataggaaccaagttaacgaatcatggtcttgatccatgctccaagcaaaacatggatgacggatactagcatgggcagacaaacaatcaagccgccataaa

SEQ ID NO: 99333 - DNA, 600 bp, Glycine max
  Clone ID: PAT_MRT3847_60711C.1
ggaaaaaaaataaaaagttctttttttcatatttgggggcccaaagcaccttttttccccccttttttccccccatgttccttttttttttcccatacccctgcaaggggtaaccaaacccttgaattgaaaaacctaaaccccccccttgcatttttttggattctttccccccttttggggccccttttttttagcttttccccaatcccccttttgccctccttaaaaaaggggggcccccagtgggggggccccttgggtttgggggcttcccatttgggggcttgaaccccgggggcttctcaccggggggtttgaaaattgggggttccccccctgggggcttgaaaccggggggttcccttccggggggcttgaaaccggggggctttttctctgggggctttccccctggaggctttccaccggggggctttattccggggggcttctcccggggggctttaaacctggggcccttccccccggggggcctgtaaccggggggccttcccccccgggggccttttcccccgtggtgtttttttacccgggggggcttttccccccccgggggggttttttcccacccggggg

SEQ ID NO: 99334 - DNA, 778 bp, Glycine max
  Clone ID: PAT_MRT3847_60712C.1
gtttattggacaaatagcaaaattatgtggtggtggaggaggtggaaggccaaattttgctcaggcgtggtgggaggaagcctgaaaatttggcaagtgcccttgataaggctcggtcagagcttatagccactctatgtgaaaaagggaattgaatttaagtacacttagcagatagatctttttatgctaaagcagcagaaaatattgattctctgttgtcgaagaattcatcacaaaacaattcacaagcaaaaggggcggaagctgctgaagttttaacgagttttcttgcaattccagggggcatgtaattgaagtttcaaaatagtatagagcatttgttcgtgtgactttattctcctgacaacctggcctgcattcacacattccaacttgtaaattttgacatgcgcatctcagattggttgcaggatgtaagtgcaaacactatatatatacacctgaaagatagttgagagtgaatgacggcggtggattcactcctttctcttttgattgccttggaggaagttgggaccccatagaattaaaagtgatagaactgaaggttaaactgtttggtgaaagtaagtgaatgatgttatgtctagcaacttgacggtcaagaaaattgtcaattgttgtgggtgaaacgctacttaaaaagaaagaaaaaatacatgattatcacggatgtgaaattgtgttatagaattatgtcactaaacggtagatgagaaattgtcacgtcccaaaatatggcctattttatgtc

SEQ ID NO: 99335 - DNA, 374 bp, Glycine max
  Clone ID: PAT_MRT3847_60713C.1
aaaatactatttattaaaaagaaaccgagaagaccgccttagctgcattcacgccatggactcactttaaccttctctcacactcaccgctgccaccaccgccttccaccatggactccgttccgtttcgcgatggtaacatacacaccattctcgactcccgttatcttcactctccactggatgttaatcatagtttgcacactcattcctcgctgattcggaggctttctcaagaaagggagttagagggccacactggctgtgtcaatgcggtggcttggaattccaaaggttcgttactgatatctggatcagatgatcaacggatcaatatttggagctattctggctgaaacttttacattcaattg

SEQ ID NO: 99336 - DNA, 1792 bp, Glycine max
  Clone ID: PAT_MRT3847_60714C.1
cggctcgagggcgatcatggttatctatatatttcaaagggtgagaatcaaccaaaagctgttgtggagatattagatgttcagaaatcttttggcaacatatttgttcacaagggtacagtccaaaagggtgttgtagaggttggcaaagaagttgaagcagcagttgatgtgaagctgaggcagcgagctaaggttcatcatactgctactcatttactacaagctgcacttaaaaaagttattggtcaggagacctcacaagctggttcactggtggcatttgatcgtctcaggtttgatttcaacttccaccgaccacttcgtgacagtgagcttgctgaaattgaggtgctaataaatggatggatattttgctcaagctggtgggaggaagcctgaaaatttggcaagtgcccttgataaggctcggtcagagcttatagccactctatgtgaaaaagggaattgaatttaagtacacttagcagatagatctttttatgctaaagcagcagaaaatattgattctctgttgtcgaagaattcatcacaaaacaattcacaagcaaaaggggcggaagctgctgaagttttaacgagtttggggaagcttccattgaatatatcaatgcccgagacttttatctgaagcagctatgttccactctcaaagttaaaccaagaagaagtgacaacaaggatagaaaaccttttagaggagttaagggcagtgagaaatgaaaattctgctgttcatgcaaaagcatgcaatctacaaagcttcagtcattgcaagcaaagtaatgttggtggggaattcaaaacagtacagggtactggttgagtgctttgatgatgctgatgctgagtcacttaaaagtgccgcagaatatttactggaaacactaacagatccagcagctgtggtactgggctcatgtccaggtgaagggaaggttagtctagttgctgcttttactccaggggtggttgatcaggggatccaggcaggcaagtttattggacaaatagcaaaattatgtggtggtggaggaggtggaaggccaaattttgctcaggctggtgggaggaagcctgaaaatttggcaagtgcccttgataaggctcggtcagagcttatagctactctatgtgaaaaagggaattgaatttaaacacacttagcagatctttttatgctaaagcaacagaaaatattgattctctgttgtcgaagaatacatcacaaaacaattcacaagcaaaaggggtggaagctgaagtaacgagtttccttgcatttccagttggggcggcacgtaattatagagcatttgttcgtgtgactttattctcctgacacaacctggtctgcattcacacattccaacttgtcatctcagattggatgcaggatgtaagtgcaaacactgtcactatatatatatatacacacacacacacaacacacaagaaagatagttttgagaatgaaagacggctaggtggattcactcctttctctcttgattgccttggaagaagttgggaccccatagaattagaagtgatacaactgaaggttaagctgtttggtgaaagtaagtgaatgatgttatgtctagcaacttgacggtcaagaaaattgtcaattgttgggggtgaaacgctacttaaaaagaaagaaaaaatagatgattatcgtggatgtgaaattgtgttatagaattatgtcactaaacggtagatgagaaattgtcacgtcccaaaatatggcctattttatgtc

SEQ ID NO: 99337 - DNA, 369 bp, Glycine max
  Clone ID: PAT_MRT3847_60715C.1
ctaggaatgcggcctggacgttttttttttttttttttaaagaatacgaccattttacttaggtgtatgactgttttgagccaaaacaatctgttacgtaccttcagctctgagtgttttcatggtgaaaaaagaagggaatcctcttgaggagggtggcacatattatgatttgaaagacataacacggacggggtgggataagagcactccaaacgggaggtgaaagaagccagatgactgtggttcaatgtatccatgagctagacatacggaggggggcgttgacatcatacccgcatctaattattgttttcgtcataagccactctttgaggcttaatcaaacacacattggatcataatgct

SEQ ID NO: 99338 - DNA, 148 bp, Glycine max
  unsure (1)..(148): unsure at all n locations
  Clone ID: PAT_MRT3847_60716C.1
gtcanacttannaacantaatggtatttcttccgacgccccanaggagatcgagagcgcgnncaaagtcccccgacttncgtcgacancctctacnatctagtccacaagagatctacgnctggnggtggggncantccttcnaattc

SEQ ID NO: 99339 - DNA, 351 bp, Glycine max
  Clone ID: PAT_MRT3847_60717C.1
aacctttgggctgatttatgtgcttgatggtcgtcagaagatgacagaagggggacggaaaaactaaaatgagaaataccaataaggagaagaaaaaaaaaaaacaagtaaaaacggaaaaacaacaaaaaacacaaaaaaaaaaaagtggttgcctcaaaggacttaagtcaatccatgtgcgtacgtaatgctacagtctccacacagggctattcaaaccaaacctatcgtttgctgccccataatgcagagatcggaaaaatttcgatgccattaaatccaactgttccgtaaaatacttttcccctgtaagccggtgcaacagtaaaaaggtttctattgactgtt

SEQ ID NO: 99340 - DNA, 346 bp, Glycine max
  Clone ID: PAT_MRT3847_60718C.1
agcagcactagatagtgctgctgacagaacatagttgtacctctgccaccagcactagatagtggggttgcttttatgactgtcatgctctacttctcgctgggtttggaaaacaagagtctaaattggtggggaaatgatggtgaacattgtcctctggcagcttgcccaacagcaaagggcataattgttgacggttgccctgcaaactagtgattttatgcctatttgaatggtttcattacaatacgacgcatgaaaaacacgtatttatagcaaattcaaaatgtaaaagataaaaaagaactacattttcaagtaaatagctagtgttacatggttaaaa

SEQ ID NO: 99341 - DNA, 248 bp, Glycine max
  unsure (1)..(248): unsure at all n locations
  Clone ID: PAT_MRT3847_60719C.1
taaaagttgatgtaataaaatacaatattaaatattggtttacatctcaacattaagattcctaaatgnccatttatgttnnaaaataatacngncttcaaaattggctttcctttnnnnannnnnnnnnnnnnnnnnnnnnnnnaanntnnnnnnnnnnnnntnnnnnaaancaattttnccnaantgcataattcatgtcccaaaacttgaaagacaatgagggggctgagataacacacagcagc

SEQ ID NO: 99342 - DNA, 250 bp, Glycine max
  unsure (1)..(250): unsure at all n locations
  Clone ID: PAT_MRT3847_6071C.1
gggtnttcgcccgtacgtctgaagatctggnnngaattaaccnccgggtcgcaatgctgctcgtgcccgccccgacttcttgatgttttttaaacgcttgaaactctttcatccgcaccaagggtgctgctggggctcaacgtggatattccacagaagctggctccatcaaaacgctcctgtttcttgagcaccgggacggccagaacaatccgggatccttgaacgctctttacgcctttaaaaagct

SEQ ID NO: 99343 - DNA, 357 bp, Glycine max
  Clone ID: PAT_MRT3847_60720C.1
ggaacgccagcaatggctaaagcagggaaagtgaggagctccatggaggaaaagccttaaagcggctcaaatatggggatgggggcatacttgatagcaactacaattgccgcaaccatgtcaagcccagacatggcttgaggtggatgatgagactcagaactgaaagaacctggcttccgttggggctcagcatcaacctcattgattagatcctgcagggtgtctgaaaccttatatgggctctctactttgactacgctagcaccctggaaaaggatgaagagactggattgtgcgtctaaaccgccatgtgacgaagcatgcacttgtagaaattgcaaagacttatctctt

SEQ ID NO: 99344 - DNA, 418 bp, Glycine max
  Clone ID: PAT_MRT3847_60721C.1
tgaagacgacagaaggggtatggcgccagcaatggtttggtccggagaaattggtgggacaggatggtcgcatatggatgtatgttcagtgcatctaaattaatcaggtgaccctttttctgtgttcttacttgtatcattcggatgactaagagatgaactgagctgaatttattttaatattcaactaattttgttctaatgtcctttgcaaagacaattctaaagttacagaaattaaggcagaaggagattaaacttgagatacattagaaagagttgcctatatttgtcagaggcacagagccattaatggaataatttgcaaatcaatgaacttacttagccttccaactcctattcatagcattaccaaagtccaaaccaatgcttctatctgtcatttcagttccaatac

SEQ ID NO: 99345 - DNA, 232 bp, Glycine max
  Clone ID: PAT_MRT3847_60722C.1
gtaagctcggcattcggctcgagatcataatacatatttgctttacgaaaccctcctttggatactgctattacactgtatgatgcacatggttcaattgttgatatgacccactacgtctgttaataatgacatgatcactgaatgccagggtctcgccacatcagaaaggagcaatttacatccagctgcagttccatttgccaaaattccaaaagaatttgaagggctt

SEQ ID NO: 99346 - DNA, 355 bp, Glycine max
  Clone ID: PAT_MRT3847_60723C.1
ccggaattacccacgcgtcccttttccgcgtttccttgggactgttccattaccacctgagtgaccgaaacattcttttaaccgctgatctcacaggtccgctttcggatccggcgatgaaattaaaaggccctgaggtccgcctcttaaaccagatacaacactctcggaaacggttgtgttactatctccgacatacctggtgctcattaggaatggacttccacactacatcctcggagcacgcttttacatcctcaagattataggacctaatattgtatgcatttctgttagaagctatgtaggggagataattgtgacctttgaaacattgagcgatttgattagatga

SEQ ID NO: 99347 - DNA, 315 bp, Glycine max
  Clone ID: PAT_MRT3847_60724C.1
cggctcgagcatatttatgagagtaatagagtgagcttgaatgcttgatatctgttatgaactgctgggtttgggctcatgtaagcttaagggctctactatgggggcttaaaaaaagaaaactcccatctttttacaaaaagtagtcaaaacttgaaatcaaatcaggagcgggggaaaaagaaaagagagagaagtagggttcgaaaatggcagcagaatcatcagagggcgaagaagaaaccaagttaagcggagggagcttattgctgaccgttgacgacgacttaacggaaatgggaaagaaagccgctt

SEQ ID NO: 99348 - DNA, 209 bp, Glycine max
  Clone ID: PAT_MRT3847_60725C.1
cacactcgagcgccctcatatttggcggaggtttctaagttccgtactttattgatactacgggggcttaacttttggcaattgaggcccaagccttcttccttcactatcctatcatcatctactttcttgctactctctagttctattgtactgttgactatcacttatcatcttaacatttaatagcttctgtgtacattattatt

SEQ ID NO: 99349 - DNA, 353 bp, Glycine max
  Clone ID: PAT_MRT3847_60726C.1
aggaaacaatttctttttttttaaattccaaacaatttctttttttttaaatcccaaattttacggggggaaaaacccccttttttttttttagggggaggtttttggcctaccaggggaccaaatacttttccaaacaaggctttttttatccccaaggttgggaataaaatttgaccaacaggctcaagggatggaaggcgggccctttttactaaaaagaaaatcatattcttcccctccaaattttccctcgggcggggaattaaattaacctaatggcttaaaccctaccttaattggaataaactttttattagttctaatggatgccggcaactttctcctgggga

SEQ ID NO: 99350 - DNA, 398 bp, Glycine max
  Clone ID: PAT_MRT3847_60727C.1
aattatatggtttttgtcgtggctgcaataggtttcttgcattaaagaagtatgtttagaagtgcctgtagcaattccgggtgtgcaaaaagaacaccctaccgatgttcgacggttggtgttttgccttatcaaaaaataaaataaaaagtaaaataaattggcctgctcgttgtgggggctccctttgtaggtaccccttctatatcacctgttagccccctctatagatttaccttatgtcggccagattgatttatttatttgggggggctttttttgaaagaaaccggggtaaaaccccggggtattgaaactttaacttcttttgtgagggaccctttttttttattgggggggtgtattattaaaagggcccttttttaaaaactctctcc

SEQ ID NO: 99351 - DNA, 361 bp, Glycine max
  unsure (1)..(361): unsure at all n locations
  Clone ID: PAT_MRT3847_60728C.1
taatccacaacagctattgtctcatctgatatcaaacatcgggtcaaaaaatgccttctcacaactatgacccagttccatgtccatatgtccatcttgtatggatgttaactgaacatatattacaacacactctccctaatggaaagatgatatttacaaagacccagttaaaatgtgtcaggagacaaatgactgtacatatacacaaattagagatgctaataggtgaaagagggaacggggggcaaaatggttggatccatggcaagttttcactatgtacagattatatacaaaatttactgctcccttgagattttacaganagggcaccaccctacgtagttttggcacaaat

SEQ ID NO: 99352 - DNA, 398 bp, Glycine max
  unsure (1)..(398): unsure at all n locations
  Clone ID: PAT_MRT3847_60729C.1
gtaaagagaaaactagtttagaacttgcatttggaagccaggggtaggcatctggaggaggcataacacagttatccccattgaaataaattcttctagggaaggcccatcccttatcaaatgtgaaggttgatttgtcttttctaagtaagatttctgactgaacattaccaagagatccagctgaagaaagaaaaagtgccacagatgcatgaatgcatgccacaagaattctgtccttattcaccttggggatagaattttaccccccatatatgtaacacatctttttagcctgagttgtataattattttaaattactcaattgggtgattatacttttatgattatagaatatccaatttattnttttaccgttaagatcatgaatccaaga

SEQ ID NO: 99353 - DNA, 454 bp, Glycine max
  unsure (1)..(454): unsure at all n locations
  Clone ID: PAT_MRT3847_6072C.1
gtcatccatttattgtattccaattacaaaatcgaaacttggatgcataaaatcaggacattaaaagaaaagaagcatgtaacgacagaactgagtgaaattcaatgggacattaaagtcacagtggtttatccttgatggaatttatatattagatcaagactgatgtctggcagcgtggatgcacaaatcaaaatgagaaagattgagtgaactcattgttctagctttgtattgcatgtttcatttcaaatttcattttcatgggatgttcagctaatgtgtaataggaataatatagatggattggttttacaaacttttggtttgatttgtatttgttgtcttttctaatgatggtacttattacttaatctttgcatgctagtgatggtactaatcagatgattnttttttcatttaatattttgagttatggatcctgaatttctca

SEQ ID NO: 99354 - DNA, 375 bp, Glycine max
  Clone ID: PAT_MRT3847_60730C.1
accgatctccaattccgagctacgcccacgcatccaaccactcgtgagtgcatacctaacacatactatgaccaacatggactactacacgggcgaggtataattcgagacttgatcctaccatattccattctacatcaaaaactattatattcacctacctacaccctcaaactcaccaaaatctcaactactatattctttataagccagttaccacaactggaaccctccacatcctcaagcatcaacacgatcctaagactaatgagatagacaaagaattaaagtctgaacaaggaactcaaagactcattatctatgaaaagaaagccatttatagacaacgaccgttactactctccaaaaccttga

SEQ ID NO: 99355 - DNA, 322 bp, Glycine max
  unsure (1)..(322): unsure at all n locations
  Clone ID: PAT_MRT3847_60731C.1
aacgcgccgcgagcgncgggaaccggagccgaagcaacccaccaggcggggggcgcgacaccacgaggcccggagcaaggcaacaacggacgcagaaacgaacnggcgaaccacgnacccaagcgagccggcagcacanaaaacaccggagggaggcggacaaaggagcaggaccaccccagcgcgcgggccggggggggggccggcngagcgcggaaaaancggcagccggggagcgcggggcccgcgggggacagcagccccggggccagaggggaagccccggccgaaacggaggagcnacacaaccgggagggaggcc

SEQ ID NO: 99356 - DNA, 343 bp, Glycine max
  Clone ID: PAT_MRT3847_60732C.1
tgtgaaaccaccttcaaacgttccagggccagcatggttgctccattcaccgatcctgaaatccatggatggacttccccactatgaagaaccaacaatgacattacctccattgctaacaacggcgaaagagtacaatgcatgcttttgtgtgcaccaattgacaacaatgaagtccagactctttcctacttgcccagacctcgatgatgcccaattgggaaaggaaggctaataccttctaaggaaaggatggattccttgcttggaattcgagttgtagcacggtttcatgtaccgtgagcacaacaggtcacctgggatactatgatggacgctactg

SEQ ID NO: 99357 - DNA, 341 bp, Glycine max
  unsure (1)..(341): unsure at all n locations
  Clone ID: PAT_MRT3847_60733C.1
cccacgcgtccgctncttttttttttctcttttttttatttccttaaaccattgcccaaacgctgggcttaaatcctcctgttcctcctcnaacctgtaantaatgtttttcctgtaaaccttgaacttaaaactcttccaccctcttaccctcaccctcaccctgttcactcccccacaccagcacctcttcacccaccagcaaatgcttctaacccacaccaccaccaccaccaccaccacccttcagcaccagcacctgttccttcaccttctcaccacaattaccctcctacccctgcccctgctaagcctcctactcaccaccatcaccatcaccc

SEQ ID NO: 99358 - DNA, 329 bp, Glycine max
  unsure (1)..(329): unsure at all n locations
  Clone ID: PAT_MRT3847_60734C.1
gcgagcagttttagacacagttagaggggnctgagactgtatggacggacgctggggggtacgctcgggggtccacagccacccctaatggtgtcaaagggactttccccaaccctggagttcaagaagatccatcctggggccctcttttggatgcccctgctatcaaagagaaccacccccccatgcccacacaggacaacttggtaaaaaatcctggctttgaggagggtccattccccattttcaactcaaccaacggggttctgctcccacctcaacaacaagaagggctctcccctccccccgggtggattattgagtccccc

SEQ ID NO: 99359 - DNA, 1004 bp, Glycine max
  unsure (1)..(1004): unsure at all n locations
  Clone ID: PAT_MRT3847_60735C.1
gttagtctgcttgctgttggcgggaagtctggcacacaattcatgggttacaactataagttggctgttgtttgcttttgattcttcgaatcctcaaattttattagcttccggaagctctgatgggagtgtgaagatttggttggctgacaatgacaaattgctgaaatcatcaaaagtggatcaaacttccttctcattattgaaggagtttctgtactttcagtaaccacacatgttcaatacccttccaagatgcttttagccacgggcaaagtttctggttcatttgaaatatggctatgtgacatatcttctggggaatttgataagcttggctcatataatgcacatgatttggttgtaagttttttgacctctgtatatttttatttttttgggtgatacttggaaaaaaaggctttattcctaagctggattttgcatgtttttcaatttgataaggttactcgcttgactgatatgcctcatgacagttcaatctgcatttcaagagaggcatttgattcatgttttggtgttgcagtgtcccctggaaatcttgtcattgctactgttcattgtcttgatgttgagaaactgaatcgaatgtatgaaggaaggattctgagggcagctattgaatacttttggattggtggactacaagtggatgttcagctgaaatctcccttttcatgttacattgaaggaaattccagttatgtggagaaagaattaacttattggggaaccaatatcatatggtctttaaaccaatatcaatgtcatgataagcctctggttctctgggatataattgcagcattatcagcattcaaggataacaatttaaaatatgcagaacatttacttattgagtggatctcatcatcttttctacaattagatatggacctttctcctgaaaaagttntatcattcttctcttcaagcttgtcagacattccttctcgactactacacttgctcaatataatctg

SEQ ID NO: 99360 - DNA, 767 bp, Glycine max
  unsure (1)..(767): unsure at all n locations
  Clone ID: PAT_MRT3847_60736C.1
tgctgcatcctctgcccgtcgccatggctgcctacaagctggtgctgatccggcatggcgagagcgcctggaacctggagaaccgcttcagcggctggtacgacgccgaccccctcggcgggccacgaggaggcgaagcgcggcgggcaggcgttgcgagatgctggctatgaatttgacatctgcttcacctctgtgcagaagagagcaatccggaccctctggacagtcctggatgccattgaccagatgtggttgccagtggtcaggacttggcgcctcaatgagcgacactatggcggtctgacaggtctcaacaaagcagaaactgctgctaagcatggtgaggcccaggtaaagatctggagacgatcttatgatgtcccaccgcctcccatggagcctgatcaccccttctacagcaacatcagcaaggatcgcaggtacgcagaccttactgaagaccagctcccctcctgtgagagcctgaaggacactattgccagagcactgcccttctggaatgaagaaattgtcccccagatcaaagaggggaaaagggtcttgattgccgcccacggcaacagccttcggggcatcgttaagcatctggagggtctctcagaagaggccatcatggagctgaacctgcccacgggcatccctatcgtctatgaactggacaagaacttgaagcccatcaagcccatgcagttcctgggagacgaggagaccgtgcgcanagccatgggagctgtggctgctca

SEQ ID NO: 99361 - DNA, 264 bp, Glycine max
  Clone ID: PAT_MRT3847_60737C.1
tacggctgcgagaagacgacagaagggctctgtctactgtctatgcaattaataacttcacacactgcaccaccctcttctctcctctcctctctttttttaactttgtatcacttcttctctcatccatccaacccttcttctccattctaagaaaggtgatcaatgtacttccaccatttccatcttcccttcattttcccacttttttaaccattcaattgttcttttccttcctaattgtcttcatctaacacttactgt

SEQ ID NO: 99362 - DNA, 298 bp, Glycine max
  unsure (1)..(298): unsure at all n locations
  Clone ID: PAT_MRT3847_60738C.1
ttcttctatggcaagccaacttaagtccaccttcactaaaactcttgtagcttccaaaggcctntctggcttttcaccacttcaccttctggcttctaagaagcaatttaacttcactggtaaggccattccatcagaaaagccaacctattcagtgattcaaccaatcaaccgtgatcccttcattggaagccttgaaaccccagttacattcaaccccttggatggattgtacttattgaaccttcccgcatacaggaccgcagtgaacccactactaagaaggatcgangtgggc

SEQ ID NO: 99363 - DNA, 181 bp, Glycine max
  Clone ID: PAT_MRT3847_60739C.1
ctacaaactcggaattctctctaaagaaaactttttccataacaacctaataaaattagtaagactaacttgaacactaggttgctactttacaccttcacctcatacctaccttccaccacctcccataacttactctacataaatatcaatccaattcaaaactattacatatactact

SEQ ID NO: 99364 - DNA, 861 bp, Glycine max
  unsure (1)..(861): unsure at all n locations
  Clone ID: PAT_MRT3847_6073C.1
ggctcgagtcacaaaatagtagtattacagtttatcgttaatttctcccagattcgctttgtcgtgtctcgagcatccttgatgtccagggaaatccatatttgtccttttttctgcgtactttcatcgaattattgcttgtagctctataccaacttcttatatatcccaaattcgacaccagcgcctgaatcatcgtccaactattagttcctctctctgcgttcatatcgcaacatgcttcccttttcaactctctttcaaaccccgttaaccaccgagtattggtacaaccaccccacaacaacacttctagcgttcttgctcatctcccttgttacttgctatgcatggctcaagcccaaggcccaaaggcttccaccgggcccatcgggcctccctttcttcgggaacctcctatccttggacccagacctccacacttacttcgccgtcctggcccagatccacggtccaatcttcaagctccagctcgggagcaaactctgcatcgtgctgacttcgccgcccatggctcgcgcggtgctcaaagagaacgacaccgttttcgcaaaccgtgacgtccctgccgcgggccgggccgcgagctacggcggatccgacatagtgtggaccccatacgggcccgagtggcggatgctgcggaaggtgtgcgtggctaagatgctgagccacgccacgctggatacggtgtacgatctgcgccgcgaggaggtgcgcanaacggtgtcgtatttgcacgaccgagtggggagtgcggtgaatataggggaacaggtttttctgacggtgataaatgtgataacgaacatgctgtggggaggggtggtggaaagggcg

SEQ ID NO: 99365 - DNA, 411 bp, Glycine max
  Clone ID: PAT_MRT3847_60740C.1
ccgattgaagagcggcaatggcacacggtttgcattcacagcatccatcggaacgtcagactttatctagctacagaccttatagtgtgtgaaccagaccttcgactcatctatatacactccaagagcactgtatctaacccactgtgtagattacttgcattgcgaaactagcattctttatgatagggtccataccctgcacacgcgccaaactgaaaaaggggtgtctggattccagatgaatcacctcaagggggaagcgtcatcggttgcttacataacagctgcggctcctatctagctattaacctcgcccatccagaaccatgtatgatttgctcacaagaggaccggtgtctgaaccttaccaaggagttgtcgattgcctgactcaaaccatgataggtg

SEQ ID NO: 99366 - DNA, 775 bp, Glycine max
  Clone ID: PAT_MRT3847_60741C.1
ccacgcgtccgcctcaccttaggacctgaagtggtataacaaaccatcgagaaggtcaagttgatccaagaaaggatgaggactgcttagagtagacagaaaagttatcagaataagaagaggaaagacctggaattcgaggttggtgatcatgtattcttgagagtcactccatggactagggttggtcatgcattgaaatcctaaaaactcacacctcactttatcggtcctttccaaattcttaaaagagtcggtcctgtggcataccaaattgcattacccccgtctctttctaatcttcacaatgtctttcatgtgtctcaactctgtaagtatatccatgatccatcccatgtgattgaaatggatgacatacaagtgaaggagaatttgacatatgaatcattacctttgaggatcgaggataggtgaacaaagcacctaagagggaaggagattccgttggtcaagggtgatctcgggaggtgcatcaggagaagatgccatgtgggaattagagagtcagatgcgagcagcctatccatctttgtttgagtcagataaatttcggtagggtaattgaagagggattctggagaggagccaccttgaaatattactgacgttaagattattttgggagagagatgtgttttgttaatcaactcctccatagttggttccatgattttttttgttgaataaaagatgtaaatcacagatttgaattatatgtatgaacaagtttaatttccattatgtgaatgatgtg

SEQ ID NO: 99367 - DNA, 1209 bp, Glycine max
  Clone ID: PAT_MRT3847_60742C.1
ttttgtagtgaaggagaaacaaaagcgtttctaaaatctaaatgcacaaaaaatagagaaagatagagagaataacagcacctctttctctctgtctctctcccctcgttgatcccaaatctactagggattctcattcgatgcgattcggccggaagctttcgttttgcggatttttttaattattatttttcctggctatcaggaaagttgaaaaaaagatggaccatgacaagactggatgccaagctcccccagaaggtcctatattgtgcatcaacaactgcggattttttggaagtgcagctaccttgagcatgtgttctaagtgccacaaagacatgatgctgaagcaggagcaggcaaagcttgtagcatcatccattgggaatattatgaatgggtcatcaagcagcagtggaaatgaacctgtcgttgctaccagtgtggatgtttcagtcaattcagtagagtctaaaattatctctgctcaacctttagttgcttcaggttcagacgagagtgatgaggcgaagcccaaggatggtccaaaacgatgcagcaactgcaataagcgggttggtttgacaggatttaattgtcgatgcggtaaccttttctgttctgaacatcgctactcagacaagcataattgcccatttgattatcgcactgctgcaagggatgccatagctaaagcaaatccaactgtcaaggctgagaaacttgttaagatctagatttgttgtctttaagtttcatgctctaggtgctgttatgctcattgttgtcctcatgagatgatccgagtttcctgcattttaatggtattattatattttatatgtgatggaggacttggagttataggacatcgctgcagttcgaagtactatttcatgtgatttgcaaaaatatacttcccattctttaatttcaagtatttaaatctctgctggtttggtggaagttggtgttgttggcattgttaggcatctctgtattagtacctgtcataatggtatgtgcaatttacagatgatttcaaggtcaatcatgtccttggataattggacatgtggttagattgtaaattgtagatgtggactttagtgatgctcgtttagattcatttacgtacatgatcaaaagttcttctataaagctattaattagagttggattagtgccgaaggttggagataaaaa

SEQ ID NO: 99368 - DNA, 1385 bp, Glycine max
  Clone ID: PAT_MRT3847_60743C.1
cacgcgtccggaaagttgtttgatttggatggaatgagaggaattgtttttttagaaagttataaaagtaacgttaatcaattaagttaaatttgaccaaacttaaccaattaagttgacgatgtaatcgactaaataagtgtatatatttttatttttgacgaaaagagtcgattaattgagtgtagtccgcagaagacgcaataatgttgtgtgtgttgaaacttgtctcaaatgaatgtttgtctgtcaagactcaagaataacttcacacgtcgccaccaatcatgaaatagcgttcattttgtaatatagaagcaagaaagatagagagactgacaacacctctctctctctcccctcgttgatcccaaatctattaggggtttttattcgatgctattcggcctgaagctttcgtttcgcggatttttttaattattttttttcctgcctatcaggaaagttgaaaaaaagatggaccatgacaagactggatgcgaagctcccccagaaggtcctatattgtgcatcaccaactgcggattttttggaagtgcagctaccatgaacatgtgttctaagtgccacaaagacatgatgctgaaacaggagcaggcagggcttgtagcatcatccattgggaatattatgaatgggtcatcaagcagcagtggaaatgaacctgccattgctaccagtgtggatgtttcagtcaattcaatagagcctaaaattatccccgcacaacctttaggtgcttcaggttcagaggagagtgatgaggcaaagcccaaggatggtccaaatcgatgcagcaactgcaataagcgggttggtttgacaggatttaattgtcgatgtggtaaccttttctgttctgtacatcgctactcagacaagcataattgcccatttgattaccacactgctgcaagggatgccatagctaaagcgaatccggctgtcaaggttgagaaacttgataagatctagatttgttgtctttaagtttcatgccctgagatgctgttatgctcattgtcgtcatgatgagatgatcctcctgcatattttaatggtattattatattttgtatgtgatgggggacgtgcagttataggacatcgctgcagtttgaagtactatttcatgtgatttgcaaaaatatacatcccagtgttttaaattctagtatttaatctctgctggtggaagttggtgttgttggcattgttaggcatatattatgttccttatctcttacggatgatttcgggatcatccatggacaattggacatgtggttagattgtaaattgtagatgtggacttattatatatgaatacaattgggatccatatcctttagtgatgctcattt

SEQ ID NO: 99369 - DNA, 1632 bp, Glycine max
  Clone ID: PAT_MRT3847_60744C.1
tccctttctaactcaagtataaatttttccccttacccattattttttgtcgatcaatttaatgattcattgtcttcaagtggtaggatcaccaccaccctctttttttgaatgttgacaatttaatggggtggtgttagtggaggatttcttaattgcgtctttgattggaatcgctgactctgtaattgggtcagtttgaaagtttcaaaagagggcagaggaagcgtggattttcttattcttttgtttttaagggttcaaggaggagaaattcccagctttgttattggagggggatgatgcatgaatattagctggtcagttgcatgatggagttgtaggtggaggatagtgatcgtggttattgattgaaggataataatatattgcatagtagttgaatttgtataatagctttgtgctgcaacatggggtgcatagcttccaagagtgcagctgttgaagacagcagggaaggtgtggcaagggaattcacttcatccagcaaaagggcggcctcgaagatgaaggcttccgtattgaattcggagaaaaggatcgcggacgcgtgggcggacgcgtgggttttggatggtgctgatatgaaagtttcattgattgacaagggatccagtggttcgatgcggtcgagtaataataagaacgggaagaagaaaaaggagaaacctgaattggctgttcttgatcatcctggtcttggaagggttccaaagggtttagaaggagagcaagttgcggcagggtggccaacttggttttcttctgttgctggtgaagctgtccaagggtggataccgcggaaggcggatacttttgagaggtttcataaaattggccaaggaacctacagtactgtgtataaggctcgtgatttgactgaccaaaagatcgttgcgttgaagagggtacgctttgataattgtgatgctgagagtgtcaagtttatggcaagggaaatccttgttctgcgtaggcttgaccatccaaatgtaataaagttggaaggcttgataacatcgaagacctctcgcagcttgtaccttgtttttgaatacatggaacatgatcttacaggacttgcatcaagtgctagcattaagttttcctgaccacagggtaaatgctacatgcaacagcttcttagtggattggatcattgtcatagtcgtggtgtcctccaccgcgacataaagggctcaaatcttctcattgacaataatggcatcttaaagattgcagattttggtctggcaaattttattgacccccatcacaaggttccattgaccagccgtgtagtaactctgtggtatagaccaccagaactcttacttggagcatctaattacggagttgctgtggatttgtggagcactggttgcatactgggggaactgtatcgtagcagacctatattacctggaaaaacagaggtatgcagtatgctacttcagaatctagttttcatcatttactcacaataactgccttcacttggatttttcaagtggtctcttcactgatatgcacaatttcaattgccaaagcaatatattccatcttagactggctgttaaaattctcaaattgatatcgtacagttataga

SEQ ID NO: 99370 - DNA, 558 bp, Glycine max
  Clone ID: PAT_MRT3847_60745C.1
tcgatctgatcgctagccaatgtaccagagtaccgtacacgtgaaagccgggcctgccgctaccgccgccaagaggctgtaaagtagaatggagttgtggtaaatccgaaatatctcttactaaatgcacacaatatgtaacaccaataactaaacgggctttgttaatgtaattatgctgttgcctatgtggtggtacagtgggtaccgtaggccaatgcacccggccccgccatgtgagacgccttgtaacttggtgtggtggccaatgctgctggtgtaccaagggatgatgagggtgagtaacgggggaacaataacctacggcttaggctactgctatccagccgcaaaccctcgccacagccgatgcggcccagcgggccggcctggcggcgcctgcttaggctgcccgttggcaagcgcggcggtataaatttaagagcccggggccgcatgtccagctacatgtagatgtaactataaaccaaaagtagccatcaaaacaaacaactgggaaccaacctgctggtgcaaactattagactacatgtaata

SEQ ID NO: 99371 - DNA, 421 bp, Glycine max
  Clone ID: PAT_MRT3847_60746C.1
attctgtgtgatttttagtcttaggctgcatttgatgtatattgatggacaacatgagcacatgcagaacaacatagtacaagaagttgattcagcactttttttttctggtctattgtttggtggttgatacacagcagaggtggagcagggggttgtgctgggtatgagttgaatatgagcccacttgggtttgctagttgtttcccattatgttgatggggtttggccaaattgatgtgtatttttacctttgagtggtattgtgcatggcacaaaaagttgtcacctgatttattgagtaacaaatatttagacttgtgcttcctcttttgttttttcatgtttcatctttttttaaaatcaatcacggaacaggtatttttatgctatccaatttttcatcttgtaccaaataaag

SEQ ID NO: 99372 - DNA, 206 bp, Glycine max
  Clone ID: PAT_MRT3847_60747C.1
gttggcgggcgtttggcgccttttgcttcgttgcgcttctgtttccggtttaagttctcggttgagcaggccttgggggttgttttagccgtcgctcgtccttgccaccctatggctgagtccaagggtttgacatgcccttaccttgtctctgaggggaggcgacgcagccaaggcaggcaattcgcactagcgtaatgaagaaa

SEQ ID NO: 99373 - DNA, 271 bp, Glycine max
  unsure (1)..(271): unsure at all n locations
  Clone ID: PAT_MRT3847_60748C.1
gnnggggnnnngtagnnngtnntcggtntncnngnncgccttcngnccctnncccccccccncacncccaccgcacnntttccacncncngcnnncaacccnnnaggtgncncatcgnatnccnaaantgnaccnannantcnctctgggntnnaatnggttgngtaggnggtatgnganngcnttttggcntgtctaatntcgattctacngataggnnngngggttttctnttncttnangnctcnnatttgcgttnnggtgcngtnnt

SEQ ID NO: 99374 - DNA, 222 bp, Glycine max
  Clone ID: PAT_MRT3847_60749C.1
ccattctttttttctcactcttttctcaccaaaataacaaccaagggggttctatttgagaaatattggacctctgcacacatttaaacacccaaactctttccacaccaaaattttctctacgaattgtccaacggaacctataaaatcaaccatacgacactataaaacctatcatgataaaattccacaggccttatatactcgcattcttccaagcct

SEQ ID NO: 99375 - DNA, 255 bp, Glycine max
  unsure (1)..(255): unsure at all n locations
  Clone ID: PAT_MRT3847_6074C.1
ccctnatattcaaaaacccctggagtgggattcttccaaaaactctttctctttanccctcaaaggggcccctnaaaantgagagagtctgaagagcagggatcaagatctnaanccttnttnaagaagctgcttctttgggggggagcaatncctctngctctngatctttnccccgccttcaaacattgagaaagacttccatttcttctcgagagggctggtactgccactttccctangcctgggacactc

SEQ ID NO: 99376 - DNA, 435 bp, Glycine max
  Clone ID: PAT_MRT3847_60750C.1
ggaatgtcatatttcttgtgtttttgtagctagttcttttcttgttaatacaatattttgctaataaaagattaaaatatattttggattcctaaaattatgataagtgatgtgaccaaaaaatatgataactggaaaaaattaggcaaagcaatatgataaataaaataaaataaaaataataaattaaaattttgaatgtaaattgatgtgtgtgtaggtgaaaagtatgctattgtacaagtcaactcatgaattgtactcaccaaaaaatctcaacgtgaattctggaccatacaaagtatatcctatgttatcagttttcttttcttttattttaaatcttaattagtacatcaatattaatgtaaggcgtgtgtgtgtgttgaagtacgttgttggaaaagtatgctattgtacaagtcatctcatgaa

SEQ ID NO: 99377 - DNA, 112 bp, Glycine max
  Clone ID: PAT_MRT3847_60751C.1
agctatcctaagctcattattttacacatcgtatagattaaaggaaagaattgatcgttgatagtgcatggaggaactacagcgtgagagtacattaatgtaacagttacat

SEQ ID NO: 99378 - DNA, 117 bp, Glycine max
  unsure (1)..(117): unsure at all n locations
  Clone ID: PAT_MRT3847_60752C.1
ataccgacatttctcgtccattaaaattttnctatttnnccgtcgtaaatctttacacaaattggtatagatttacgacggcaaaatagtaaatctataccaatttgtgtaaagaat

SEQ ID NO: 99379 - DNA, 435 bp, Glycine max
  Clone ID: PAT_MRT3847_60753C.1
ttcgtcaacatcagttggagtgggagcattgtcaagtggaaacaacaacaacaataacttgagtaatgctactaattcttcaacggaatgggcccagagaacgggcaccattaccaacaatgattgcgatcacggaggaggaggagctctcagtggcactatcaactacagtgacactaatggcaaagtacactactcagcttcttcatcggattttcatggagagaaggggccagacttcactgtaactgcaaccagaactcaaggaatggtggagtcctggattaattgttcttctgattaaagcatgggcgaccaaacagaataagaagaaaaaaaaaggattgatgtttgtgatttcataaagtttaaagcaactaatggtactatatgctagtataattctaatgcatgaaagagagaatcttaattggt

SEQ ID NO: 99380 - DNA, 336 bp, Glycine max
  Clone ID: PAT_MRT3847_60754C.1
aacaccctcccaaaacaagcccaaattttggctcagaatctaactatcgcacctaaggggacatgggttgcatctacagctttcttagatagagcatatgctttgacatctttacttgtttctagttcgggtaacataaacatagctagagtgagtactaagcactactaaacgcccgagttcgatgtggcgtgccagagttagggttagatctagcttggaaactgcggagtccacaaaaacagtgacacatgtcactgatgataacaaggatacctcctggccgatcgataaagctgccatggataaaaccgttggccttgacatgtacacaca

SEQ ID NO: 99381 - DNA, 260 bp, Glycine max
  Clone ID: PAT_MRT3847_60755C.1
aattcgccagtgaggcactgaaatcatacatccatcctacactgattcctattgctagggtcatggctatttggaaactactgccatctgaatggacgtcggcgatttcttcatacatcatcctactggttcctcgagcaccgcgaaagcgtggatcatccatggcattgtggccggagtggccattgctgccgcggggggtgcacacgcttacatgactggatatactatgattaacagccgggtaggcatcatcatac

SEQ ID NO: 99382 - DNA, 442 bp, Glycine max
  Clone ID: PAT_MRT3847_60756C.1
tgagaaccaaacacgacgctgcgccttgtgtagttgcccaacgccgcgccaccaggtttttccatcaaaagcttcttcttcttcttagaatgtttacttttatgctttttctgtggtatgctatctatcaatctcgttgtatgccttttctttctgtttctgctttctctttccataggatatggtgtttcttcaattgattctgctctaagattctctgtcaacaagtttctttcatttaggaaccgattcatgcctctttaggcacatgaacactttttttttttttttatttaggattttttcaatgaaataaacctaagcatattttgagcagtagggttttttttttttttttatccacaggagtctaagatagtttaaggggacttaacttacgcaccatgtgtttgctcaatcaattgagttagacctccttaac

SEQ ID NO: 99383 - DNA, 561 bp, Glycine max
  Clone ID: PAT_MRT3847_60757C.1
tgatgatgttgttatttgttggttaaggtggggatgtaaggccattgaaaagggaaattgatgtttggttcagaaaggaagcataattggttcacatggtgttttgtttgaggcaacaatggcatttgatttgtctaataaaggagatgttatgaggtacggttttgaattcatgttgcatgcagtcttcctggtcacgacgttgaattagtttaagacatgaatatcatcggttgatgatttgtttccatgagagtaatgcaatgcttcatagttcaaatgaaacatcattcgttgtttgtgtttgatttgtggaaactcgtacaacattttatctttatattttatggtttaatttatgagggcttgaatcattgttgttggatgcctcgtggaagcgttatgaaggcataggaagtgctggaaattttattggttgtatctgaaagattatttcagcgtcaagaatagagaagaacattgcaaagcagaaggataaacaaagaaatagtgcaatagacagaagaggtgtcaagtgtcgtaaatcgtttatgtttgcga

SEQ ID NO: 99384 - DNA, 673 bp, Glycine max
  Clone ID: PAT_MRT3847_60758C.1
catccctcgatcactcccacgcgctcctatatcctctccttcaccgtcgctctctcgaacgaccacaacaccatcgtcatcccatggtcggtttttttctctaatttctctcttccttttttcgttatccgatttgttctcacgcatcaataactaagtccgcgaatttctagcgttttttttttttgttgaatttatgtggcgtcgatatttctgagctggattcgtatttgatctgatcgtttaacttgaacggtgctttttttattttttgtttaaaataaaggaataaatcgtggcgttttcagatctgatttcggtgcttcggttgagtttttcccaaattcatagcttattatgatatttttattgcggatttcagtttacaacagcttgtgatgtgtgatgtgtttgatctgcgcagaaatcggttgtgatctgacatgtggattgattccattttatttattttattctaattttaattttatgagcatgttgatttaacttcttttatgtgataattatgcgtggaaatttcaattaaagcatatattcttgtctttttttttgtttttggtgcatatattcttattctttcattagatttattttaatgatgtttctatattagatttattaatgaataattatgattttatttttgggactg

SEQ ID NO: 99385 - DNA, 419 bp, Glycine max
  Clone ID: PAT_MRT3847_60759C.1
gttcaactctaatttagcacacatacatatacaccatgttgtgaaaattgagaccttgcttgggattggaaggtagatgaaagattgtaagttggaaaatcgtaacatggattgtatgatctttcaaaattatgcaaaagttgtacatgtaattaagatgacataggtaaggaaaatatcctctaattcatcaacatccaactaatcttaaataaaaattcgtattcataagtttattacatgttaataaaaaaaggtttgtcaagtgtcaacatttcagaaaacaacatttcaccaataaaaaaagaaaaagaaaacatttcataaaatagtgttataggaatacaaaatagaggctaaagatagcaaaataagagtgagacttattgcaatgtcagtcaaaaaagttttattatgtg

SEQ ID NO: 99386 - DNA, 608 bp, Glycine max
  Clone ID: PAT_MRT3847_6075C.1
agcagatggaattcagtctttgacaaacaatctctgttatacatatgccaggtgtacacgctctgtatctgttgttcctccagcgtattacgcacatttagcagcttttcgagcacgtttctatatggagccagacctgcagcaggagaatggctcctcaggtggtggctccagggcaacaagagcaggtggagtcaagccattgccagccttgaaagaaaatgtgaagagagttatgttttattgttagattgtgtagtagtggcttggcataggcatcatcaaatggtacattcagcaaacacaatcatggcttcaaatgtacaatagtgactcctaagcattgcagcaatatttcccatagtagatccatgattatagttctaaaggcttagtttaggattcctgcaagtattttggctggagggacatgagagacacatcacgggtttagtgttgctaactctttgtggtcaagtcatcacaaaaatgattgaatttaagattaaattaggcatcggaaacaaagtttacggatcaatcttaattgtagaaatttttgcctgaaggccattgttggtgttgaattgaaatagtagaaaatttcc

SEQ ID NO: 99387 - DNA, 693 bp, Glycine max
  Clone ID: PAT_MRT3847_60760C.1
tcattattaattcatggagcctgcaaatgtgccagaagttgacaaattgcatagctcctattttgaggccatttagtgtgctttctttcctgaggtgactacaaatgcttgtgcggttattgaaagtgtaagctatactgaagcaaacattatggctgaaagatcactgaaattatggtctcttatgagttaacaaagccacagactaaccgtgtcaaatagagtacattgattgggtgaatggaaactttgaacttgcagactctctggagattgcagggattgtgaaagattattccaaggcatcctccatttccatgaggtgagtgaatcgaaattgtgcttgaaacacaggaaagccacatccttgaggtgcactttcagaatttgattagtagagtgctttgctggaatgccatctggataccagtagcatttatgttgaagaagggtgccaatgtttgcggccagagctaaatgttgttcaaatgcaatttatattctgaaatgcatattgaaatgtatggttaaagatcttggctgtgtatgctgaagataccttttaatttaagatttcattgtctcaattacagggttgagatgtgtcacaattacaggggtttatgcaaattggttttgttagacaatctttgatatgtttttggcagttttatggtaactcgcttttgtagt

SEQ ID NO: 99388 - DNA, 339 bp, Glycine max
  Clone ID: PAT_MRT3847_60761C.1
ggctcgagatcgaactctggtctttatctttctcttctcttgtgacaaggacgaagaagcagaaggaggtacagaaacatgctggagagtgttcaggctcctccgcctacggaatctggcccagtggtgaagcgctatgctcctcccaacgggggaaccgatctgcctacaggctctaatcaggtgatcggctagctcggacccacagtatcgcgagtgactgagaccagagtctgggtgctcattcaagaggtgttcacatttcagatcacggggatgctggtagcagcaatcttcttaatgagaatcactattcaagattgatacgcttagaagggt

SEQ ID NO: 99389 - DNA, 849 bp, Glycine max
  Clone ID: PAT_MRT3847_60762C.1
ggatgagacagtaataataataatgagtgactgactagtctgaaagtgaaagttggtagacacaagggaccccattctccattctccattctcaaactcaccatcaaatccttgccttctttctccctccaaatccctaattcccttccatcccaaaaattcaacaatactaacattattaactcttctcttcgtttttcccaattaggtttccgagtctcaaccaatttcaccatgtccactcaaattccgagttagttagttatctctttccgccatggaaggtaacaaggacgaagcattacgctgcgttcgcatcgccgaagaagcaatcgcgtcgggaaacaaagaccgcgccctcaaattcctcagaatcgcgcaacgcctcaaccgcgatttgcccctccagtccctgctcgaaaagtgcgaccgcttcgattcgcactccgccgccgctgccgcctgcggcggcagcggcgcctctccggcgaacggtcactctccgcgtcgcgagggtttgaacggggagaggaattacacggaggaaaacgtgcagctaattagagaaatcaagggaaagagcgattactatgcgattctgggattggaaaagagttgctccgtggaagagattcgaagagcgtatcggaagctctctctgaaggttcatcccgataagaacaaagctccaggctccgaagatgcgttcaagaaggtttcgaaggcgttcaagtgtttgagcgacgacggctcaagaaggatgtacgaccaaaccggaaccggcaccgacgattatgagagcaccgaggtaaacaccttctggcgaagaaaaagaagaaggacgacgac

SEQ ID NO: 99390 - DNA, 273 bp, Glycine max
  Clone ID: PAT_MRT3847_60763C.1
aggagggagccccgtaggcaaaaaaatttcctttaaaaatctcacattaaataaaagggttcattggtggtgttgccaattttttaacaaaaattatgggagttctcctattgggacttgggggcatgttgaaaactgttggcaacattttttaaacaactcgggtttccggtgcattttttgttttccccaaaagtgggaccgttttggaacttaaaccagccattcttatccccccattagattgggtgttttttttggacccttttctca

SEQ ID NO: 99391 - DNA, 462 bp, Glycine max
  Clone ID: PAT_MRT3847_60764C.1
tcctatggtttcgtgggtttccatcaacatttaattggactccgaaatcaagaaaattttcttaactctgactgtgctgaatgattactaacaggagccaactctgatatacatcccaccagagaatcaaaataaacgagcgaaagagagcctctactggcaaaattacaatggcgctggaccaattggcgaaacttgagtgactacagtgtgccccatatatcaacacaaccgtgaataacttaaacatcggggaaaacctcttgaggcccaaaaaatatacctaaccccgatgtcaaggaatgtttaaatagaacattggattcagcccaaccctcttttgggtacaaatttaaaatgaccccccttcccttggggatgatccaaaatactttgcaagccaacacaggggaaatttatccggggtttcagaactaaccttggtttggaaagaagggagtg

SEQ ID NO: 99392 - DNA, 1088 bp, Glycine max
  unsure (1)..(1088): unsure at all n locations
  Clone ID: PAT_MRT3847_60765C.1
ttaggaggaatagttagcgaacaaacccaacaatcttacaatcctaaaagaaaacggaaagcaaaataaacaaacaattcaagaagagaaagattatgggtatcgtggaagaggctcacaacgtgagaatagtagggaaggggaatgaaatcgtgattcttgctcatgggttcggcacggaccaatcggtgtggaagcaccttgtaccgcatctggtcgatgattaccaagtgatcttgtacgacaacatgggtgctggtaccacgaacccagactacttcgacttcgaacgttactacacgatcgatggttttgtctatgacctactcgccatcttgcaagagcttcaggtgcaatcttgtatcttcgttggccactctctttctgctatggtgggcctcctcgcttccatctctcaccctcatctcttcactaaactcatccttgtctctgcctctccaaggtttctgaatgattcagaatactttggagggttccagcaagaagatctgacccaactctacgatggaatccggtcgaattacaaagcatggtgttcggggttcgctccgctggtgatcggcggcgacatggactcggtggcggtgcaggagttcagccgaacgctcttcaacatgcggccagacatagccttgagtttggcgcagaccatattccagttcgacatgaggccaatcctatgccacgtcacggtgccgtgccacatcattcagagcaccaaggacctggctgcgccggttgtggtggcggagtatctgcagcagaatttgggagggaagaccatcgtggaggtcatgcccaccgagggccacttgccgcagctgagctcgccggatattgtggttccggttttgctcaaccacatccgacacaatttggcagaggacaaataattgataataatacatcaatcattctgcattttaaacactttattaatattttttacttttttctatttttacgtattcttatatttttattttctgtatgttgaatagcacgttaagtttatcgaacattttccaaaaatgaatgagccacgacagggtcttatgtagtnnnnn

SEQ ID NO: 99393 - DNA, 512 bp, Glycine max
  Clone ID: PAT_MRT3847_60766C.1
tcgtattttgttgtctctctctctcttcacttacatagcataggttcctttcattgtacttttcactcagagagatacatataatagaaatagaaacacttttttgagaagcacttcgtttcattgtcatcatcatcatcatcattcagagagtgcatagaatgagttcttcttctggtcagagcagtggctatgatctttccttcaagatcttgttgatcggtgactctgctgtgggaaaaagtagcctccttgttagcttcatctccaactctgctgaagatattgctcccacaattggtgttgattttaagatcaagatgctcacagtaggtgggaagagattgaaactaactatttgggacactgctgggcaggaaaggttcagaacgctaactagttcttactatagaggagcacagggaattattcttgtttatgatgtaacgagaagagacaccttccaaacttatctttagtgtggtctaaagaagtggaactctattcaacta

SEQ ID NO: 99394 - DNA, 249 bp, Glycine max
  Clone ID: PAT_MRT3847_60767C.1
ctcgagccgaatcggctcgagttcaagctagtttttcatctccttacgttgatcaagatccacattgctgaattgaatattagtgatgggcttgccacagattcccccaaatgaaactgctgaaaaagttgcacttgtgggtgcagctttaactagctcaccgcagttttctgatgcaagtccctctgccataggcagcatgaacagtgtaaacactggtgggttggccgggtgtgatctgggatcttc

SEQ ID NO: 99395 - DNA, 188 bp, Glycine max
  Clone ID: PAT_MRT3847_60768C.1
agccgcaaatacacttaattaactactaacacaaggggggacctcttacattctttcttagtcttttacaaattctacaaactgttcaacgtattacaaccccttaacttaccaataaaccccaaaaagtaaaaccaccccattctaattattaaaaggtcttctaaacccctcttctggtgaactta

SEQ ID NO: 99396 - DNA, 392 bp, Glycine max
  Clone ID: PAT_MRT3847_60769C.1
cgtgacaccatatcttatattcagtgaacacatgaatatgattagctaagcctcgccagtaattaaattaatatgataagctaaccctcggtagagcctcacagctttcatattatgggaacaggatctcaacttcaaaattccgcacgcgcgcagctttgataataatgaccgactcaattcaaacagaatagaggcccaatcagatattactccaccagttagcctgactcccaacccttgcattgccagacgcttgcttcttagccttagcatccagcttggaagttgtccacacaacctgtccagaactgtcaacccttggtacaggctgtacctattaaataggatgctcaaaactgctcagacctcgggatgttgaaaagaaaaat

SEQ ID NO: 99397 - DNA, 847 bp, Glycine max
  unsure (1)..(847): unsure at all n locations
  Clone ID: PAT_MRT3847_6076C.1
cggccgctcaggcggcggcgggaatgtctttcccttctatttctacatcttttctgttcttttccttaccttgtatctcccacctccttccctggccgcaaaccacaccgtcccatgccccctccacgtcgacgtcctccgcgaggttggcggcgggcggcggcccaagttcgactccggcacgcagtgccattacatcctccaagccctccacctcctccaggccgactacctccggcgcagcagcctcttcgttccgccgttgaactcctcggagtcgtgctggaagaccttccaatccttcatcaacgagttcgaccccagcatcaccgacatccgcgcctcctgcggcttcagaaccgagtggatctcccagggctgcatgaacttcaccaccaaacaagaattcgaagaaattgttccccccaacgcaatccaacccgtggtagcggactgcaaccagcccctcgataacaacgccccctgcgccctctgcatcaccaaactctccagcatgttatcctacttaaccggaacaaccgtaggtaacgtcaccgattgcagagcctatactcaaatctacgccgcttctctttctgatcaatacggagcctctgatcctggaacagctaagtgcctcttcggtctcgatttttcctcctccggctccggtggtaagcgacgaaaaatccttattgcggtcgtttccgttttctgtgtgttggctttggctgtgtttgctgggctttgngcttacttgagattcaagaagaggaaggaggttgctggaacactgagcctgggtttgggttctgggttggattcatgaaccagagcaccactttga

SEQ ID NO: 99398 - DNA, 418 bp, Glycine max
  Clone ID: PAT_MRT3847_60770C.1
gtggaattgaagttgtttatatatggaaaggttggggataccataaatggaaagcttgatgagtctctcattcttgaagttgttgcggatgggggaaaggtccatgtccttcttgcagatggcgacttgacagtgaagatgaaattgcattctttaaaaattaaggatgaacttcagggtcgtctatctgtagctccgcgttatcttgctgtttctgtcttgcagagtgaaacttcatcctctgacatgtatgattcccatgggaaggaagtgtctcatgatgatgatgacagctttacggatgcattatctgaattcatttctcaaactgatggaggatattgtttacataatatggatttggatcatcagggattggtggggattgcttctgatttcgagtctctagaaaacaaag

SEQ ID NO: 99399 - DNA, 632 bp, Glycine max
  Clone ID: PAT_MRT3847_60771C.1
taaataaagattaagtgaatccttgaacgtaaatcaaatataccgtactcatcgctatgctgcaaggtcatgctttaaatttgagtaaattacatatttctgctcgagatttaaaaaaattacaaattttttttttataaaaaaacatacacataattttcttaagtttgaaaaagttacatatgtgtcttctgatgtttattatatttaaatacgtttttattctattttttaaacttatatgaactccttaaatatcatctaaacatttgacaataataaattatgtgtgttaacaatttccattaaaaaaatgattttcaatctcataaatatagagatgttcaattttttttttattttttatcctcttaaaatttaaatttgttactttttgtctagaattaggtttgacacatcctaacatatacgttgttatagaaaatgtaaattatacatataagcgatctaaaaaacattgaaaatcaaacactttctacaataatatataagtagatttggattactgattcggaccaaaaagtaacaaattgtaaattgtgagtatgaaaaataattgtttttttacagtaacagagttttgaatatttgcatatttatgaatacgaaaa

SEQ ID NO: 99400 - DNA, 1853 bp, Glycine max
  Clone ID: PAT_MRT3847_60772C.1
gtggagggaatgcaccttcagttgctaatcgaacatcttactcacagaagaacgtgcatgggcaaaactttacaattccagtgcaaccagtgaacttttcttttaagccatctgcaacatcggatattgttggcaatggtggatgttttggtgacaaacaacagcagcaacaggctttaaagggaggagtagagaatataccatctcaagcatttgcaatatcatttgctgcatttaatgggaccagtgttccttcaaaccttaacttctcatccatggcacagaatcctgtgatacttcaaagcctgcctgatatggcatggcaaggatatcaagctgcaagcacacctcagactactcagcaaaagacttattcaattactgaagcaaagagtggaggaaattcttcacaccaagatgatgaaaagaaaatctctcgtgctcagtcttccagcaatgggccaaccacccttgtttttgataattcatcaaagaatcttaactttatgctatctactgcgaatggaaactggtctaatcacaccattgcttcaactgcaataacaagtgtgccactctctagtaatgctttaagttctcaacaaccaccacatttgcttcagcttccaaagcagcatgctatgcaacagcagcaagctgctatggcaactcgatataaagcaccacctgccaacaacactccagctgcaaaatttggaaacaatgcccccgttttctcacaaactccttctcaatgcaagagttctaaccaagcttctcacactaaggcctcgagtagaactgcagattctcatattcatcactcatctgtcataacatctaatgctccaaccctcaaaagtttttcccaggaacaagggagagttttgccaggtcatatgcaaatttcttttgggggaaattacataacgcccctgccaccccaagggcaaccactactcaataacaaccatcctttatgcgcaacagctcaaggaactccatacagtgggggcaatgcgaagtcaaattcagaaggaagtaaagttagttcgtcggtgaacgcttcacaactgcaacaaactgaaaattctgctgggagtggccaaaaatcttctcccagtttgtgggagaaatgtcccgtcaatattaagttcatgccccagccacctatcagagctaaagtattagaaaccaagtcatacactgccccccccctccgattgaaggaatttcttgcaattgcactcctaatcatatgttctggaggcccatgctgctctgcttcatgttcaacaacaattcaggctgctcagaaagattgaagaaaaaaagttttggcagccagatgctggagttttgcttgcatctcttttctaaggtggcaatgatatgagaggtgtaaaaagcaatgttgatgtgggatattatgctcaactcaatattagtgttgtgacagggcacatggtatgacatttgttggtgggaggaatgaaagggagttgggatccattaggcctgcaattttgaaatagtaagtaccattatcttgtcatatttcttggttggtagcttctggaaggcctggcctttaagttctcgtggaatccaattaatttgacatattaaggcaattctatcatgtgtatataattatgatttttttttagctcccatagcaaaagatgtacttagattcattttttaatgaaaaaaactgcaattatttcttataattttgttattaatagagagggtggatcgttgggacattgagagattgagattgagacttgagagagaacacaacaaatgagaatgctaaatttccgggaatggttctttcttttgct

SEQ ID NO: 99401 - DNA, 154 bp, Glycine max
  Clone ID: PAT_MRT3847_60773C.1
ggtttttcttttaaggatggagatcccctattaatgaagaccaaccttgagagtattagccattcacaatttcacataaaaatgatctgctcataaaaattggttaagggaaaattaaataaaaaaattgccagaaactgaattgcagccttat

SEQ ID NO: 99402 - DNA, 1334 bp, Glycine max
  Clone ID: PAT_MRT3847_60774C.1
cgacccttgtttttgataattcatctaagaatcttaactttgtgctatctactacgaatggaaactggtctaatcacaccattccttcaactgcaataacaagtgtgccactctctagtaatgcttcaagttctcaacagccaccgcatttgcttcagcttccaaagcagcatgctatgcaacagcagcaagctgctatggcatctcgatataaagcatcatctgccaatagcactcctgctgcaaaatttgcaaacaatgcccccgttttctcacaaactccttctcaatgcagaagttctaaccaagcttctcactctaaggcctcgggtagaactacagattctcatgttcatcacacatctatcataacatcaaatgctccaaccctcaaaagtttttcccaggaacaagggagagttttgccaggtcatatgcaaatttcttttgggggaaattacataacgcccctgccaccccaagggcaaccactactcagtaacaaccagcctttgtgtacaacagctcaaggaactccatatagtggggccaatgcaaagtcaaatttggaaggaagtaaagctagttcgtcggtgaacgcatcacaactgcaacaaactgaaaattcagctgggagtggccaaaaatcttcaccagtttgtgggagaaatgtcccatcaatattgagttcatgccccagccacctatcagagctaaagtattagaaatcaagtcatatacggcaccaagatcgacggaattttctgcagttgcactcctaatcatatgttctgggggcccttgctgctctgcttcatgttcaccaacaattcaggctgctcaataagattgaagaaaaaaaagttttggtagccaggtgctggagttttgcttgcagctcttttctaaggtgtcaatgatatgaggtgtaaaaagcaatgttgatgtgggatatgctcaactcaatatcagtgttgtgacaaggcacatggaatgacatttgctggtgggataaggaaaggaagttgggatccattaggcctgcaattttgaaatacttcaatttccctgaactcagcagctagcattccttggctatgaacaacaaaacatgatatgatgatgatacccagacgttttggccgtgaagggacaggtcctttgcatgtaaggtttggagcaagactgaccaaatactacagtttcctttgtcgattgaaatagaatcaaagttcagacatgatatgcgccaaacagtcataatataacgtgacacttggtctgttggataagggaatagagtctatttagggtcctggtgtgtttcggatgct

SEQ ID NO: 99403 - DNA, 375 bp, Glycine max
  Clone ID: PAT_MRT3847_60775C.1
cctactcgttcggttacgcgtgcgtttgaaacaccattctcctatatcacacaaacatatctttgctacctgtgtacaccacctgcatctatcctagtaaaatggacccatttgcaccaaaaccagcttaatctcatttatagcccccctatattctgcgcctatgattccatacttctatcaaaataaaccacattatacccattacccattaccaattacacattcttatactgcttcttagagctatgattattaattaaataattaccattagcaatgaagacacatcattactttgatggggaggaagatgatgcaatggaacacctttaccaaaggtgtaattgtgatcacaagcacccttcacttgat

SEQ ID NO: 99404 - DNA, 288 bp, Glycine max
  unsure (1)..(288): unsure at all n locations
  Clone ID: PAT_MRT3847_60776C.1
naangnacntaaatcnganaatncnncnnganncgannncnannnggnnccanaannnncnntcttntaaanccnaaaccnnnntnnnnntaanattttncaaacacantaacaaaccaacnnanatncncnancaattntnttcnatcncacataattanntataactccacatnaaangnntcctaaaatcttttaattaanatcagnancaggtnntgaatggatgtnatnaanaagnagcaaggtggtcnaaaatgnngngaagtaaccatggcgnagaagaag

SEQ ID NO: 99405 - DNA, 439 bp, Glycine max
  unsure (1)..(439): unsure at all n locations
  Clone ID: PAT_MRT3847_60777C.1
cagattggtgtttttttcatattgaaagctttacactttcaggctgaaccttcttctgtggcggttgccaactccatcatcatcctcnccctgtcatctccatatcccaatctctcagatcacccatcaccatctcccaacttttctcctttccctccaaaccatccttcaccttcaactttaactttaaattcaaccctttctcaaaaccccattacccaattcaagcttcttcttcatcaatatcatcaccaccaccaccaccaccatcaccaccaccatcaccttttcagtgtgcaaaatccaatcctttcattttttccatattcatctttcttatttttcccttttatcttcccaaacctcttatatacatcctccatttctttcatctacctttctttttcttttctatttatctcctcttttttaacccctt

SEQ ID NO: 99406 - DNA, 603 bp, Glycine max
  Clone ID: PAT_MRT3847_60778C.1
gaagaactggtgggagcacaatactctatggagatttcagtaaaaatgagttacgaccatctagaaaatgggccgctcatccccagtcgactacgcgtccgctcaatgggtcatcaacccctaattatggacttggtgaagtattgctttggtttgggaatacttgaaggggtctactcacttggggaagctcgaggcaaaatatctacatcaatccaaaagttgaaaaactcaggtttagtgttggatggaagttctagtattcatttcaatatgcatgatctggttcgagatgcagctttatctatagcacagaaggagcacaatgcatttactttgagaaatgggaaacttgatgattggcctgaactcgagaggtgtacttctatttttatatgcaacagtgttatcattgatgagcttcctaatgttataaattgtcctcaacttaaatttttccaaattaacagggatgatccatctgtaaaaatacctgagagtttttttaatgaaatgaaaggactcggaggattaatgttgactggggttcatctagaaagcttaccaccttcaatccaatgcctatcaaacctcagattactt

SEQ ID NO: 99407 - DNA, 362 bp, Glycine max
  Clone ID: PAT_MRT3847_60779C.1
agccgagcttaaccaccatttcctgtatcagcgagattcgatttacaagccttgcatgtacatgatgtgtcagtagctgacccctgagtgaaatcgcttaacgctacaatttcactcggcgtatgagccggacacatagggtgtcaaacctggggagcctactgagtgacctaacatccattcattgggttgagctccctggccgctaaatacgcagaaaacccttccctccatctggttaacagaatccaccaaccattcggcgagaggcgtttttcctattgtgctcaatggaggttactgttgttaccaatcaagactgtccaaaaagatattgacctccacccgctggtcttgataga

SEQ ID NO: 99408 - DNA, 278 bp, Glycine max
  Clone ID: PAT_MRT3847_6077C.1
gtcctatcaggtgttgatgttggggctggctggcaatctctagtagcatgcatcaacattgtgtgatactatctagttggattaccggcaaggataatattgggatttaaacttggtcttggagcagagggtatttggtcagggatgattgcaggcatagttttgcagactacaatccttataatcgtcacttcaatacgaaactggaaaaaagaggctgaagaagcagaaagccgcgtgagaaagtggggaggagcaatttcatatgatcaatgatt

SEQ ID NO: 99409 - DNA, 205 bp, Glycine max
  Clone ID: PAT_MRT3847_60780C.1
gatggcaagggacatcattgatgctggcccgccggaggagcgccccagcccttctgcccgtgatatgagcagagaggatgcttccatactgccgagagaggatgctcatgaccgaggcttatgctaagctgatcatcctacacgcctttcaggccttgtctggatcctcgtggcatgggaggagcttccagtgagtacgcatggc

SEQ ID NO: 99410 - DNA, 310 bp, Glycine max
  Clone ID: PAT_MRT3847_60781C.1
gggaacaagaaaatttacttactagagtgtgttcacgcccaaaatatataatcgtgggcggagacaaagccttgccaacggggcgaaaaacaaaaataggatgatttggggccttaattctggcccctggaatagggccaaaaaaaaaatcttggtcacccaacccaccttgaggaccttcgtttgttttctccataaagttcttgctttggtgaatggttacaaacgggcgagtgttttttgccgccctggaaagattaaacccttccactgtggccaaaaggggttttgttttttaaggttttaaaaa

SEQ ID NO: 99411 - DNA, 368 bp, Glycine max
  Clone ID: PAT_MRT3847_60782C.1
ggggacaattaatttaattttcaaaatttttttcttcctaacccacctattattattaagctttttttttacatgggcgatgtcaaccgaaagacaattggtgtaaaaaaactaacaataaactactcattcccatgcatacttgttaaaaacaagttttactagtttgcacacaaaatattcaaatcaaagatacttaaacctactatttcactaacaacaattgtatgtgtatgaacagaaacaacacatgctcaagaatctcttggcctcctaaaacaaacaaatctgacactggcttcttccaaaaaccataaacttgaaccaactggtttcccaaatatttattggtaaaaatactatcaact

SEQ ID NO: 99412 - DNA, 334 bp, Glycine max
  Clone ID: PAT_MRT3847_60783C.1
ccaggaaaaagcgccgaaatacccagaaaggggtacaccaggtctggaaaagaaaaacgagaaatgctgaagatactagaacaaaaacccccccgattgggcaggcggcaaacacttgagtgctttagggggacacaaaggttcaccccatttttgccaaccttaaaaaaaaaaaaaacctacttcgggttacaagccatgaaaaactctggccctacaagcaccgaataaactggggcaatcaacacgatcaaaggtctagcccaggaaacaccacagggcaaatgcccgcaaatgatgctgacgaaacaacattcaccctggggcccagtcg

SEQ ID NO: 99413 - DNA, 277 bp, Glycine max
  Clone ID: PAT_MRT3847_60784C.1
gcgacagaatggggcaacatccattcttgttctcttctttcttacaatcagggtttcccctcctctcagggatcgtttcgttctcgaataatctatctatgggaatggggcacgggtatcacatggatcagtgatcgcgatagggctcaggctagaactggtgctatctgcaatcacaaatatgatggattgattcctgaacagcttatggaacaagatgcacaggttgctcatgatataagtctcatattatgcggaacacggtccatgatgtaac

SEQ ID NO: 99414 - DNA, 284 bp, Glycine max
  Clone ID: PAT_MRT3847_60785C.1
acgaggagaactagtctcgagttttttttttttttttttgtacaaacaattgttcattacaaaataaactgttgatattcacaggaattacaacacaagacaagaaatattttagcaaagtaacagaaacgaaaacgagaagaatgtacttatcaatgggaagaattcaaatatttataggtccatgtagttaatagagttgtgagtattttattttcctttcatattcggatcaaattatttttaaaaatttggtgatgatgtattaaccgtaaaaaataatt

SEQ ID NO: 99415 - DNA, 227 bp, Glycine max
  Clone ID: PAT_MRT3847_60786C.1
cccacgcgtccgctcacgcgtacatatgttttccaacctagaatgaaagcgttttggggaatggccaacgacgaacaagaggtgcgtgcatacatcctatacccgtggctcgaacatctcaagaaaggaggatagttctacacatttatagttgtggactagactcactcttgcatcactccttacccatgaaattgcctacttcttgcaaagtgtgttcaaatgac

SEQ ID NO: 99416 - DNA, 423 bp, Glycine max
  Clone ID: PAT_MRT3847_60787C.1
acgagggatggatgccacgtaaatattacaagatattattagtatattgatattatttctggtgttacgcattacatgcttaagtgaaattaaatcatatatttcagtagcatgattgatgagactattgctaccttgtttacttggtggatgtacctatgcattgtggaaattgacaaaatgaggatggcagttatccttgcaacatatatgtgttacattacagattccaaaacagaggaagtgatcaaaagattcgatgtagaaggtatgtcctaagaattcgaaatactgtctgcttcctcttcaatcctctttgtggttgtatgagaaattatcatggaacttttgtgctgctatatatatttgctgttgtcatattccttgaggttcctgtatgactatctgtcatactaaagggat

SEQ ID NO: 99417 - DNA, 145 bp, Glycine max
  unsure (1)..(145): unsure at all n locations
  Clone ID: PAT_MRT3847_60788C.1
ccccctcttttagaatggaaagagctgcctctctctacttctctactcaaggctggggaaaggggaaaagctctctcttggcanaaagaaggctagggctactcaactcggagaaagattgactctaagattagaaaaactaaaa

SEQ ID NO: 99418 - DNA, 606 bp, Glycine max
  Clone ID: PAT_MRT3847_60789C.1
atttgattttagtagattagattagattagatttctaaaactaagattagattttcaaaagaaaaattagattagtttggccaaaatattaaattaaaatatttatttctatttaactttaaaaaaaattcaaacaaatatttaaatttgctagttatgaaaaatatttaaaataatttaaatttgttagttataaaaataattcaaacaaaaattttaaattatttaaatttgttattgaaacaaatattttaaatgtataacaaatttctaagttataaaaaatggttgaaatgaaattttaaaatatataaaaattgttagttataaaaaatattgacatgaaaatttaaaagattttaaaattgttagttagtttttaaaaattgattgaaacgaaaatttatacgaaaattttgatgaaaccaaaatttaaattttaaaatatgattgaaataaaattttagaatatattaaatttgttagtgttaaaaaattgaaaccaaaatttaaaatttattaaggtggttagttttgatacatgattgaaagtaaattttacaatatattaaattttgtagttaaaattttgaaccacaattaaaa

SEQ ID NO: 99419 - DNA, 176 bp, Glycine max
  Clone ID: PAT_MRT3847_6078C.1
ctcaaactcagagcgtgctgacaacagtgccgtcgccgttgtggtcggctactttcacgctgcatctccatcgcacatgcttatcacaccgttggcatcgatactgtgggtgatcttatctcttcttgatgaaactgcttggactgaggcaaaccatgagatagttgatcctcacc

SEQ ID NO: 99420 - DNA, 644 bp, Glycine max
  Clone ID: PAT_MRT3847_60790C.1
cccacgcgtccggtttgtttagtaaaaatcgaaaaatctgaagcaaaagaaacggcagacacagtgagctcccacgcgttcaggataaaggttaatctcctttttcaaggccccgtgcaaaggtcttgctacatttggttcggaatattatggtggaattatatacgtgatcaagactcaaatctggaaaaagtgcagactgcaaagcttgttgctactaatctatgccttgttgcgttctacttttctgatttagatggatgttacttccctgggttcaaatagcaatacccaaaccgaccaacaccctttgttgatggagcagccagaaacccataacggtcatcagcatgtaattgacattacaaggaatggtgaagctctaactacgtcatctcgtaatgatcaatactctgaaatgcatttaccacagaatgaagatcaagcagctggggatgcacaaaattccagtcatcaaacatcatcatcttctgcacccagattaaactctagaaattcagcttcattgagaagaggtgatggatatggtcatcgtggcaggagtccattgaattctggactgtggatctctgttgagcttgttgtcactgtgagtcagatcatagcatctatagtcgttttgt

SEQ ID NO: 99421 - DNA, 276 bp, Glycine max
  Clone ID: PAT_MRT3847_60791C.1
cttttcctgttaaaccaagcgcctgatcatgtggtggatgtatagagcaatggggtggaattactttagtattgtttataaatagtatcaagtcatgtaaatagaaatacacagtttcagtggttattttcacacttaggaacatatgtaatgaataataaaaattatggttcttcaaaaaaaaaataaaaaaaacaaaatatataaaaagaacataaaattaactaattgggtggcctactgacatatgagcttatttacctgggaattaatttc

SEQ ID NO: 99422 - DNA, 937 bp, Glycine max
  Clone ID: PAT_MRT3847_60793C.1
cccacgcgtccgcccacgcgtccggagtttacaggtcttgatgttgaaatggagattaagaagcattactttgaggttatggatatagtcgatagattgtttgtcgcaatgtttgacagtttgaaccagaattgtaagaaggatctggaagctgtcgggtctcagtatccatttgaacctttgaagtatctgcggacgacactacggcttacatatgaagaagggattcagatgctcaaggatgttggagtagaaattgaaccttatggtgacttgaatactgaagcggaaaggaaattgggtcagctagtctcagagaaatatggcacagcccacgagtccgttcaccggtaccctttggctgtaaggccattctatacaatgccttgctacgacaatcctgcatacagcaactcgtttgatgtctttattcgaggtgaggagataatttcaggagctcagcgtgttcatgtgccagaatttttggaacaacgtgcagcagcttgtggcatcgatgtcaaaacaatatctacatacattgattctttcagatatggggcaccaccacatggtggctttggagtagggttggagcgtgtagtgatgctcttctgtggcctgaataacattcgcaaaacatcactctttcctcgtgacccacttaggattgcgccatgataaaatcatatcccaacagttaattgctcaaatatttagcctttacaatttttttatgttgaatcctgaaaacattatttaaattcctagccttggagcttatacccaccgtgataaaaaaaatgttttgacttgatgtattgccactgtgtattcgattgacccacttttagaaagtccgtctttctcctcttcatcagaaaccaggtgaaacaatgatgactttgatcccatgaacatatttcagcttgagatttgg

SEQ ID NO: 99423 - DNA, 269 bp, Glycine max
  Clone ID: PAT_MRT3847_60794C.1
gacccccgaagcagccaacgaccccgcccccgaacccgacggggcaagggaaccggaagacccgacacaaggccccagcgcccccaaaaagacgcgggggaaaacgaacgggaatggcccccaaaaaccaaccacaggaagaggcgagaccggcccccaaaggaacaaaggacgggcccgcagccacacagaccaaggaaaacaacacacagccacgcggagcacgcaaagggacaacagcccaggggagaagccacagcacggaaaac

SEQ ID NO: 99424 - DNA, 268 bp, Glycine max
  unsure (1)..(268): unsure at all n locations
  Clone ID: PAT_MRT3847_60795C.1
ctcctccanaatgctgtcaggggaactgnantattgatgatccaaggancccatggaccaangctgcntgaacacannncagtttttacnaattcaatgcnaaggcttaagganttggcctgggttctagtgggataatgcaagtgagtnntaaancagtaagntgaagacngtttagtcctgaaaaagtangcttntaacttnccgtcttaatcantagacaatnggggcggaccatagattcagtatgccgcatcnnttncnatnc

SEQ ID NO: 99425 - DNA, 283 bp, Glycine max
  Clone ID: PAT_MRT3847_60796C.1
ttaatccgggtggagaattacagaagaagctattgagttttgttcaaagtacattgaaaaggcaaaacctgttgggtttcttgagtctcggcatgacgaaagagtgagaggtaaggattcaagagaattgcatgttatcactctaagtctagaagaattgcaacaaactcatttgtatatactgaataacagaaatgaagttctgccatacatagtttgtcactgagctttagtcaaggaaagtaacccaataatgaccaagaatagggtgttgaaagagcat

SEQ ID NO: 99426 - DNA, 453 bp, Glycine max
  Clone ID: PAT_MRT3847_60797C.1
gtctgtgcaggaaaattcttaattgcaccttttagaacccattcctgaaaaaagaacacttctatggcatcataagatagactgctaaaattgaacaatggcaggcttaggcaaatagaaaagaagtctcgcactgtattacaccagagttagaaagctaacatacttgccatctcctgggatcgtgtcaaagacaaaaccttcgggccataagattgataactggaccgcagccctaacccttggactcagggagttgatggctgcattagcgatcagcttctaccctcctagtagactgaggggatgcaacctatgattcaaagctggctctagagaacccgtcaaaatcatgccactcttacttttgatcctaccacactcttgccataaccacgatttcagaatgtacaagtctagattatgagaaatgcacgtgcttgaagggatgtc

SEQ ID NO: 99427 - DNA, 483 bp, Glycine max
  Clone ID: PAT_MRT3847_60798C.1
tacggctgcgagaagacgacagaagggtgcgccatcttaataccaacattgtggtgtcttacatctcttatcatgtagagcctcaaatggtgtcatcccaatgcttgcatgaaagctattgttgtaggtgaattctacctatcataccctaatttcgtccggggacttttgcttgaaggcatacaacctttgattgaccgcttcaaggtacttggcaccttttgttgcataatatgtgaagtcccgagacgtgcggaaaatcaaaaggaagcgtggttacgcaatccgtggaattccgtaatgtgacggaaaccaaaaggaagtattgttacgcagtccgtgagtttccgtaactttttcaaaagcttaaaaagagtaattacatgatccataaggtttcgtaaccttaccgaaagaaaatagtatcgttacgaaattcatatagttttgtaacgttacaaaaaaagaatcaccaaaaaagca

SEQ ID NO: 99428 - DNA, 1183 bp, Glycine max
  Clone ID: PAT_MRT3847_60799C.1
gtacgggatgttggaagcgagaacatttaaatttagccataaaatcgaatacatgcataaacaaactttaagagtaaaattagcacgggatgttggaagctaatatataaaaaaataaaagttttcaccctccaatttgcatcaatctttaacaatttatccatgaaagcgttttgaccaatcgcaacaggaaattctaaaacagaagaggcacaattatgcgttcaacacgaaccaaaatgaactcgttaattctcaaatgcaaatgtctgaagcaaaacagctgtaggcaaatgtcaacatactcagaggtctatctttcacgcatagttcaaccggaatatgtcattcaacacataatagcttccctgtggtgttggtatcaaatggaacatttggctgaacttgagggcgtgttgttcgccggcgagctggaggttgccgctgacgaagacgagcatggcggcgttgacgcctgagggctgagaatcgacggtggtgatggagtgctggcactgttggaagggaagggaggtgagtttggcgacgatgttgtgggagccctggatcttctgaccctcgaaagagagcatggaaccttcctggtagagattggcgagattgttgcggttggtgtcgaaggtggagtagtagtgctccacgaatgcctttgccaacgcgtctggatccatgtcgcttctcgcttctcgcttcactctcaccggcagcgccgccctctcctctctcatgtccagtacttgatgctttagggaagaaactgtccttggagataccagttggcttaaatgcacgtgtttgggtcagtgcagcatctccccaaactactattgttgtagttaatgcgattatgaattcagtacgacattgtagtggtgctcagcagagaataatggttgtaaagctgctggagaggatccattgttcaatatagtgttggtgagcactgttcactagactagccccactacctatagggcacaaaggattatcaacaccttcatgtttaatttttgtcaagaaagattcaagatcctcagtttaattttttaattttatgcccgaaatgcatttggttggaatgtattttttgggccattcaatatcattatttttacaaaccatgaaatattttaatttgaaatatatatgtagaatttatttt

SEQ ID NO: 99429 - DNA, 296 bp, Glycine max
  Clone ID: PAT_MRT3847_6079C.1
cccacgcgtacgctttagttgtgtgttcatgttctgctgatagggtgctgtgacgaccaatactatcgtagaaagacaaagcatgtatgtgacttctgcctacctggttgaaaagacctatgagaatctaacagttcataagactctggataatgtgataccataataactaggtgctcaaatgtgaatgtcactgacagaacctcgaaaatgaaactatactggttaggaagatgaaataaaggcattcacattagcagctgatatggcctattaagagcagacatcacatgaac

SEQ ID NO: 99430 - DNA, 217 bp, Glycine max
  Clone ID: PAT_MRT3847_607C.1
cgatgaccataaaggtcaagcttggtatttcatttcttgttgttttgttaaccggctgcgtacttctgctagtgctcgcacgaccttacgagtgcgagatccgtgtgccgcatgccttcccgcgcgctaaccttgtggaggctctaggggaattcactgtgactctgcaatattaacatggctgcattctagtggatcggtgctgacgtctatggat

SEQ ID NO: 99431 - DNA, 386 bp, Glycine max
  Clone ID: PAT_MRT3847_60800C.1
aaaagaagaaaattgataaccgaaaaaattgatcctagttggactacttggtggggctgtgtgcttgacaattgacacccccatcaaagagaagccatataatgaagaatgaaagtgtttttacagttcagagttgcagcataccttcaaacaatttttcttccagagttatctctgctcatctatgttagattcctttcatatctattcttcaaccttcggataagtttcaccattttcagaaacaagactaccaccaggaaacaaagatgtagaattaatggagttgcccgccgttttggcaacaccgttattagtggctccctgctgatgctgtgtctcagtactggcgtttccagtacaattgatgtttggatccttttgac

SEQ ID NO: 99432 - DNA, 136 bp, Glycine max
  Clone ID: PAT_MRT3847_60801C.1
cggctcgagcctccataaacctggagtgactacatggatgcccgccaccctaccacacattagaagaacccgtatacataaactctagacactaacggaaggaatcgaaccccccaaagctggtttcaagccaacc

SEQ ID NO: 99433 - DNA, 289 bp, Glycine max
  Clone ID: PAT_MRT3847_60802C.1
ggaattcgtctcgaggatttgtatagcctcccaaaccttctccttacagagatggtagtgaattatctactcgagatttgcaaaaaatggttcaagctttgccccaatacactgaacaagtggaaaagatctcacttcatgtagagatagctggaaagattaacaaaattatcagagaaacggaccttcgagagcttggacagttggaacaagatcttgtttttggggatgctggagccaaggaagttattaactttttaagaacaaagcagaacacgtctcctgaata

SEQ ID NO: 99434 - DNA, 706 bp, Glycine max
  Clone ID: PAT_MRT3847_60803C.1
tcttcctgttcattggcttcgttttcgctggcgagtggagcgttggtcgcgttgcggtcatcttggtcggtcttgttgcttgcgttatggttggcgttggcttcaaggccaagtggagcgccatcattcttgtcaccattctgagcgtcttcaacgtctttgtcaacaacttctggacgctccacgagcaccacccccacaaggacttcgccaagtacgacttcttccagatcctctccatcgttggtggtcttctcctcctcatcaacatgggtcccggccaggtcagcttcgacgagaagaagaaggtgtactagatggaaagcaaaacaaaaagagaggctccttcaatacgcgaatgcttttctcgctacaagtcagcggcaatgaatatccctcctgaggagcattcaatgccatgatcgacaggaagagcgattgaaaccaaaaagcgaccaacacactctgcatctagcctacggagttcttctttttccttgtttttggtctttgccattgggctctcttgggaatgatgtacgcgtgcggatggaatagagtcttgtctggataaggacgagtccttttgatcggaaactataagagtagaaaactcaccctgcttttgaacgggtcgagatttggatcgacttgggggtgagttatgaagatattcgaaatgggaacatgtttattttttcaaaaa

SEQ ID NO: 99435 - DNA, 247 bp, Glycine max
  unsure (1)..(247): unsure at all n locations
  Clone ID: PAT_MRT3847_60804C.1
ccacacggnnaggcgccagttctttctttnncgtccccgntcaggggctgacatgcagcggggtgcagttgttcactccatgcgaagcggagggcgggcaggtcagttcggtcttttcgtggttggactgcctgcncaggagaaacaatggcgcccgtggggcgcttgattacgcggggttgggcgggcgcgatctgttggtggtgggtcggtggtttcgggggggggggctgtttgttggggggtt

SEQ ID NO: 99436 - DNA, 1087 bp, Glycine max
  unsure (1)..(1087): unsure at all n locations
  Clone ID: PAT_MRT3847_60805C.1
gcgcctctctctcccttcccccccgccgcccctgcgacccctgccttgccgccaccctccgttctgctgccattgtctgggtccgcctcaccctctgcctccttctcattgggcgtctatagaggttcttctttgagagtggcgcccacccttgattgtgttgctcgagcctgttcggctcgagggaaattttgcggacatcaaaatcgagcactgcatttccttgcaacacctatttcaaattcactgccaattagaattggattccatttccaccaaaacctaaatgcaaagagggagagcgacgtggcggggaggaccttagagggggaagcggtaaggacggaagagggatcggggtcgctgagacggcgagaggcaatggaggcaagaattgtttgagtccaggacgtggccgcgcctggctttctcctatccctcccggtgcctgcctgcaagggcgggggttgtacctccatgccggattaagaaagagtgcttgggaagtgggacccactcaaaagagagagtgaagatcatggcctcatctagctactctaactctccctatgatgcctgcaagttcttgagaagaaaatgcatgctggattgcattttctccccgtatttccctccaaaagagcctcaaaagttcaccaatgtgcacaagatatttagagcaagcttctaaatgaggtgcagcctcatcagagggaggatgcagtgaactcactgccctatgaagccgaggcacgtatagaggatctggtctatggttgtgttggagatttctatagacttggaagagtaaagaggttgaagaatcacctagtgcaataggtggcttaaggaatcctcaggagagcttaggtgagaaaaaaaggatgagtctgagtaagtccaaatgtgtatacttttcagtcaatgaacattataattgagcaaagcttctattaatcttaattntagttaatgaaacaaaatctatgttcttactcataaacctggagataaattacaattgtttcaaaaatgttaaatggttagtaaaaatagtngtacccaatatatgacaataattatgact

SEQ ID NO: 99437 - DNA, 455 bp, Glycine max
  Clone ID: PAT_MRT3847_60806C.1
tcgtgttcgcgtgggcgggcgcgtgggctagcgggaggactataaacacgactcgtatgagtctacttaatataaaaataatagccaaatttctataaataacatattaattaaacattgcaacaacataataaagcaaaatagtaaaccataaatttcacaatacttaaataatcaagtctagtaatgcatcattactagataatgacttgcagaggagatagtagtagtagagtattcccattgagggtttgatgctgttggaggtttatcgatgaaggaactacacaccaaatgggggtgtcaatgagcatacaaaatccaaaatgacctgtggttaggtctaattttttaagatgtggactcggcggtgaactgaaaagataaccgaggttgcctagagtctaccatgagtttactaaaaaggattttgtacatgagttaacttacagagg

SEQ ID NO: 99438 - DNA, 518 bp, Glycine max
  Clone ID: PAT_MRT3847_60807C.1
ccaaaagataaatcccttaaaaataagaaaactgttgggaggccgaggtgggcggatcacgaggtcaggagatcaagaccattctggctaacacagtgaaaccccatctctactaaaaaatacaaaaaagttagccgggtgtggtggcaggtgcctgtagtcccagctacttgggaggctgaggcaggagaatggcatgaacccgggaggcggagcttgcagtgagccgagatcgcaccactgcactccagcctgggcaacagagcaagactctgactcaaaaaaaaagaaagaaagaaaaagaaaaagaaaagaaacctggggatgaagtagcaggcagcttctttctaggcatagaggcagataggagtgcctggcatgaaaagggctaataattggggatagttaaagacatttagatgccatcacatttcagtttgggctttttaactggaaagatgctttgctttgcagttctttaaaggaatcgcaagctttgtgatagaggaggggggctt

SEQ ID NO: 99439 - DNA, 344 bp, Glycine max
  unsure (1)..(344): unsure at all n locations
  Clone ID: PAT_MRT3847_60808C.1
cccgcgggagcacggaaccggcccgaggaacaacaccccagcaaaaataaaaccaacaacncaagacaccacgacgagagcacggaaaccagaacggccgccgggacccgcccaccaggcaacagcaacagccccacccggcaaagccaactgggaaaaagagaaccccaaacacaacaagtgacaccagagccgcaacagcgagagagacccgcacaggaaccaagcacgccacgctcgatgcaaccaccctaaggaggagaaagaagaacgcgaagaaggagaaaaaccacgaccacgaccccgaccacaacacccggagagggaaccccagcaacccggcg

SEQ ID NO: 99440 - DNA, 717 bp, Glycine max
  unsure (1)..(717): unsure at all n locations
  Clone ID: PAT_MRT3847_60809C.1
ccacgcgtccgctcttttgtgatagtcaatatcatggggtctatgaatttgttaggtttttctctctctcctcaagaacacccttctagtcaagatcactctcaaacggcaccttctcgtttttgcttcaaccctgatggaatctcaagcactgatgtagcaggagactgctttgatctcacttctgactcaactcctcatttactcaaccttccctcttacggcatatacgaagcttttcataggagcaacaatattcacaccactcaagattggaaggagaactacaacagccaaaacttgctattgggaacttcatgcagcaaccaaaacatgaaccacaaccatcagcaacaacaacaacaacagccaaagcttgaaaacttcctcggtggacactcatttggtgaacatgagcaaccctacggtggtaactcagcctctacagaatacatgttcccggctcagccggtattggccggtggcggcggcggtggtagcaatagcagcaacacaagcaacagtagctccatagggttatccatgataaagacatggttgaggaaccaaccaccacactcagaanacaacaataacaacaacaatgaaagtggtggcaatagtagaagcagtgtgcagcagactctatcactttccatgagtactggttcacaatcaagcacatcactaccccttctcactgctagtgtggataat

SEQ ID NO: 99441 - DNA, 429 bp, Glycine max
  Clone ID: PAT_MRT3847_6080C.1
caccgccaccctcagtcttccttcatacatccattgtaatcatctctctcccatctctgtttctgcatgctcgaaaagctagggagaaaggggttagaagcccatctctattttgattttctgccctggaattccactaagtgtatgttcttgtggttgcattttgaatgataattttctgcctgtttattcaattttaagttttatgattttgttgttttaattttttttctttgcctaggtgttattgtgactgaacggttgttgagctctatttttggagcttttggtgttgtcattaaaagaatttggtagctgagacttgggcatttaacaggaatatggaggcaaatgcagcttcacacgatcatgaggatcaagatgaatatgttttgcttaacttggatggtgtttctgacctaattgaca

SEQ ID NO: 99442 - DNA, 192 bp, Glycine max
  Clone ID: PAT_MRT3847_60810C.1
gggacaggggaagggttgaatttaaaatggggggtctgacatacacacaacaacacatcatagacagacacaaccttggtttctctcagcatgggcgctgcttctgcacacacagaatgctgcgggtggggaaacagagaagacctatcggagctcacaggaccactgcctaacggcctcaccccttatgta

SEQ ID NO: 99443 - DNA, 541 bp, Glycine max
  Clone ID: PAT_MRT3847_60811C.1
tttatccactgtctactctgactacctagcttcatctggtaaaaacctgagatgcaggacaagaaatgtcccccgtgctgaggttgtctcgccttgcaaagacgcacggggcctaccttgtgcgggacaagccatcagctactatttacatggtgccctatggagccaggtggcaacaaagattcatcacatgagggaatccattgtttccgtcaaggaaaacccttcattcaggaactgcaggggggcttatgctacatcacttaccagcaaaacgagcgagcccagcctgctcactggcgcgcttgatgatagacctaacgcatatgaagactgacctgatgaaagacataactacaatcagacagagccaacaccatataacaatgctcctcttattggtattctggctagactatgcgcaggccatcgtgactatgaccagcatcttccacttgccgttcaactcctcaggctgctggaaccaagcctcaaccaacccgcattcacaagacatactcctactacagctacatggtca

SEQ ID NO: 99444 - DNA, 336 bp, Glycine max
  Clone ID: PAT_MRT3847_60812C.1
gtcaactaggatgagatcatcttccaactgataattttcaatatatgattaaaaaaccattttttttattgcaaagtagtgggcccatcctgagacatagctccaattcgaagttgcacattttatcggccctttcaagcttgtaagaggatggaagaactaatcacaaatttaagctgtgtagcggaattaggttaatccaggtttagtaaaaactgctaatttgtttttttttaatgaataaaagagaggtgggcagacaactgttgtatccctactgctgaacagataagaggatatctaatagaatatgttcacaaaaccagaataaattct

SEQ ID NO: 99445 - DNA, 277 bp, Glycine max
  Clone ID: PAT_MRT3847_60813C.1
aaattaacggaggtgtattaatagaaaatttcagacattaacagatatgtactcaggggcattcctaggttgagaaaagtcatagaaaaaactaagctaagctctcccttactgagagttaaacaacctaaaaccatgtcctcattacacaacaaaactgagagagcggtagagccgaattgggacaccaacagtgaatttgctagcagagcttatataccaaagaagccaagctcgatagctatatccttctcaaatggctcgaagtactgataga

SEQ ID NO: 99446 - DNA, 545 bp, Glycine max
  Clone ID: PAT_MRT3847_60814C.1
ccacgcgtccggcatcatggcgactctggattccgacgtgacctggttccggccggcgaaccctcctcagcgccggtccttcttcgttcaccaggaatcctgatcgaccctagatcaagaattgcaatgccgatggtatctgggcttgggatctggttgtgggtaattgcgctatttgccgccaccatgtcatggatctctgtgttgattgcctggccaaccaggctagctccactagctgatgaatgcactgtagctaggggagttggcaaccatgctttacacttgcattgcatatgccgatgggtcaagacccgttaagcttgtgctctatataatatgcgagtgagagtaccagaattactggcactagaactttgatgcagttgacctacttccatcaaggacatttgaattgtaggcttgctatcaactttatagcgctacatgtggactaatgcttgcctattggagctttattcaatagagccactgctaaatgctgccgaatatcgttacaccaccagttcctaattcaatcatat

SEQ ID NO: 99447 - DNA, 203 bp, Glycine max
  Clone ID: PAT_MRT3847_60815C.1
ttgaccttccccacttctgatgtctatctaactgtgaaaaccctaaaagactacatttgagataagactagaaaatgcgttcgtgcattcctcagtaccttcacttgggttcttcgctaaaccccaaggcgtgtacttctctcctatgcatttttaggctccgtgctgtctcatccactcataatcacatagaacgtgctcca

SEQ ID NO: 99448 - DNA, 320 bp, Glycine max
  Clone ID: PAT_MRT3847_60816C.1
tactactactagccatatattatgcaatcatctatcgcgtggatcaactcaggtggagttgtttcaatttgggttcaagtttggatatgtagttgagttgaactagaattttgttattcatgataatattatccgactcgaacaagattaatttgaggggaaaatacatgtgatttaaaaagaaaaaaaaggtaaatattatgtcaggtattcctcttttggatcctcatttttttttatatggctcaagtgtaagatatatataactatctatgtatccacttgattaattattattattattataactattgctaaaa

SEQ ID NO: 99449 - DNA, 835 bp, Glycine max
  Clone ID: PAT_MRT3847_60817C.1
ggaggaagcatttgcagacgtagaagtaatttctccatttgcccaattggatattcctttaattggccaagaatgtttgaggcagagttacatgatattcttagcaaagctgaagaagcaccatttttcacctggtccagaatcatcggcatgccaactttttccacttgatgatatacctttcaattctttatccttttcatcaatggtggttaccttaagtttgtatgttgaggatattaaggctggaaagctcaaattccattatggaaccattaacaaaaggccgggtacaagtccttctgatattcgtgcctatacactggatcaccatatgcattcatgagtcgtgataagcagagtatcagaagattgtaagttgaaaattttcttcggccagcctgaagattgtaagttgaaaattttcttcggccagccagaagattgcatgtcttctgcaagaacttccgagtgttactggcttgaattcaccattgtcacaagcttaaattcaacattgtcccacggtagatgagcagtgttcaaattcaaacagggcatgttagacctatggtcatcattacctgcgaattcctcagttgctcttgtggacctaccatatcaaattggtaggtagttgcgttgcagaaagaaagattgagacttgttttgcaatctgcattggaattgtaaacataaaacattcattgagataaatgtaattctttttgaaaattttccccatttcaaaaatcagggactcttgacgcactttggttaacatgtttgatgcaatatggtaacataatcaagacatgggcacgatcttcaactc

SEQ ID NO: 99450 - DNA, 436 bp, Glycine max
  Clone ID: PAT_MRT3847_60818C.1
ggcgtccggtcaggcgtccgggctggatggagacagcctacggggggctaagtattttgggcgctcatcgggagcagtcaaaggagattgtaacaaccggacgctgaccgggggacttgtcaccgagcatatcaacgccgtgatgcacattatcttatgttccgagctaaaatgatacctctacacaggtagccgatagtaagctgttgggggatactacaaggggagatacctcgcacataaattctgatgctacttgtcctgctgtgcgatgtgaaatactgaggtgaaattcaatggatattagtggcgagcagcatctagacatacgacataatatagtgacgaaaagaatagttgctaatggaaatgtgatagcagagaggcaggagggtattggtgcacgacagatagagagatccttacagaaacatgg

SEQ ID NO: 99451 - DNA, 797 bp, Glycine max
  unsure (1)..(797): unsure at all n locations
  Clone ID: PAT_MRT3847_60819C.1
ttccaatttcgaacattaaaaaaatactagcaaatttaaataaacaaacaagattctcgaaaaaatgctatctcccaacccactttctcttctttgcgcactccttctctgcttacctctagccatacgtccgaccaccgataccacacatacagcaaccaccacccccatcatgttccacataccaatgcctcttccaagaaacattagcatccaggaaaaccctaacaaaaacttaacatcattgtcaccattattatcatcattaaatatccaagatgacaaaccacacaaagtaaccactcgcgtaaaaggaaggcccattaagcctaaccaaaaacaactctcaacattgttgttatcatcattaccatccccattaagacaaaaccccgatgatgccctattcaaggcagccatgcgcgtgaaatcaaagcccacaaggcctaagaaggtagcgttcatgttcctaacgaccaaacccctcccgttcgcgccactttgggaatcctacttcaaccaaaccccaacatcaaagaatctattcaacatttacgttcacgcagacccatctttctcctaccacgcgcctttctccggcgtattctccaaccgcgttattagctcacaatccaccaggagattctcccccactctctccgcagcagcgcgtcgtctacttgcgcacgcgctcgtagacgacatgtcaaatttctgtgttcgtgctaatctctccctcttgcatccctctncactcgctcaagttcacctaccacgtgcttctccgtcagggcaaa

SEQ ID NO: 99452 - DNA, 302 bp, Glycine max
  Clone ID: PAT_MRT3847_6081C.1
aggaggtttgactaagatcaatcatgacgacttacagtgacaaaggggcaaagcctgagagaggccgattcctccacttccactctgtgaccttctcggttggcaacgccaagcaggccgcgtcattctactgcagcaagatgggctttgaacctctagcctacaggggcctggagaccggttcccgggaggtggtcagccatgtaatcaaacaagggaagattgtgtttgtcctctcctcagcgctcaacccctggaacaaagagatgggcgatcacctggtgaaacacggtgacggagtg

SEQ ID NO: 99453 - DNA, 286 bp, Glycine max
  Clone ID: PAT_MRT3847_60820C.1
cgatttctcatctcacgggccacaatattccctaagggcaagggagcagataacaccttggtggccaagttctacaaccatctcatctacgagataatagcacatcgctcaaagccatctgtcacacttctacatttacacctcccacaggctcattgacgatgaatatctggagacttctcacacctcaagaagtccaggacttccgtaactatgctgactatcgctttacgacatttgttgatctcgtgcagcactgcgtcaccctcaatgaaccatattgcta

SEQ ID NO: 99454 - DNA, 804 bp, Glycine max
  unsure (1)..(804): unsure at all n locations
  Clone ID: PAT_MRT3847_60821C.1
agtttaaaaaaggaatgcttgaaattaagtcgtgcaaatatctaccatattttctgtctgncttgagtaaagatcagatgataatggtctttccatcaaaacaaaaatactgtttggggtggtattgctcttggttcaatgtcagttggggtccttggctatgcagttgtgaggaactggaataagtggaaacagtggaagcaacagaggcagctccagcaacaaaggcaagcggtgagtgatgttgaacctcagatggatgatgagattgaagatgctccagatggacaattatgtgttatatgtctaatgaggagaaggcgttctgtcttcattccctgtgggcatcttgtgtgttgccaagggtgtgccatatcagttgaacgtgaagtggcacccaaatgtcccgtttgtcgtcaggagatccgagattcagtgcggatttatgaatcttgaacagacaggctgattgttctgttctctctgcggcagaatcttttatgctttgctaatgagaagaatgttgtttgctttttatttcgataagatatggaatgtggagttgtagggaaaacttgcctttgctcttatttcctgtgaacattcatctggggtagataataggttgtcgaggttaattcgaagcctcctcacttctcactctgccaggtcttttggggaaccttatacgcttataggatttccagttatcccatttagtgtacataaatatttaatattgcaaaagtcctatagaatgaactctggtatgttattgtgcatgtgatgttacttgtagactat

SEQ ID NO: 99455 - DNA, 1981 bp, Glycine max
  Clone ID: PAT_MRT3847_60822C.1
caactccaccaccggcaccaccgtggccttaccaacatgtcctccacttacaagaaaagcgagaaaatatagcacgtcgaaacacacacccccttgttggctgttaatttgttgagagagagcaatcaaaaacattcatggcgtcttccaaggagagagaagaaaacaccaattaaccaccacctgataggctgatacaatacaatctcctttccttcgtgttggacaacaacaatggcggcgaaatctagttcgagttcgacaacaacaaacgtggtgactctgaaggcggcgtgggttctcccgcagcgcacgcagaacatccgtgaggtgtacgaggttgggcggaagctcgggcagggccaattcgggaccaccttcgagtgcacgcgccgtgcgagtggtgggaagttcgcgtgcaagtcgattccgaagcggaagctgctgtgcaaggaggactacgaggacgtgtggcgggagattcagataatgcaccacttgtcggaacacgccaacgttgtccgcatcgaagggacgtacgaggattccacggccgtgcacctggtcatggagttgtgcgagggtggagagttgtttgacaggatcgtgcagaagggacactacagcgagagacaggcggcgaggttgataaagacgattgttgaggttgttgaggcgtgtcactcgctaggggtcatgcatagggaccttaagcctgagaatttcttgtttgataccattgatgaggatgctaagcttaaggccaccgatttcggcttgtctgttttttacaagcctggtgaatccttttgtgatgttgtcgggagcccatactatgtcgcaccagaggtcttgcgcaagctctatggacctgaatcagatgtttggagtgcaggggttattctgtacatcttattaagtggggtgccaccattttgggccgaatctgaaccggggatcttccgacagattttactaggaaaacttgattttcattctgagccttggcctagcatttcagacagtgccaaagatctaattcgaaaaatgcttgatcggaatccaaaaacaaggcttacagcacatgaagtactccgccacccatggattgttgatgacaacattgcacctgataaacctcttgattctgcagttttatcacgtctgaaacaattctctgcaatgaataaattgaaaaagatggcattgcgtgttattgctgagaggctatctgaagaagaaattggtggactgaaagagttattcaagatgattgacacagacaacagtggaaccataacgtttgatgagttaaaagatggtttgaagcgagtaggatctgaacttatggagtctgaaatcaaggatcttatggatgctgcggatattgataaaagtgggacaattgattatggtgaattcattgctgccactgtccatttaaataagctggagagagaggaaaacctagtgtcggccttctcctattttgacaaagatggcagtggttacataacccttgatgagatacaacaagcttgtaaggactttggtttagatgatatccatattgacgacatgatcaaggaaattgatcaagataacgatgggcaaatagattatggggaatttgctgccatgatgagaaaaggcaatggaggaattgggaggcgaactatgagaaaaacactaaatttaagagatgctcttggattagtagacaatgggtccaatcaagttattgagggctactttaagtaataattacttggagacaaaattgaccaaatattaatttagtaaatttctacgttgtttgtagttgcttgaccaaattttgcgtatcttttaaattatagacccatctttcctggaaagtttttcatcttgatctggatgaggtccatgaaaaaatgaaatggtccatacaacgaattgcagctcctaaatagttaaaaaaaaaaaaaaaaaaactcgggac

SEQ ID NO: 99456 - DNA, 285 bp, Glycine max
  Clone ID: PAT_MRT3847_60823C.1
cgaacatggaggttcatgccgagttcatgagaaagcgctcatgtctggatccatctccctctcctctcctcgtaagaaaggataacagtctcttgcagcaggtcgacgacgactaccgcctttaagactacgtaggcctaccccagtccgacgataacgccgtttccggcaaggaagccaacaagggctacaaggattactagtatcgacgccttgctgaactacaagaccgaggataatgtatcagcaataatactatcatcattatcggtgtatgtcgagcct

SEQ ID NO: 99457 - DNA, 546 bp, Glycine max
  Clone ID: PAT_MRT3847_60824C.1
atttcatttcctcgctgataattaatgactagcagaataggtgtggttaagttttctcagttaattaaatttaaaaaatggattgtgagtttagtttgtgttgtcgtgcagagcaaaaaacgaccaaggtttttttgggtgtcagcaatggcgccattgacgtccgttatattgggaagtctcttggtttatttcactcacgccgagaagcacggtgttgaagtggttagtatttcattttcatgttattacttgtgtctctctctttcttaatatataaaagtgtaattataaaatacaggttaaaaaattatataaaagaagtacatggaatattgtattatactggttagtattttttttactaatttgcaagttaactatggtttgattgaataaactttttattcaaattttgatttaggaagaaaaaaaaacccatctcctaacgcgatttgattaatgattggatcaaatataatttcatagataaaacttaatatgcatatttttgcacactctttttcgtaacgcgttcacttcact

SEQ ID NO: 99458 - DNA, 416 bp, Glycine max
  Clone ID: PAT_MRT3847_60825C.1
ggctcgagagtcaaaccacaactagctttgcttgtacttatagctagttactgcatgggaagcgcactgtcacacatggcagagacctggctcgcacgctactactttacgcgcttagactacacacgtctagcacataaatcctcttcctctgaatgggtggccgcgcccgttgggagcgcgtctaggcgctccaacgcaagatccaagcgctgatcaacgacatccagcgcctagccggcatgaacgtggtgctgaagcaggacctcatcgccactcaagaggagctacgaagcctatacgccaatgccaccatggtcaaggccaaccgctacgcctaagtgcgcgagatctactagaagtcactcacggtgtacgcacatgtccgcgtggtcaccggcatgagctccgagcta

SEQ ID NO: 99459 - DNA, 2299 bp, Glycine max
  Clone ID: PAT_MRT3847_60826C.1
ccacgcgtccgccattctttgcttcagtgtgaagagtagaaagaaggaaggaggaaaggggcatcggagagagagaaagaaaaaagatgagcggtggtcgactttgtacattgcttggagaattagggtacgaaggctgggaagcattggaccctgacagcttcgaatggccctttcagtacgaagatactcgccctcttctccactggatctgctccaatcttcgcccctccaacgtcctctctctcggagaactcaaccagtatgagcagttcaagcaagaagggaagctgttagagggcgaggatttggactttgcttacgacagcatctctgcattctctgataggagagacaatcaggaggccgtttttggcaccgaggaaggattgaaagatatcaaggaggcgactttggcgtatagagaggaggctttggccttgcagaggcagctgaggcatctgcaatctcagtttgacatgctttcgggccaggcctccaccttgacacaaggaaggcgagcacgccttgctgcaacctctattgttaatggacaccttgctaatatagatgatagcctttctgtcaggaatttacagatgaatggcgttcttgaaagaattgcttccacagcgcatgagttggctcattaccattcaggagatgaagatgatatatatttggcatactcagatttcaatcaattcttgcttggagattcatcttgtctaaaagacctaaatcaccggtttgctaagcaactggacacaggtccatttcgacttgttgctgaggaggggaaatctaaatgctcttgggtgaatcttgatgacatctcaaatacctatgttagagatttggaaaaatcacatcatcaacgtgtatctgagttgcgacggcttcgctcaatatttggagtaagtgaaaaacaatgggttgaagcacaggtcgagaatgccaagcagcaggctattttaatgacacttaaatcacaagtatcatcagatgaagctcatattcatcttgatcttcattctcttaggagaaagcattctgaattgaaaggagaactttcaaatctttataaccatgaagaaaagctgctatcagagactatttcagatttatgctgggagctagctcaactccaagacacatacattttacaaggtgattatgatttgaaggtcatgcgccaagagtactacattaatcggcagaaagcattcataaaccatctcatcaatctgcttgccaggcatcagttcttaaagatggcttgccaattggaaaagaagcacatgcttggagcattttcgttgctcaaggttattgagtctgagctgcaagcatacttgtctgcaactgagggccgagtgggtcgttgcctggcccttatccaagctgcatccgatgttcaagaacaaggaggagttcatgacagtgatcattttttgcatgctattagagacatgctaaaaatttattcaaatactcaagctcaagctacactgtccacatatgtatcagctcctggcattgtccaacagatatcagctcttcattcagatttgttgagccttcagtcggaccttgagaattctcttccagaagacagaaataggtgtattaatgaactgcgcaatcttattaaaaatctgcagaaactgctctttgcatcttcaacaacagcacagccaatactgacccctcggccattaatgaaagagcttgatgaaatggaaaagattaacgcaaagctgtctgttgctgttgaagaggtgacactagagcatgtaaagaagaatgagattgtgaaacatcataaacaagaaattggacttcaaaggcgagtttttgttgatttcttctgcaatcctgagcgattaaggagccaagttagggatctgactgatcgtgtcagagctatgcaaatttcgtagcaatcataatttttttttttgtccagtttactcaagtgttttaacatttcatgcctccgaacctgtggacgaacgttagtaaggagcgttggctaagatatagaccaggcacttggagaacaaaatttgcaacaatattctttccttttttcccctattaaaaaggaagcaatcaaaaactttattctggttgtctagatatttgtaagtgtatgttgatcatctccctatgaagttggaattccttttctttacatgtgcaaatcaactagtacatcacatatatgtgtacataaaaatctttatattcaaggaattggcatgtgccgcttgacacgagtgattgtttcaacagt

SEQ ID NO: 99460 - DNA, 245 bp, Glycine max
  Clone ID: PAT_MRT3847_60827C.1
gtaggaagggttgcacgtacatctgtcggcacccggatttggcgttgtaaaaccgcatccttgtttgtctgcagaagcatgggctcataacagattcaagaataataatacacgagaaagacaaatctatgcatgatgatctaatttcttatttccctctcctctgttcctttctctgcatgcatacacagcagcagcatttattactaacaacaatgactatcatatacgcacaatgaagcatt

SEQ ID NO: 99461 - DNA, 444 bp, Glycine max
  Clone ID: PAT_MRT3847_60828C.1
gaaggtttcccgtcatcactgtatgacgtcctccttctttggggggggggggggggcaatgaaaactagcaacaactagggaggtagtcggatggggaaaggtatggacggaatataaaacccatggtcaattagagatggattcggatgttaacgaagacagttaaatacagtggttggtaccaccgtacacggcagcaaaaaagaatgtccgactggacggggggatgatggggtcgaaattcaacgggagggccacggaagcgcatacgtatgttatcccactagtaataacccccacgatatgcgggtagtagtggcgttaatcgggcgaatacggtgatgtaacggtatcgtgtggggcttatgcaacgggagcgtgagccaacccgacggcagcggacacagagcagtacacatgtaaagttgccccgtaaggcaaag

SEQ ID NO: 99462 - DNA, 990 bp, Glycine max
  Clone ID: PAT_MRT3847_60829C.1
actggaaaaaaaacatcccggtgaacttaatccggctcgagaaaaaagtcctattgaatactcattaatcttatttgctctgttttcctctgtttctcacaagacacaatggagtacaaagtgaaaaccacaacatcaacaccttctccaccaatcccaatccatgttcccactatgctgtcaaactctcctccatcttcatcttcttcacctccttcacaatctcccactcctttcccttcaccctctctgggctctccctctgctgctccaccgtctccgccgccgcctctgccaccggtggtggttagcccttgtgctgcctgcaagatcctccgccgtaggtgtgtggagaagtgtgtgttggctccatatttccctcccactgatcctctcaagttcaccattgctcatagagtctttggagccagcaacatcatcaagttcttgcaggaactgccagaatcccagagagaagatgctgtgagcagcatggtttatgaggcaaatgctaggatcagagacccagtttatgggtgtgctggtgcaatatgccaacttcaaaagcaagttagtgagctacaagcacagctggccaaagcacaagctgaggtagtgaacatgcagtgccaacaagccaatttagtggcgcttatttgcatggaaatgagtcaatcacaggagcagcacgtgcttcagcctcaaactcacgttgatatgagctgcttcatagaggacaacagttttgggactgcttgggagcctctttggacatgatggaaattaatgaaaaatgttattcatgtatcttagatatttgcattaattagagagagagagattaattttattctatagtaactggtaaaactttcaagctcccaataagtggagaaagagataatgaaaattatactcggggaatccaatttcaataaaagtcatctaattagttaaaatcgggaagaaagaattattaaggaaggaaaa

SEQ ID NO: 99463 - DNA, 393 bp, Glycine max
  Clone ID: PAT_MRT3847_6082C.1
ttaccaccttcctcccaccatttccaaggcccaataccagcccacgggctcttgggccttggaaatgaacatcatcatcacatgagttttaattttaactcttcttcccactggaatccagaaaactcgggtgggaagaagaggcataggaccaagttcagccatgaacagaaagaaaaaatgcacaatttcgccgagaaattgggttggagaatgcagaaaggggatgaaggattggtgcaagatttctgcaaggagattggcgtttcaagaggggtcttcaaggtgtggatgcacaacaacaagaacacttctggcaggaagaaatcgttggaaccaggtgaaagaatcaatggcaccggtagtgatagtacagataataataataatcat

SEQ ID NO: 99464 - DNA, 553 bp, Glycine max
  unsure (1)..(553): unsure at all n locations
  Clone ID: PAT_MRT3847_60830C.1
ggctcgagaaaaaaaattaacattaaatatattttacagaccaaaatgacaacctttgtttatttgaaccaggaaagtagtttaaaaactttgaaatataaaattacctagaatagtggagacaatcgatatcttatcccatttgtggtcttattatgctaaatttgccttgaaggagccttgacaaatggactgcaaataaaaaagttttattgtctttctatccgttattccattgtttagtctttataacgtcacatgctactttttagatgaaagtacaaaaaaaaaagtaaaaaagcttcactagtggaatcactgatgtgaaaactttcgctaagaatgtctattttttttattggcttttcatctaggattatcaaatttcctatctagattggcttatggctctgtgtgctctaatttcatatgctcatctgatcttcacanaaatacgctcactgacattgttcacgatgatttaatagaggcgcatatattgatatcttttattttctggcactggtatggtatttgacaggtcatggcatta

SEQ ID NO: 99465 - DNA, 132 bp, Glycine max
  Clone ID: PAT_MRT3847_60831C.1
ggggaaggaactagtgcaaagtcacttcaaggccaggttaagtcacctggaaatcaataaactagcctaaggattttcacgcttactccaaaagcccataaatcctgttgggcgaattttcggaccccccca

SEQ ID NO: 99466 - DNA, 195 bp, Glycine max
  Clone ID: PAT_MRT3847_60832C.1
aaaaagttacaagttagggtttcatcaattcaaattttcgtttaacaacgatcttcaacttttttccggcgggcacaatcaaaaggattgccgctactgtttgatatgccgaaggggaaacaaacttgagtactgcctggaaaactgaccttcacaattgtacgggaaaaccttcgagaatcaatatgcctcact

SEQ ID NO: 99467 - DNA, 411 bp, Glycine max
  Clone ID: PAT_MRT3847_60833C.1
aaatcaactcatgtagcagctcaagcttgaccaaaaactaagtttggactaaatacagaagcatattgtaattatggtcaaaactggtataccgttgtttcaagaatccctaagctgaacaaacagatcatgatacaacctgttatgcactgttcaaaaaattaaaggacctgccactaatatatcgaaaacaaaaaaatttgaatccctgaagaaaatgggtactattgatctcccttaggagaatgcctccagttgctcaatattgcagaactttaataaatggggaggtttatggacctcgaagtaatatctcctaggagtcccgacctttactccatatttcatccttgatgcgcgtgtcatcaacaagaagttgtattgcatggaccattgtcacgaaccatgaag

SEQ ID NO: 99468 - DNA, 271 bp, Glycine max
  Clone ID: PAT_MRT3847_60834C.1
tttgttatacccctgcaaactttagaaggcttgtacatgaagcttacactcgagaaacctggactggagatgggaacagttgaaagcgaactacgagatgtcttataggcaatgctattaaacaataaaccttccagaggcttatgagcgcctgattgttgactcacttacagggggtaacacattttgttcgcagagatgagttgcaaggaccctgggagatctttaccccacttttgtaccagatagataagggggggttcaagggaaa

SEQ ID NO: 99469 - DNA, 443 bp, Glycine max
  Clone ID: PAT_MRT3847_60835C.1
ttcgtgagaccctttcttctttaccattggagaggatctttttcactccaaacccatgagaattcaacccaaagtgtgttttgatggggttgttgcgatcttgtgaaatttgagagtggtggtagcttgctaacgtctttatgtaagaaactcattgtctcatcacattaggtttcatctgtattcctttgtgttctcgtttccaccattttatttcactgcagcatattactctaagcgtaatttgattaatattcatattttccggcttattttacgactgcacatacatattgtggtcttcacacgagaaaaatcttgctttgacagaagaggaattgacgggtgtgatcagaaatagaggcatacctgctgatgtcttcaaagcgagtttcttaatttgaaaaacatgttgctcatgaaatgcctaaatgatcaaattt

SEQ ID NO: 99470 - DNA, 186 bp, Glycine max
  Clone ID: PAT_MRT3847_60836C.1
ggggggaaggagcaccttggggctgtactcatcggtgagtggccacgcccggggtagcttgctgacaaacactcgtgttgcaaatgacgacttagctgacagcgccatggggtagtgggaactgtgacctgcagggatgaggaaaaatggggggggggcgagctgggagaactgagggggggaaac

SEQ ID NO: 99471 - DNA, 2391 bp, Glycine max
  Clone ID: PAT_MRT3847_60837C.1
ctaaacaccacagaccaactcgtcaaggatttagagaacccgggtgatgatcaccatattcgtttgaaccatcacgctcagcctttcctaagacaccagatggcggtatgtgatggtctcattttctacatgggccactcgtctggacacttgaaataatgccaagtatactaaatgtcttagtcttaagaggggggaaaaactggaattccaatgattcttaatttcttacaatccaatctgcaaactgagtgagatatataacttgtttttgatttcttcctcatcattttgcatatacaaagattaaaatggaagggttttttggaaattgcttcaatatgattttgctgatgttgtgcttcaccaacttgagcatagcttttgctcaaagtcatatgaatggatttggagagcagccactggccaagattgccattcacaagaccgttttggcgctacacagttctgcttccattatagcagtcccttttgtgctaggaactaagggtgaggatacccaatgggtgactgtagagctagagtccccaataccatctgttgatgactgggtcggagttttttctccagcaaacttcaattcagcaacatgtcctgacactgacggcattggctgggtagaggaaccatacatatgcacagccccaataaagtacaagtatgccaactactctaaccgaaactatgcaaagaccgggaaagctattttgaagttccagttgatcaatcaacgtgcagatttctcatttgcactattttcaggtggattatccgatcctagacttgtggcaatttcgaattccatatcatttgcaaatcctaaagcacctgtgtatccgcgccttgctctaggaaaatcttgggatgaaatgacagttacatggacaagtggatatgacataaatgaagctgtgccttttgttgagtggggaccaaagggaggaaagaaaacacgatctcatgctggaacattgacatttaaccgaaacagcatgtgtggtgaacctgcacgaactgttggttggcgtgaccctggttttatacacacaagtttcttaaaagaactgtggccaaattttaggtacacttacaagttggggcatatgctgtctaacggttcttatgtatggagtaagaagtattcattcaaggcatccccatatcctggacagaactctttgcaacgtgttatcatatttggtgacatgggaaaggctgagcgtgatggttcaaatgaatatgctgattatcaaccgggttctctaaacaccacagaccaactcgtcaaggatttagaaaattatgacattgttttccacataggagacatgccttatgcaaatggatacatctcacaatgggaccaattcacagctcaagtgcaagaaatttcgtcaacagtaccatacatgattgcaagtggaaatcatgaacgtgactggccaaacacaggatcattctatgatactccagattcaggtggagaatgtggagtccctgcagaaaccatgtattattttcctgctgagaatagagccaaattctggtataaagcagattatggcctgtttcgtttctgcatagcagatagtgaacatgactggagagaaggatcagaacaatacaaattcattgagcattgtcttgcaacagtagatagaaagcatcaaccatggctaatcttttcagctcatcgtccccttggctactcctctaatctttggtatggcatggagggttcatttgaagagcccatgggaagggaaagtttgcagaagctttggcaaaagtacaaagtagacattggattttatggtcatgtccataactatgaaagagtatgccccatttatcagaatcaatgtgtgaatgaagaaaagcatcactactctggcactgtgaatggaacaattcatgtggttgttggtggagggggaagtcacctgtcagacttcacaccatcaccccctatttggagtctttatagggacgttgactatgggtttggcaaattgactgctttcaatcattcatatctcttgtttgagtacaagaaaagtagtgatggagaggtctacgactcctttaccatttcaagagactacagagatgttttggcctgtgtgcacgatggttgtgagaaaactactctagcaacatgagttatgttgtgtctatgtgtagacccgatatggacttgaaataaaataaattattgtccaaataaataatggttaatttacttacatccgctattcaatatgaataatactgtaagaacttcaaattaaaccgtcacattgccatagtgtgatgttcaaaaaaaataaaataaattattgtccaaatagaaaaaaaaaaaaaaaaaaa

SEQ ID NO: 99472 - DNA, 309 bp, Glycine max
  Clone ID: PAT_MRT3847_60838C.1
aaaaaaaacacacccttcacacatttttacaacatttaaaagagggggggaatttttcaaataaacagagcttccccaacaagaggggcatgtctaattcccttttttgaattaaacaaccgaccaaccgaaagaaaccccattttccaaatcctgcagaggattcccctttttcaaaaaatctggcagtaccctggggaacaaaaaaagccggcctaaaatttttcccaccattttcaaaatcttgaaaaatccccaaaaaaatatcaaaaaccggaaaccggtggggattggcaataaggaaaccca

SEQ ID NO: 99473 - DNA, 312 bp, Glycine max
  Clone ID: PAT_MRT3847_60839C.1
cccaccgcgtccgaattgctctctatgcacatgacgatccttggcattctgctttgcccaccttataattccactgccatatgtaggaccagtggctcgctctcccactggttgcgacattgctgctaaagactataatcttctcctcatctttaccctatggctttctcatctcttaagctcccatcaaagctttccatttaccaatgctcaccgggactgacatccctcgagctccctccataagcaggaggtgattgccttcctcctaaatcactgcgagtctagatcgctcagcgtatggagaccaca

SEQ ID NO: 99474 - DNA, 379 bp, Glycine max
  Clone ID: PAT_MRT3847_6083C.1
ccaacgagcatctagcttggcagcccgagcagttgctggctactgactgactaaccacacacacaggctgacgacaggcaggttaatccatccacattcattactaacagaccgtgctcttctacttactaggaaggctagagcttgctcacacacacttaaatcagccgggaagctagctacatgcaatttctaccgactggctcgatcaattaagtctctcggttgtaactaacgctagctgctggcaagtaaatccaccaactagatcaagcaggttgcttcctgtctgctgttttcaggcatacggacgcacgcgtggacccaccaattaatgaccgacccctgcctgcatgccaaccatctctatctagagtga

SEQ ID NO: 99475 - DNA, 178 bp, Glycine max
  Clone ID: PAT_MRT3847_60840C.1
tgttgtacggctgcgagaagacgacagaggggggggcagtttgagaaacgtattctcttattccccacaacagaggacacgagagttgtccgttcagggcgtacgatgacaggagggcaaaacggaacccgaactgcccagggatgcccgtttagacgacctacgagcttaccagggt

SEQ ID NO: 99476 - DNA, 1353 bp, Glycine max
  Clone ID: PAT_MRT3847_60841C.1
ggctcgagcagagacgtgaaaatcccttggatgatcgtcacaaagcttctgttggttcatctactgatgtaaagccattgttatcttctctagggaaatcttcagtactaacacctaccgatgcttctagtaccaataagttacatagcacagttagcacttcgtcaatgctatcttcatcttctcctggttttgttcgtccttcccgtggaactacttctgctaggtttggatctgccttgaacattgaaactttggttgctgctgctgagaaaagagaaattcctattgaggctccggggtcagaggttcaggacaaaatattatttattattaataatgtttcggctgctaatgttgaagctaaagcaaaagagttcactgaaattttgaaagagcagtactatccttggtttgcacagtatatggttatgaaaagagcgagcattgagccaaatttccatgacttgtacctgaaattcctggataaagttaattcaaaggctttgaacaaagagattgtccaggcaacttatgaaaattgcaaggttcttttaggatctgagctcataaaatcaagttcagaggaacgttctttgcttaaaaatttggggagctggcttggaaagttaacaattggccggaatcaggttttgagagctcgtgaaatagacccaaagtctttgattatggaggcatatgagaaggggctaatgattgctgttattccatttacgtcaaaggtccttgaaccatgccaaagcagtcttgcatatcaacctcctaatccttggactatgggcattttgggattgcttgctgagatttattcaatgccaaacttgaaaatgaacctcaaatttgacatagaggttttattcaaaaatctgtgtgttgatatgaaggatgtcacaccaacttctctcctgaaggatagaaaaagagaaattgaaggaaatcctgatttctctaataaagatgttggggcatctcaatcacaaataattactgatataaaatctggccttgtacctccggtaaatcaagtggaattaccacttgaagtcaccaatccatccaacacaggggctcatccacatatactgtctcagtatggtggtcctcttcatatttcctcgggagcattgatggaagatgaaaaggttacacctctgggattgtctgatcaacttccctctgctcaaggactgttacaagcaaatcctgccccagcacctttttctattagccagctttcaacacagatacctaatattgggactcacgttattatcaatcaaaagctcagtggttttgggctgcaaatgcattttcagagagcggtacccattg

SEQ ID NO: 99477 - DNA, 270 bp, Glycine max
  Clone ID: PAT_MRT3847_60842C.1
aggcgagaggcagcggcacgcgctatgatagggaaatgataagctcgcgctcgttcattgctcgcacataataatgtcgcgagccatttcagaggtcaggcgtaacgcacataaaggcaagttcatgatctcacctttggtgttgttagcgaggcttgtgaaactgattgggagagatctacggaggccacctttttctcgtaccaccgtgcctcaactttcgccgactctctttttctcctcgtccccacccccccccccccccccttt

SEQ ID NO: 99478 - DNA, 472 bp, Glycine max
  Clone ID: PAT_MRT3847_60843C.1
ggctcgaggctagaaagaaactctcttgtattttccagaaccaatgaagctgctctcttattctagcttacttgggactatccttagtgcaatagtctcggggatagttgagagggacataaatgcttggaagataaagcgtaacaaggatgtcattctcattgttctaactgtgagtatcaacatatcgttcaatatgattttgatttacataattaaatagcaagattatagataatgcacaaactattttatatgatcattcgaaatcacaaattatcatgtataataaatttattgatttttataataattatttcaaaaattataacaatagtaattcctaattaattgtgggtgtaaaactattttacttgtatgacagttaaactcatataaaaaggcataacaataattcaataaaaatacatatgctgatagaatatatgtaacgctatactacaggcactag

SEQ ID NO: 99479 - DNA, 316 bp, Glycine max
  Clone ID: PAT_MRT3847_60844C.1
aacatcaactttttcctcatcgttaacatgcacatgtatatctctgtccatgtccaaaaccaaaaccaatgccgctaacgctaagactacagagacaaagccaaaggaaaaagatgaagacggtgtctctggcactggaggaggatgtactaacaataacgagaacgagctcggtgggggtcgtgtgcgtgtgcttgcatcagcactgtcacgggagggaaaaagtgtaacaggaactggaacactagcgcatgtgcatacggaaactgcaattcctgaagcagaagctgatcctgtgcttctgattctcatcctc

SEQ ID NO: 99480 - DNA, 108 bp, Glycine max
  Clone ID: PAT_MRT3847_60845C.1
cgtgactgagatggctggaggtgttattcacagatattgaggaggaactcacccggtatactccctgtgcccacgacaaaaatgtgtgtatgatatctaagatgatat

SEQ ID NO: 99481 - DNA, 327 bp, Glycine max
  unsure (1)..(327): unsure at all n locations
  Clone ID: PAT_MRT3847_60846C.1
angacactgcaatcaacggggatactccattagctagaaacaaaagcaacaaaggagagggattttaagtaaaaaaaggagttacacccccttatattagggaagatgtgacggatgataacttataaggagattaacttaaaaagaaataaataatgactgttgatagcgaaaaaatcgaaggaaagtggatctgaagaatatatattagaaaactatactgacaatggtggacttgagaagatagagatgtttgagtggtatcactaatacaggaaaagaccgattgaaagcatgaacaaaaaacatgtattatggaaaataaaa

SEQ ID NO: 99482 - DNA, 1634 bp, Glycine max
  unsure (1)..(1634): unsure at all n locations
  Clone ID: PAT_MRT3847_60847C.1
gcaaatgctcttcgacctgcagcaaagagaaattcaggagctaaggcatagtcttcactccacaaaagatggtatgcagttcatgcaaatgaaatttcacgaagacttctccaatcttggcacgcacattcatggcttagctaatgctgcttctggatatcatagagttcttgaagaaaatcgcaaactatacaatcaagtccaggatcttaagggaagtattagggtgtactgtcgagtaagacccttctttcctggacaatcaaaccatttgagtgcagtggaaaatatagaagatggaaccatcacagttaatattccttcaaagaatgggaagggacgaaggtccttcaactttaacaaaatttttggaccatctgctacccaagccgaggtcttcctagatatgcagccactcgttaggtctgttcttgatggttttaatgtttgcatatttgcatatggccaaacaggatcaggaaaaacttacactatgactggacccaaagagatcacagagaaaagccaaggtgtaaattacagggctctaagtgatttgtttcttatagcagatcaaaggagggacactgtccactatgacgtttctgttcaaatgattgagatttacaatgagcaagtcagggatctgctggtcactgatggaacaaacaaaagattagaaattcgaagtagttcacaaaaaggactcagcgtgccagatgcaagccttgttcctgtatcatctactattgatgttattgaactaatgaaccttggtcaaaggaaccgtgctgttggagcaacagcccttaatgaccgcagtagccgatctcatagttgcttgactgttcatgttcaaggaagagatttgacatctggagctatccttcgtggttgcatgcatttggttgacttggcaggaagtgagagggtggataaatctgaggccacaggagatagactaaaagaagcacagcatattaacaaatctctttcagctttgggagatgtcattgcttcccttgctcagaaaaactcacacgtaccttacagaaatagtaaactcacacaactactccaagatttacttggaggacaggccaagacactaatgtttgttcacataagtccagagagtgatgctattggagaaacaattaggaccttaaaatttgctgaaagagttgccacagttgaacttggtgctgctcgagtaaacaaagatagtgcagatgttaaagaactcaaagaacagattgccagcctcaaggcagcactggcaagaaaggaaggagaatcagaacattcttttttgggcagctctgaaaaacatagaacaaaggctagtgagctatcaccttatcatataaaccagcgaggtcctgacgctgtggatcagcttggatgccggcaaccaatggttgaggttggcaacatagaacttcggagtaataccacagtgaggctcanaactcagagctttgattntgatgagatatcagcaaattcaccatcatggcccccagtgaacaatagtcttgcacanaactatggngaggatgacaaagaatctggtggttctggagaatgggttgataaggtcatggtcaanncagcagatgtaaacaaaactg

SEQ ID NO: 99483 - DNA, 226 bp, Glycine max
  Clone ID: PAT_MRT3847_60848C.1
cgctttcacccccacatgctcacagaagcacataccaggcttcatggagaaatcaaaggagctaaaggcaaaagggatcaacacaatcacatacatttcaatcaacaacgccttcgtcataaaagcatagaaagaagacctcaaagtcaacaaaaaagtcctcctattatctaacaataacaaaaccttcaccaaagccattaaaatcaaacttaatctcagcaac

SEQ ID NO: 99484 - DNA, 209 bp, Glycine max
  Clone ID: PAT_MRT3847_60849C.1
gttatcctccataagaaatactatctcttgtttttgtgttggcctaacctatacctaccttaaccacgggggcgataccgcggtttttaatcgccatacttattgcgtttgacccggcgggtaatcgcgcctggacaactgccttatgcggcacttttggggggttcgcttatcgccggtcaatcttatgggagcactttagatctgtc

SEQ ID NO: 99485 - DNA, 480 bp, Glycine max
  Clone ID: PAT_MRT3847_6084C.1
gagctcggaattcggctcgagctcgagccgaattaatcaaacatggctgggggtagtgcttcgcttcactcttaggtcttgatttctccccttgaattgggttctcaaatccatgtttgcatatgggaaactagtccctggactataagtggacatacactcatttgctatgagcattctaacgcataacttcgatcacggagttactgatccgatagcactaatgtgtggtactctccttccatgacaggacactgtggtatgtgatctatctcggacgtgacttcggacgtgttctgtccactgacctggtttcactaactgagatgcgacgctgtctatacctgtcgaaaggagacagagacgagaatcgacagcctgctgactttggattaaggccagatgccgctgacgccaatgaaaacctgcgggtcctcatttactaacagtgtgtaccagctgtgatatgctaagacattc

SEQ ID NO: 99486 - DNA, 415 bp, Glycine max
  Clone ID: PAT_MRT3847_60850C.1
ggggggcccttaaacaatcttttaaccaaattttatgttgcccgttgagggggatataaaaagggaagttaccccggccttactgggttcttacataactgggtataagggttacccttcccttccaactcaagggcaggggaaaaaaacataccatgtttattaaaaaaaagcaacaaagtcccccctggaaatgtttatttcaaattgggtcgctaaaaaaaaaaaaaggcgcggtccatcctgggattacctttttttgggtaagaaagtagtaaaactttttaatcaagctttattgccagatttttcaattaaaaaacaaggggtttgtttttttaccaaaattattaaaaccaccgatgctaaaaaaagagttttgtttgtaaaaaaaaaattgggaaaaacaaacctt

SEQ ID NO: 99487 - DNA, 291 bp, Glycine max
  Clone ID: PAT_MRT3847_60851C.1
agcgggctcagtgagtgatcggtgttcactggatcctttatcagtggtcatgatcatgatcatcatgaccgccgactgaggaagatgccgaccagtgacattgccatcagctggcctaaagaggctactcacccggacacattgaatgcggggcaggctgatgtcatctccaccttgatcttactattcgacgaatcatgttcctgcatagtctacaacaagctcaccgacatcggcgccgacactacagacggccatatgtgcgattcatcgcccatgctttcgacctct

SEQ ID NO: 99488 - DNA, 560 bp, Glycine max
  Clone ID: PAT_MRT3847_60852C.1
ggtcaattacaaacagttgttacttgaacatctcttttaattctttttagagagttcaaaattgaggcagattcatcgtacgaatggtgcagcctacattgcttaaacaatgttaagcagctgtcaaaaaaagaagaagcaatgttaagtaatacaagtgcatttaatcttatattttttgtctcttatttggtgtgcatttagaccaaacatgaaccagaccattcctattgactgtatagacctcattgcgctcttcatcacagaagagagcatctcctggaaagccgtcgctcgcttttattttggcaagacacttgccagttaaaatgttgctgacattaatggaacctgctgcataaaagaaacataaaccatcagtaatgtaccttgaaagatagacactccttatcaaaagattgatatgtgatcacagacacattttaaactactatttatttcatatcatttgctatcatgttttacattttaacatatcaagtaaaaatgttaaacatttagctaaatcaactcttagtaggtcttatgatcaaacttca

SEQ ID NO: 99489 - DNA, 304 bp, Glycine max
  Clone ID: PAT_MRT3847_60853C.1
caacacaattgtgtcctttgaactcatgaataagcttaaataatttcacaagtttatttggcacactcagtgtttacaaagggggttataagtcatacttttcttttcagcataaaattcattagaggataatcattttcggtttcacaactcgggggggttacttttaaacaacataagtttgcgaaagatcagcccaccctgcttgatttaaaaactggatatcggtcccattattaaacacacgcccaagaatttttattattatgcatcaaataacgcataaggtggaattattcaattt

SEQ ID NO: 99490 - DNA, 230 bp, Glycine max
  Clone ID: PAT_MRT3847_60854C.1
cccacgcgtccgacaacgcgtgcgcttaattggtatgtaccttacggatagtaggatcaagggacatttgagattgcatagtgcagctgatcactaccatggaagacagcgacagtgatagcgagcataacatactctttctgacactcgcactatgcaaggatttgtacagaagtgagctacgacgccagatatgataatcgtgagaagattcgttgtcatatttgcaa

SEQ ID NO: 99491 - DNA, 1160 bp, Glycine max
  Clone ID: PAT_MRT3847_60855C.1
ctgatgttttggaagggaatgatggaaatgataaaagtaatccttcacgtgattctagctcatgcagcagttctatctctgtatcaaaggaacctgtccatgaagcttggcctcttcaccgcaagaaaattagaaaagttgtcatcaggaaagataaaagggcccgcaagaaagaggaaagctttgagaaagctctctcacgcgtccgcacaaggacaaaagttgatgttgcatggcaggatggaaccatagagcgtggactaaattctacaagtttaattcctatagataatcctggtgatcatgaattcgtttcagaacaatatgtagtagagaagacctccgatgatggtgagagtatttctgaagctaggcgagttggggttgtgagaagtgttaatgccaaggagcggacagcttgtgtgaggtggttaaaaaaagttgccagagcagaagatccacgagagtttgacaaggaggaagttgtaagtgtgtatgagctagagggccatccagattatgattactgctatggggatgtggttgtccgcctgtcacctgtgtctgtctgtttagaaacagcttctgttggagagtccactgagaaatcaatacagaaaattgaagagagtgggattaaaatcgatgtaaatatccaaactggtgaaacttttgtgcaattttctgacctctcttgggttggaaatataactggccttaagaatggtgatattgaagttacttgggctgatgggatggtatcaatggttggaccccaagcaatctatgtggttggtcgagatgacgatgatgaatcaattgctgctgggagtgaaataagtgatgctgcaagctgggaaactgttaatgacgatgaaatggaagtccttgaggattccagagaggatattgagagggaaaattcaagcagtgttacttctgaggcagaagaaagtggagagaatgattttggtaggactgcagctctctctgttcccctagcagcatttcgatttgtcactagacttgccagtggaatattctcaagaggctcaaggaacttggattctattcccttggagataaaagctgaacgtgaacatccatcacctgtagttaatgatgagtctacttcacagaaacatattgcaattgatgct

SEQ ID NO: 99492 - DNA, 629 bp, Glycine max
  Clone ID: PAT_MRT3847_60856C.1
atcacctattattattattaagacagaatctctaacacgtgggatcatatccaccgccggatgtcccttaaacccaccacactcccaacatatatcaccaaaaccttattcccaattctaaaagaacacacctgagtgagtccctgacatcaacttataataatgcctaatcagtgacaagcgttatggaggcagagccagacaagtacaagatgatcaactttgaagaaaccgagttgcgactcgggctgccacttgggggtctgcgagtgatcacaacgagtcaacaacggtcaagggcagtggtggaaagagaggcttctctgaaactgcttctgttgatttgaagcttaatctttcttccagtgatgactctgcctcagattcaccttcatctgcgtctacagagaagactaccactgctgcacctcctcctccttctcgagccaacgaccctgcaaaaccacctgcaaagtaagttcttctcctccttatgccttcccttcatttcaattccatatggatgttcccatagaaaatttggttctttttttttctgttgataccaagttttagtttgagactaaaatttgaggaatctgttttctgctttgctgtgacttttttct

SEQ ID NO: 99493 - DNA, 243 bp, Glycine max
  Clone ID: PAT_MRT3847_60857C.1
ttcaaacaaccttcattatttttctgtgaacctgtctttcaagtttataacttgatcagtatgcagtatccaaatcataagggtagttgcaaattgcaatcgctacgcatgatgttcagggtggatccttctctgcaaaggactaccatgatcctcctcgagcaccgttgattgatgctgaggaactcacacagtggtccttctacagggatttgattgctgagctcattgcgacaatgatct

SEQ ID NO: 99494 - DNA, 408 bp, Glycine max
  Clone ID: PAT_MRT3847_60858C.1
tccttaatttctgctgtttactgtatccataaggaggagcgcgttcacaattgacgtggagccccacctgttgtttgaaccaattgcaggggaaagcgctcttgactaacacactggactggctggtgatcagtgggcatggggcgaagaatagcattatcacactacatgaaaatacgggttcaaccggctcatctgtatcgacagcctttacactaaaatacacgccctactacagtgctgtgaaactgtcgatgtgcgtccctggatgactgaactatacgaaactgatacactgtagacattatcgagaaacacaaagtccgggcctgttattgggcacagagagcaaagccacatgccaactcgtgcagcatgcgttgatcttatagataacagtgtgagctc

SEQ ID NO: 99495 - DNA, 362 bp, Glycine max
  Clone ID: PAT_MRT3847_60859C.1
ctgtctcgtgggaaagatcttggagtggttaaagaagatgttgcatgaggtgctgttggcttgtcatcaagaaacactactactacatcgttggaatatggtgggcagaaagacaacgggggaatagtggaggattatggaaggaggatgtactacgctgataacgacgatcatccccaacagaaagattagttggagggaaaaaattccttctataataaaaaacgctctagaagggagaaagatgtttctactaatgaacaacatgttggtggaaaaacatccaaaaaagatgaaataggtgctggtgacactattcagaagattatcctgttgaggaagatcatcaagaacccaccaag

SEQ ID NO: 99496 - DNA, 760 bp, Glycine max
  unsure (1)..(760): unsure at all n locations
  Clone ID: PAT_MRT3847_6085C.1
caaataccgtgttgtcttgtttttccctttcttgttctatacctactctgccgtccctttaggcccttaaaaattatcatgttttcatactttgcttcttttaagtctaaattattatctccaccatgaggtctgctggagcaaataccccaactcagaaggaaccatacattcgtactagagagaatccatacttcgatggccttctaagatctgatggtcagattcccttgaagtctcaattagaatttacgtatattggtgaaaccagacccaaaaactttgtctcagatatctctgaagaggttatggagttgtcaccggagaattcagcagtctcaggattgaactctaaatcttctgaacattcttcgtctgagaagtggttaaaaaccagcaaaattgctccatttatacaactggatattctatccgagctgattgaaccggataatccaaaacatcatcatcttggatatggccaaagcccccggactcctgaacaatcacctgcaatacacaatacagaaaagacatatactgtcattagaagaaaagaaaagctatcaagtattctacttccactatctgcagcttcatactatattggagtatcaccagaaatggaaattgttgaatcatgtgaaagcattgacaagctaaatgcatttttgaaagcaagaaaggatgatgtcaatgctggtgtacctgggaaattctacatgctgntatgggttcagatggtgctgacgtgggaact

SEQ ID NO: 99497 - DNA, 647 bp, Glycine max
  unsure (1)..(647): unsure at all n locations
  Clone ID: PAT_MRT3847_60860C.1
tttgaggatttttttaattttcaattcatatttatttttcctcttgtattattttttttggatgaatgtctcatttttaagctgtatatgaggttgcttactacgtatagccctcctattacagaaatgtttacggtgaagccgtgcttgccgccggcctctttaaaggcgtgtttggatgccctccaagcttgccttgaaattgtcaaacagggatttcttttgaaaaaaaaatgtttagttgtggttaaaaaattatggttctttaaaacatgttggattaggggtaaaaaaatcctgcttttcggggggattttttttttaatgtaaactttttttttagttgaacccttcnaccttgtattacctacctttaaccatatttttaactaaaattaattttaaatactcccgacctttcaaaatcgagtttggaaaaaagaaactcttcctaatacttaccggtggggggtaccttttacaggtccatttggcccatttttttctatctgcttggggggcaccggcccctttttttatttatttccccctccccttggtccccctctctttctggggggatcccaatttggcccgtgggttttatggtcccggcaccccttttttaggggaaaaatttttaaaaa

SEQ ID NO: 99498 - DNA, 506 bp, Glycine max
  Clone ID: PAT_MRT3847_60861C.1
gaattaagggattcatttggaataaattggtgtagaattccttttaacattgtaaattaatatcattctaaacaagcttcatacaagattttgttagttaatgaaaggaattatttttttttgaacattccaaacatttgatcaattatgtaacttggttgattaagaactttaatcaatagatttatctttttggatactagcaaggcattcaatttgctcattcttttgatgaatttgtttattttatgtatatttgcacattatttcagaatgaggtgtttgcgtgaatgtgagggtgattgttaatcaggaaacaactgcttgattgtattctttcaatttgaaaataggctatttattactgtgggaattggcaaatggcaacataaatatccaaattcattattaatttattagtaacttaaccttctttttccttctgcacgagcaaaacagatcattcccaacaactgcagagttgaggtgttgtcaaccaaaattga

SEQ ID NO: 99499 - DNA, 726 bp, Glycine max
  Clone ID: PAT_MRT3847_60862C.1
gtttccttccccgggcacttatcgcttttgccgcaatacatgacgaacttcttcttctcaattagcaacagcaatgagtaccaccaagtgtaacaagctctcttctacttcacctacgattcaccagcgtaggctcacccgccagaggaagcttcgctacaccagtgacaaagacgctgctctgcattcaactacctctctacccgcttctcctcttccttcctttaagtccgcttccagttccgaccattggtcttcctctgcggttcctcaaccgcttccgcgtcccgattccccgtggatccgccgtcacgaccatcatcaccttggatctccccctttcgaacatcctgctttctcttttcgcagaagggcggtcgatcatgatgcggtgagaagtttaaggtctgcgagcaatttggggagaccttcttttgatccggtgactcccaatgctaaatatgatttgagagtaaatattccgcccgccagagtgttggcaggcaatactagttcgtgtaaagatcacagagaactctctcatgaccatgactctgaaaatgtttacaacttgagattgcattttgcggacaagagtgcccccaacagcatattctccagtcctgttactagtccacgtacgtccagcaatgcagatttttatgacattttgaaagtgtcaccggctcaaactgctcatagcccagaccggtctagtctgctcat

SEQ ID NO: 99500 - DNA, 791 bp, Glycine max
  unsure (1)..(791): unsure at all n locations
  Clone ID: PAT_MRT3847_60863C.1
cggctgcgagaagacgacagaagggggggaagagagaaagttagttacggctggtggcatttttcatttgaaagcgcagctgcagatagaggaaatggaaaagggtgccaaatcggaagcagcggcctcactgcgtcgctgtgcaaaagctgcattgcttctccatagcttgaattccccaatctcccaaaatcagtggaagagggaaatccatgacctgaaaattgaattgctgaaggagcgtttcatgaggaagaagatgaagctctgcgctatcacggagttgttcgttcagctcctcttgttgctctccgtttgtaacttcgtccttctctaatttctttgatattttcctctgcgttacgacttcagagagtgctcttcctccatgctctgttctacttccgtttacgcagctttaaactgctttagctcgttgatgaccgtaaacgaatcattagtcgtaaaatcaagcgttttcgttttttctcaagaatcacggcatttgtacatgtcaatggatcatgtctttgaattgaatcgggttttgaatgtgttgctctgtgtgttgctctgattttgaatgtgagtaatgggagtttgatttttcgtcgtcgttaggtgaatggaatgagggaaattttagttgtattgattattatcactggaagccaggtcgctagaactttgacggtttgacctgatcattatgatttgtgatgttttgccaaaaaaaaaaaaaaaaaaaaaaaannnagccgcccgctcagaggatccaagcttacgtacgc

SEQ ID NO: 99501 - DNA, 340 bp, Glycine max
  Clone ID: PAT_MRT3847_60864C.1
gttctagatcgcgagcggcccctttttttttttttttttttttttttttcggcattggtttatatgattaaaaatcgattgtttttgcaatgaccattcaatcggcactcattatttcttaattaaggactttttccgtcggatcctttggcacttttcacatgtgacttcctcctcgggctggccatcatttggcacttttctggagcatttccaatggggcagagagccacagccgttgcagcggtaacagggttcggtttggaaggggaaaagcaaatcgtcggtgaccatgcaaacttggcacaaaaaggcattttgacggcaccgttcacaattt

SEQ ID NO: 99502 - DNA, 368 bp, Glycine max
  Clone ID: PAT_MRT3847_60865C.1
atccaacatgtttgggcccaccaaggacccggcacggggggttagagaggtatgtgacttcaaatatatttaaccaaacttgaaacagaaaaaacgcggggcaggacaccattaataaaatctggttggtcatcaaacaaaaacacactattcaaacgcagattccaggaggcattcgagataaagaaatcaaaatccttccatcattgagacaacggccatggtgaggaaaccaacagatacatccatcgtgaaaactaggtaaagcacaagagatgttctcctggggttgactgcccaactcattaccggatgtgcatcccaagatcttcaagccaaagctgcacacacaacaaccactttcacta

SEQ ID NO: 99503 - DNA, 236 bp, Glycine max
  Clone ID: PAT_MRT3847_60866C.1
ttctaccacgtgcacttgttctgtggttttggtctcttgtttaattgcagacaagtagtactctcgggtaaccagaatcaggtgtgaatgtgttgagattatttactgttttgcatgataggagaattgagaaagaatacgttataagatagagaggcataacatcaatgcagagttggaagatggctcccaagggctgacatggtgtgagtgtatgggtgtgtgactagcttctc

SEQ ID NO: 99504 - DNA, 685 bp, Glycine max
  Clone ID: PAT_MRT3847_60867C.1
atccccacaaacactttcacctccgcaagaagcttcaacaaaacgacatcgtcgactgcgcggccgcacctcaattacctcgactccgtagaatcctcgtcgttctcccgcaacaccaactcttgggacgatcccttcgcaccagcgtccagattcgtgctcagatccacgctctcctcgctctagtcctctatctaccgcctgcactctgagcgctttctaaccctcaccgctccatcattgccaaaaccaactagctctccaacctccaccacaccaccaagctcctccagcactccatcagcgaccgcatggccaccgtcaactccgaaaaactccatctcgccaaggccgcctaactccaattcgagatcctaatggtgtaagaatattcaactgttgcatgaaccgcgaacccaaaatcgaacctgcgtcgggggtactgcaaaccgatcaacaaacccaaacttgggagctaaaaacctagatctaaaaaatcaggttgcagttatggtgcgtgacaggtttggagaagcaaccgcagtcaaagatgacgaatgcgcggtctcgacggtcctcttgtggtgtgtggcctccatgcgctctatgaacttggactcgttggagaagtcgaggtagtcacaccccacggcggcgcatgcgaccatgacgggctcgctgtgga

SEQ ID NO: 99505 - DNA, 281 bp, Glycine max
  Clone ID: PAT_MRT3847_60868C.1
accacgcgtccgcacgtagaactaacgagcgttagaatcagcgaagataatattgcatgcaactgggcattatatacataaaagactgaacaccgacgattttaactgccagatctaaaaacagattgcaccattcccacaattgaaagtactctatagatcagccgctactgcgtctctattgacatagatcaaatggctattttctgatgcatcgatattccctaagttctcattctaattattcgacacgaatacgagtgaggaacatctttgatcca

SEQ ID NO: 99506 - DNA, 211 bp, Glycine max
  Clone ID: PAT_MRT3847_60869C.1
gaggcacagaaaatcagcacctatttttttttccaattgggggaattttaaaaaaccccaaaaccaaaaaaaaaggaaaaaggcttacaaaattgggtggggaccaactcggacggtgggccatacattactaggaaaaggttcccttccctcaagcattccacattgggaacaccccactttttgacgtctggatggagttcggcgccgg

SEQ ID NO: 99507 - DNA, 106 bp, Glycine max
  Clone ID: PAT_MRT3847_6086C.1
cgctatgcccggtgatctcgttgttactaataggcccgttcttcacgaatgtgcccaccagaaggtatccgtgggccacgcctaccttgatcctctttagtattgg

SEQ ID NO: 99508 - DNA, 249 bp, Glycine max
  Clone ID: PAT_MRT3847_60870C.1
cgtcacgcttatacacacacagtctctaactctaagttagcactgattttaaagggatctgttcaaatgtagacgagattgctttcataagatacacctgttattcaaagggttgcaaccataatgctttgaaaaatgggaaccctcattgtaactgtaagtgattgacaacatgcaaagtattctttaaattgcatgccttgtgtttaacattgtataacggagtctcttctgaaagaaagaaacaca

SEQ ID NO: 99509 - DNA, 500 bp, Glycine max
  Clone ID: PAT_MRT3847_60872C.1
tttttgacaaacaataaaatagttctatcataaagggggtaagagaattggataaaaagaaatggaataaattccattctgttataaacaattccaacaatggtgcctaatatcagtcaatttcatttccttctattttaccataagttgaaacataacctcggaaaggataaaataaaattgaccaagaaacaaaaaggcctctgcagctttacatcgtatcactgcagtccattgttgccgcccttgttcagaaagcaaatcttctaatgtgcatttttcagacgccttgagcaatcgttaccaacactgtccaacatgttctccttttcccatttcccccctcaccaaggaaacctaggacaataagaaagattaatatgaatatcatggtctttttgcattggaagaaagaagacccatctgctcagtaaggtgatccatatgtcgagtattgttccatccattttccgttggctggacctcattccctttggata

SEQ ID NO: 99510 - DNA, 551 bp, Glycine max
  Clone ID: PAT_MRT3847_60873C.1
tcgtacggctgcgagaagacgacagaagggggagggcgctttgattctgtgctcatcccctaaaggcagcaaaagcactgatactgtgacaggaacacgacgatgtatattaacggctagactactaaggggactcacttaccccttgaagtgaaccctcaacacacgctagctgttgtgaagaagaacattgagtcagggcatggagttgatgtttaccctgctgcacaacagatgcttattcattaggggaaggagcttaacgatgccgcaacccttgaggaaaataaagttgatgacaataattttgtggggatcatgttaagacggaataagggatgaagtggagccgtatctgcgctcttaaacctgagaacccaacctcaaagctgtttgccttctactaaatcagcactctagccttatgcatctgctgtacgacaggatagattccattctgagcagaagccagttggtactcctcccactattgctgagcccaacttcgaagttcatgcaacattaaatcctttggttggaagtatttataa

SEQ ID NO: 99511 - DNA, 833 bp, Glycine max
  Clone ID: PAT_MRT3847_60874C.1
gggttcaactcttctttcttttatcaattgaatgactccttatatacaaggtgaagatgctgatatctaaaggctgtatacatgtctcaaaatatgtaatcataaatttacaattacctcctcaatcaattcacctaaaactaggttctctacttcattgacaacttgctcagcttcatctgcggaaaatccatgcctccaaccccagttccatattccgtttatcagtccattgttgctctttatatctctctccatcattgcatagatattatctgaagctagtttttcactgtaagatgttagatgctcaatggcactatagacttcatcaaccaacctccctaaagagatgtgatatcttgaatgccctgcacaagttagcaacaaagggtgaactgcttgtgtcccctgaaggctttttcgctcagtgagttcatttgcacaatctaaataaagtctgagattggctatttccttagttttacttcttggtaggatcttgggacagtcaacatcaagattgaggagctcttctgcatgtccaataaatgactgactagttagaagcaaatattttagctcagaactgtctttgtcaggctcacgatcggtttcactgatattggtgatgctatgagcttcctcagcagggatagaatcattttcatgttcagacttaagcatcaaaatatcatcacttgaagaaccctggctttgctcacaaatttctctaatcttatttgcagatgcatctacttcttcatgctccaccgcaagatcataactggtttagccgcttcaggctcagcaacagcaggcttttgcttctt

SEQ ID NO: 99512 - DNA, 1185 bp, Glycine max
  Clone ID: PAT_MRT3847_60875C.1
agacactcaaattacatggtcatagtgtacacctagttaggcaaacacaccaaacaccaaacaccaaactagttggctcaattctctttgaatggctttggaggctttgaattcaccaacagcagccaccactccgttccgtggctaccaagaagaggaggaggacgaggaggctgaccttcacttacgtgagccttgggctaaaaggaaacgctccaaacgaccgcgttttgagacggaggaagagtacctcgctctttgcctcatcatgctcgcacaaagcggtaacaccagaaacatccacaacaacaacacccaattaccgtcttcttcactgtcagacaaagaagcgtcgccgccggtgaaactaacacacaggtgcaccgtttgcaacaaggcctttggttcttatcaagcactcggtggacacaaggccagccaccgcaaggcctcgtcggaatccaaccccaccgcctccgtctctgccctagccaacgacagcgtttctgcttccaccgtcggcggcggaaggatgcacgagtgttccatctgtcacaagagtttccctaccggtcaggccctgggtggccacaagcgctgccactacgacgtacggctgcgagaagacacagaaggggccaacggaaacaacagcagcggcgccactacctccgacggcggcgctgcctcctcctcccacacgctccgtgggtttgacctgaaccttccggcgccgctgacggagttctggtcgccgatggggtttgatttcgggaagaagaaggtaggcggtgaacaagaggtggaaagcccgttgccggtaaccgccaagaggccgcgtttgtttacaggggaagatgatgaaaccgcgtagatttgtttgcagaattttattttaaattgattgaaattgaatttgttgctggtatatcgcgaatatgattatgaattcaaaccagttagtttaattttcattttatgtttttttttagtatataggtgggattgggattttgtttctgctactctgtacagacaaattttgttcattgcttttggactcttttttgtcattgattcaatctaacaattgctttcatcagtaatgtttatgccaaagataaatataagttaattcccatcatatacagattcctatataaatttatttcttggcttcttccg

SEQ ID NO: 99513 - DNA, 169 bp, Glycine max
  Clone ID: PAT_MRT3847_60876C.1
aggggttctttgctttcaagacccatgaagttcttgttccactccttgtgaaggataccttgccactcattcccacccaaaaactttttttattaattcttcaacctcaaggcttccttaatgagaatgatccaaataatacgactatttttgttggcaaattgtatcc

SEQ ID NO: 99514 - DNA, 441 bp, Glycine max
  Clone ID: PAT_MRT3847_60877C.1
tcccgcgatcgacctgctcactttacggcggtcgcccttttttttcttattgatttttcactttaaaacaattatacaaaagtgactgggtaggctcaaactcgtatacataaagataccatttatatcaatcagacaaaatcattattaaccatattttgagaccttgtgccttgtcatgatcgaagatacctaaacaattgatctatgaacttaccttgtttcataacactaaaaactttgtcacactctttacccggtgattgcttcttcagaaatagattcattcaaaggccgatcttatttctaactagccttattcaaggtgtactacctttatttcttgatattgctgggaatagcacattggtcattctcatatgcaaattttacactttccaattccttatgcaaaaggtttttcaacttctactcaaatgt

SEQ ID NO: 99515 - DNA, 392 bp, Glycine max
  unsure (1)..(392): unsure at all n locations
  Clone ID: PAT_MRT3847_60878C.1
aaaaaaaaaaaaaaaaaaaaaaaaaaaaaaattaaaaaaaaaaaaaggggtaaaaatttaagggggtggatttttaggaaagaatgaattctaatncnttaattttgtatgaatgtaactaaattcaatttactggccgtcaatttacataaatgtgactggaaaaaccttaaatttaccaaacttaatagccttgtatcaaattctccttttgcaaatttgggtaataccgaataggctcaaaacgatctgacttcaaaaaatttgcaaaatatgaatggctaatagtacacactttgtagggttgaattaatttcgtcggttttattggctactagaatagtgaccattataattgcaaacaccctagattccagtcctttttttttctt

SEQ ID NO: 99516 - DNA, 512 bp, Glycine max
  Clone ID: PAT_MRT3847_60879C.1
tttttattttttgattgtaataagtattaaattcataatagattggtgtaatttgtttaaattttttatatttattataatttaaggatgtttattttttgggggagaaaaaatcccccgagaaaaattttttgcaaaaaaaaacaaaaaagggatttcccaaaaaaaggggcaaattccgggcccggggggaaaaccggaaaatttgaggcgggacgcgggggggaaacaactttctttataggggggctgattaaagaggggggaaaataagggaaaaagtgtactctggggaaaaggggtattgggaaaaaatcccacaaaaaaaaaaaaccggaagaaaaaagggtaaaaccgggggggcctaaaggggggcctaaccccaaataaagggggggggcacacagcccccttaaaagagggaaaaaccgtggggccagcttgattaaagaaaacgccaacacccggggagagggggtttcggtattggggcccagggggggttttttttt

SEQ ID NO: 99517 - DNA, 399 bp, Glycine max
  Clone ID: PAT_MRT3847_6087C.1
caggcttgacccatgcatacgaccaccgaacgacgactgcaataactccactgattgaggttaacaccaaatagaaatgagacacctaggtgatctatttactctgattccaataacactgttttatatactactatgtgcttatgacatgatcttctctatatacatcttctaccatcaaatcactatttacataatctcaatcctgagtctttctctaatgacctagtatgcattgactatacttcgggtatcgaagtcagatctctgcccaatagtgctttaattctaactaagtgcaagtacattatggatttgtcgcgttaaacaaagatggacttagctaatcatatcatttactcaattactagtgcttactaatcgtccaagttagggcat

SEQ ID NO: 99518 - DNA, 262 bp, Glycine max
  unsure (1)..(262): unsure at all n locations
  Clone ID: PAT_MRT3847_60880C.1
nnaacatgggatcggtggctggtgttgttantgctgtgtggcantcgtgttgggccctttntgcgggtgtcnntgatttgngttgantntaagaagtttaagctggtgaaaaatttggattcacgttgttcggagatnattngaagtccgnntgcagtttatctanaattagnttgattcngttacngangtcttnaatggganaggntnntgngnatggctcgttggggattttnnaaagggnggttttcggncgnntggt

SEQ ID NO: 99519 - DNA, 262 bp, Glycine max
  Clone ID: PAT_MRT3847_60881C.1
caggaattgctggagcttcctctcaatgttcaatggtctactcagcgtgatcaacgacgttgcgagccattagctcgcaaacacttgtcacaccaggcacctcgcgacgcgttagcgccgtctagcgtggtgcctgcaagagtgcatggcttcttctggtgcgttgaacttggcctatcgaaaggcgtcgcatgcagtgtacatcatctcgagatggttagagcacatgaatgcgagcgtctaaggtgataatatccagtta

SEQ ID NO: 99520 - DNA, 1492 bp, Glycine max
  Clone ID: PAT_MRT3847_60882C.1
gcgggagctcggaattcggctcgagggaggagtgacattgtggaagaaagactgaaggtgttcgcgatcggagactttgaaaccctcctttcacccattcatcccaagcattcaacaatgtctccgttatcgaagctctcgttgctgatactgatggtgttcatctcctccgcgatggcctcctccgacgagagagtgagcgaattgctctccctgcaatccagatccaaatcgggcgtaatccggctgaacgaccaatccctcgcccgcttcctcacctccgtgaaaacccctcgcccttattccatcctccttttctttgacgccgcacagctccacgacaagccggagctccgcctcaccgagctccgcaacgaattctccatcgtctcctcctccttcctcgccaacaacccttccaacaccaagctcttcttctgcgacatcgagttcaaggagtcccagctcaccttctcccagttcggcgtcaacgccctccctcacatccgtctcattgggcccacggcgggcctcaaggactccgagcccatggaccaaggcgacttctcccgcctcgccgattccatggccgagttcgttgaatccaagaccaaactctccgtgggccccatccaccgcccccctctcttctcccgcaaccagatcatcctcttaaccgtcttcattctcatctggatcccctttttcctaaaaaaagttatcgcgggacagaccatactccacgaccctaaagtctggctggccggttcagtcttcgtttacttcttcagcgtttctggtgcaatgcataacataatcaggaagatgcctatgtttgctcatgcccatgttcgacccttccaagctcgtgtttttctaccagggctccgggatgcagcttggtgcagagggctttgctgtgggcttcttgtacaccgtcgtgggcctgctcttggcgtttacgacccacggactcgttagggttagcaacgtcagcgtgcagagggtggtcatgatcttcgcactcttggtttcgtttttggctgtcaagcaggttgtttacttggataattggaagactgggtatgggattcacggcttttggccctctagctggaattaagaggtattctgggcctgccttcccattttattaaaatctataaagcttagcgaaaatgtcatatgtttagaactttgccggattttatatagaacttgaatttgagtaatgagtactacattttgtttggacatgttatggttattagtggtggttgcataaagctgaattgcgtttttctatattggtgctgctagattgattgttatattacttaagttgtgcttttttttttttttttaatgatggtctttgaactgaatatgtggacttgtgctattgtgcaattgcatgagtgatgtagagattagtattctgaaaaaaaaaaaaaaaaataaaaaaaaaaaaaaaaaaaaaaaaaaaaaaaag

SEQ ID NO: 99521 - DNA, 391 bp, Glycine max
  Clone ID: PAT_MRT3847_60883C.1
ggcagcagcctccttcatggctttctcttacccatccttggctggcaaggccgttaaactgggcccatcagacccctaagtcgggagggtcatcatgaggaagatccgtaccaagcatgcctactccggaagcccatggtacggaccataccgcgtcaagtacttgggcccattctttggcgagcctccgtactatctcattggctagttcccatgtgattacggatgggacactgttgggcttactgccgacccataaactttcgtcataaaccgtgagctcgaagtgatccactctatgtgggccttgctctgtgccttgggctgtgtgtttcgtgaactattgtaccgcaactgggtcatatatggagaaactgagtggctcaaggcc

SEQ ID NO: 99522 - DNA, 624 bp, Glycine max
  Clone ID: PAT_MRT3847_60884C.1
gtcatgaatctcaattaattaagattagctaataaatacgtaggagaattttgaccgtaaaatacaaaatcaaaacactttaatattctgtgtaatgtttattgtcaatgaatcaaagaatatcaaaaagtggactacagatttcatcataagtaaatagggtaatctgacaagtaccagtatagtatccaacttcagcaggagtttcattatggtctcttcaattgcaattttttgtttgtcatcattttgaagttcgggagatctctcaaaagcttgaacacggccttgaacacgagtcacctccttcctgacttcatctatctgcttcaacttcttcaacggttcccattttctaactagataactgcgatatgcagcttgtatcaaaacagcagcatctgcatctgacaaaactcttccatcttttcgacccgcatcagttcgtgtgcttgaatccttctcttcccttgattcagtagtttcctccatcatattttctgctcctttctctgcctttttatcttcagtcttatagtcatcatcatctggacatgtttcccttgcccctttcagacctttactgggtatgtttactttcatctggctctgacatccatccct

SEQ ID NO: 99523 - DNA, 1299 bp, Glycine max
  Clone ID: PAT_MRT3847_60885C.1
ccggaataacccccgcggatcattggaggagtgacagtgtggaaggtcttctcttgtcttgctcgcgatcggagactttgaaaccctcccttccttctcctttcacctattcatcccaagcattcgacaatgtctccgttctcgaagctcttgtttctgatactgatggtgttcgtctcatccgcgatcgcctccgacgacgaaagagtgagcgaattggtgtccctgcaatcgagatccaaatcgggcctaatccggctgaacgaccaatccctggcccgcttcctcaccgccgtgaaaacccctcgcccttactccatcctcctcttcttcgacgcggcgcagctccacgacaagccggagctccgcctcacggagctccgcaacgaattctccatcgtctcctcctccttcctggccaacaacaaccctcccaacaccaacaagctcttcttctgcgacatcgagttcaaggagtcccagctctccttctcccagttcggcgtcaacgccctcccccacatccgcctcattgggcccaacatgggcctcaaggactccgagtccatggaccagggcgacttctcccgcctcgccgactccatggccgagttcgtcgagtccaagactaacctctccgtgggccccatccaccgcccccccctcttctcccgcaccagctcgtcctcttaaccgtcttcatcctcctctggatcccctttctcctcaagaagcttctcgccggacagaccatactccacgaccctaaggtctggttggcaggttcagttttcgtttacttcttcagcgtttctggtgcaatgcacaacatcattcggaagatgcccatgttcctcgtcgaccgcaacgacccttccaagctcgtgtttttttaccagggctcagggatgcagcttggtgcagagggcttcgctgtgggcttcttgtacaccgtcgtgggcctgctcttggcgtttatgacccacgggctcgttagggttagcaacgtcagcgtgcagagggtggttatgattttcgcgctcttggtttcgtttttggctgtcaagcaggttgtttacttggataattggaagacagggtatgggattcacggcttttggccctctagctggaattaagaggtattctgggcctgctttcccattttattaaaatctataaagcttagcgaaaatgtcttgtgttagaactttgccggattttatatagaacttgaatttgagtatgaggactacattttggttgaacatgttatgattattaaaaaaaaatgcaaag

SEQ ID NO: 99524 - DNA, 188 bp, Glycine max
  Clone ID: PAT_MRT3847_60886C.1
ggctcaaaaatcatgcttaaagcattaattaaatttaggtatagttgcatcatgccaaaactagaaacctattattgaccaatcacccttaaagcccaaaatgccgcaaatgaagaaattacctgaattcaagccccctttttgtcccatgaattcaaccattctcatcaaagattcatattaacccc

SEQ ID NO: 99525 - DNA, 298 bp, Glycine max
  Clone ID: PAT_MRT3847_60887C.1
aacacccgtcaacctctcatctcaaaacgtccatatatatacccgatgcctaccgaaccctttcggcgcttgttctcaggtccttgtcattcgtgtgtgattcgcaatataatggtttggcattgagataacacacattagcatcatcagcgagtcatttaaagatgacttcttgaaacaccctggtagttaatcagatgatggggatagggataagtccccactttgtggtctgagtagtaataagagatcccgtcacgtcactcacatggcaaacgttgatgacccttattcggga

SEQ ID NO: 99526 - DNA, 446 bp, Glycine max
  Clone ID: PAT_MRT3847_60888C.1
ctcgcccgccggcaccggcccggactgactggctggaccgacccgcgcgttctcttacgcgtccggcagattggaccctagtacgcgcactatacgcagtctagactcccagatcagctccggctgcgaagcctgccgtataggcgcgctgtcccagctactgctaaggtgagaacaaatcgcacgaccgcgcctactgataggccaggcgggcgcattgccatacatatgaaaagccctctatgcctttgctgacccataccaagaagacgcgcgctaccacagttacttaatcatatccaattaccgtaaaaggcgccccttatgttcacacggtggggctctcgacggcatcaggcccgttatgtttcaccaccacaccacctactattgcgctgagggtcacagcgatgacgtcaccgttcacagtcttgtgtaccagtacg

SEQ ID NO: 99527 - DNA, 2155 bp, Glycine max
  Clone ID: PAT_MRT3847_60889C.1
tacggctgcgagaagacgacagaaggggggggggcaaacaacagcgagaggctcgagctcgtccccgatagacaagagagaattgaatcgtgccggaaaaaatgattaatgacttgaaaaccgccaccaaaaatattctttctttcttgtaacttcaacaaacagcctctcccaaacatcaaacagaactctctggggtgttggtgttggtgagggatctgaggcaaaggtgttgatgatatgggagcgtgtgtttcaactccacaagggtgcgtgggagggaggttgagctcttccaagaagaaaaccagaaagagaaggagagagggactcagaagaagagttacttctcggttgtgtaaggaatcatcggagaaagttgatgtggcagggttgcctgattgttcctttgctaaccccactttccaaggaagtattgaagaggcatggtttgattccattgcagtatttgactctgactgtgatgatgattatcagagtgttcctgatgatgttgtatctctgagtgggattgaaggtggatctgtatcaagttttccgtcttcaagagatgccacccgtggagtttccacagatcatgttcagaaacagaaggagttgttggcaggatccgaggcagccagaagttcagatgtccaatatttttggtgtagatgtcattgattctcaacgtgagcctgtgttccttgatgaaatatcctcagtggatgcgaactccaacaaggatgatggacttttggataattgcgggattcttccaaacaattgtttgccatgtcttgtgtctaccattccttctgttgaaaagagaagatcatcaagttctagtcctcctaatgcaaggaagaagcctacaacaaaactttcctttaaatggaaagaaggacatgggaatgctactctattttcctcaaagatgcttctacaaagaccaattgctggttctcaagtgccgttttgtccaattgagaagaaaatgcttgattgttggtcacaaattgatgcaagcactttcaaagttcgaggagtaaattatttcaaggacaagaaaaaggactttgctcctaattatcctgcatattacccatttggtgtagatgttttcttgtctccacggaaagttgaccatatagctcggtttgtggaacttcctgttatgagttcctccgcgaaatttcctcccatactagttgtaaacgttcaggttccactctatcctgccacactttttcaaggagaaactgatggggaaggaatgagcattgttttgtactttaaactttcggaaagttactccaaggaacttccacagacttttcaagaaagcatcagaagattgatggacgatgaagttgaaaaggtaaagggttttcctgtagatacaattgcacccttcagggaaaggttgaaaatattaggccgtgtcgtcaacctgcaagatcttcatttgagtgctgcagaaaggaagcttatgcaggcttacaatgagaaacctgttctttcacgtccccaacatgagttttacacgggggaaaattactttgagattgatttggatatgcatagattcagttatatctccaggaaagggtttgaagctttcttggatagattaaaggtttgcattctagatgttggcctcacaattcaggggaacaaacaagaggagctgccagagcatgtgttatgttgtattagattaaacggcattgattacatgaattaccaacaactggggctaactcaggaccccctctaatataaaaataacaaaagcatttgcaatctttcaatttatgattaataatggttcagtcatttctataagcgattctttccgtgtatacttttttttattgcataaaattcacgtgagttttattagaaaatgaataaaactcaatcatgtgaattttatttaataataaaaagtacgttaaaaattgttattaggattttttttattttttattttatcaatcatgtagacaacatgcgtgtgattaaagatgtggcaactttgtgtaagatgccagcttcaaattaaggaggggtcactagcacaacaatagaaacatggacctacctacgcctacttgaatttcggacatgaagggtccatacttttgcattt

SEQ ID NO: 99528 - DNA, 361 bp, Glycine max
  Clone ID: PAT_MRT3847_6088C.1
ttggtttttgtgtttttttttttttttttttttttttttttttgggttagaaaaaacaggacctttatgtttttatgtttccaaaaaaagaaattttaccccattttcactgtaaccccttgagtgggggtgaagatttgacccgctctcgggtaagattttattctcgtttcaagggcgttcttcctgcctttcaaaggtttgggatttgaaacctttgtttaggttaacaccgtcccagaccgtaaggggtgcttaaaaaaaaaagccctaagcggaaaaaagtggggccaaactgcaggggggggcttgattattcttttttgggcaatttttttttacacaggcgttccagggaaag

SEQ ID NO: 99529 - DNA, 461 bp, Glycine max
  unsure (1)..(461): unsure at all n locations
  Clone ID: PAT_MRT3847_60890C.1
gtcgcngcacgcgtacgtaagctcggnattcggctcgagnagtctggtggnngttcagggtnanganganaacnganannanntnangcttaggcaacccctgagncacacnttnggctnaagnnanatgngntttannngtacngcatgnacntgnacnagttgcnngcgnctaggtgacncanattnacnnncgagnngtnagctanntananctgatagtcnnntcngaanangacccnngaacanngnngtangantgcatacangngcgcnngatgantcncgcnncgacntggcaaaccgcnggngnntntgttcacgngcgggncangcngccaatacctagtnncagntnagagacgngtgtacgaanananaggagnnngacgagnagacgcgggcnacnattgncngctgacanggcggtaacntgtatcagcganacgagnacntaagcn

SEQ ID NO: 99530 - DNA, 381 bp, Glycine max
  Clone ID: PAT_MRT3847_60891C.1
gggaggcataagtgagtttgctgatagagataactacagtgagtgtgatgaaaatgaccgtccttgctttcttcctagcaataagtttggaagcaagggacagccatgcgtaagatacgttccctcaccgaataaagactggcgagcgtgcacgtacgccggaagtgacatgcgcaagttggatgcttgctgtggaaacacaaaccatcgttggcatagaaatcattcctgatgagtgcgttcaaccaacgaatgcatacatcgatagcaatcaatatcaatcacactccaagttagttaaccaacatacttacatttaagccacatacatctacatccaacggacagacacatgtgtattcaatatagaaggcaacgtac

SEQ ID NO: 99531 - DNA, 499 bp, Glycine max
  Clone ID: PAT_MRT3847_60892C.1
ccgggaaaaattcataatattagaccttgcatttgtgtgatctagaatggctaattcaactatcattactttcaacataattctcttctttgtcctcatttctcaaggttgcagccaatgctcgttgaaggatctccatgtaggccaatttctatcaggaaatatagtgaacggaatgccagaatggaatgtgcttgtctccaattggtgtcgatgtgttcaaacaaatgtgatgttgaattgcactggatttgaatccattgaaccaatagacccaagacttttgaagtttcaaccattgcaaggtgtttgtcttgttaattccggaaaacctattggaaaagatgtttttgaattccaatatgcatgggacgttccatttccatttagtcccatttcctcagtcatttcttgttcttaatgtaaaaccaatgagttttggctttagcttagctttgttacaaagctcggtaattcttcaataaaatgcgattttaag

SEQ ID NO: 99532 - DNA, 359 bp, Glycine max
  unsure (1)..(359): unsure at all n locations
  Clone ID: PAT_MRT3847_60893C.1
ctttgggctgattgatgtgcttgcatggtcgtgagaagatgatagaagggcggccggagcggaacggaaatcccgtaccggatggaccgcatcacgtcgagcatacgaatatcggactaggcgtcggagccgtcaattgcgcgaagcggttagggcattacgtaccgaacgacctgagttaggtcagcaatcctattgcgctctaacccaccgaggggaactcacggccgttcctaatcggagcaattcctatcatgggatctatagcccaatagaaacaaatcatcgttatgttccggtatctctccgcatccaaccacacaaagncaccacacacccacagcccacactacaggaag

SEQ ID NO: 99533 - DNA, 424 bp, Glycine max
  Clone ID: PAT_MRT3847_60894C.1
ggtgaacttgcgacagggtctggctgcacattggaatcacctgagaagctttaaaatactcatgcctggatcccatccctagagactggggtacagcctagttattgggaatttctttaaaagagttcctgggattctgataagaagccaggttgagaaccactacattagaagactgaatggtttaatttacatcctatgttatgattggtctaagggataagatttggggtctaacctttcctttcactctagttagtcatagtccttgacttatgcctatatctttgtaagaaatagtatgtttcatttgtgatagtattggtagggctgaatatggatggcatctactgttaaacaagtctaccttgtcagatgtgcaaaagctttcactcttgttctcaaataaaactttgtgggtttt

SEQ ID NO: 99534 - DNA, 448 bp, Glycine max
  Clone ID: PAT_MRT3847_60895C.1
cttatcattgttttggtttcttggttatgttgttttttttttcacaaggatcactcttgttttttttgggttggggaggaaaaacaccacagatcttatctggaaggagtgggcgacaagggttggcttttacaagggggaaatgaaaagggcgagcggaggagggactgaccacacgtttttggtttggggggagcatcaaagccccccccgaccttttcaaaaaagaggggaaacgatcccccctcctgttgaaaaaaacaacaacggggggatggccacagggtgtttgaaccaaaaaagtgaagccacttcctttttggtttttaccgaaaacctaaaaaaaacctttttgcgtgctttgtgagaggggaaaaaaacggttgtttgtttaaagggtgcccgattataaaattcctcggagacgacttcaggggggccccccccc

SEQ ID NO: 99535 - DNA, 419 bp, Glycine max
  Clone ID: PAT_MRT3847_60896C.1
ggctcgaggattgtgaaagttgacctcctattttgctctatgccgcatatgccacatcctgtgcactcaaagtgaccgtcacatagggcatgaccgcgtacatatgcgtgcagtgactcaatagcgctgaatgacacgcaggcttgtctttacgaggggaaagatatacctggacctcaactccatctcctgaagaagatgctgatgatctgagatctgtggtcggtttaacatgactctgatggctgattgtaaggtcgggatcaatgcccagtaagtacggctgacacaatcatatctacgactccgactgcctattgataatggcgtgacaattggtgaactttgcaatcgaggtctaccttaatccataactgatctgatctacaataatcgctagcatacctggtcgaaacata

SEQ ID NO: 99536 - DNA, 282 bp, Glycine max
  Clone ID: PAT_MRT3847_60897C.1
ctcgcatagaatcacggtcgatgcacaatctaacggacttcggtatatcgataactttttcaacacaccttacacacttatgtattggagcctctgatattagtatgatggataggacggtggtgtcggttttggtgatagcaatgacgttggttgacatgaactgtaactgcactagtgttggacacatgccgttaaccaaggcggacggtcacgatttgcacgaagctagctcacggagcacacaaactgggatcaaagccatctaaactgtataagatg

SEQ ID NO: 99537 - DNA, 236 bp, Glycine max
  Clone ID: PAT_MRT3847_60898C.1
ctcgagcgaatcggctcagggcgaacaaaaaaaccaacaatacttagagcaacagagacatggtttgcttctgtggacggatttcgtcacactgctatggatgctattggcatgtaaaattggttcccctcacggagcgaacagcatctcatcaatgacttctattcgctccgattgatgggtgtcatcgcacaagacatggggtgtggtcttcccattccagtattttatcatct

SEQ ID NO: 99538 - DNA, 452 bp, Glycine max
  Clone ID: PAT_MRT3847_60899C.1
gataggtggcattgacagtattctacgatactagctggacatcagcacaggagctgagtcagctgatgatggagaagtgtatgatgattctgattaagttactgttactgcagaacacattactttgttttggaagaatggggccttcaaaaatgaataggatattaccgactattgttgtaagactgagactttgccctaagattgctgatccataagatgtgtatgattcactcattacgtttactatgctttatacatagtgcatttcacgctattagaccatgtatgcatatggcaactttgccagattgtgcactgactcatcaagaaataactcttaggaggacatgacacgaagagttatatgctaaatcaatgactcatctgaagtatatactatgctttggttacatgattgatgattcacatactatatctccgtatgaaca

SEQ ID NO: 99539 - DNA, 1562 bp, Glycine max
  Clone ID: PAT_MRT3847_6089C.1
ggagattaccctccaactcaaacagcatagcataaaatgcgaaatctttgttcccagttgcaaaacccttaaaccccttccacgccatgaagtcccttctcaacccaaagttctcagctttatctcccaaagcttctccttttgctctgttctcacttccttcttctcgattctccttccgcagcaacccgcgtcgaatccccaatcgtcttcttcgcctcaacccatcaccctgttcgtccaataatttctgttgcaccattcaaaatcgaagtttgcaaacggagccctcgccgcctccctccggcgagattcacgtcattgtggggcccatgttcgccggaaaaaccacatcgctccttcgtcggattcagtcggaaaccaccaacggcagaaatgtagcaataattaaatcaagcaaggatacaagatatggattagactcaattgttacacacgatggtgcagaattaccatgttgggcactggaaaacttatcttcattcaagcagaagtttggaattgatgcttatgagaagctggatgtgattggtattgatgaagctcaattctttgatgacctttatgaattctgtcttcaagctgctgatcatgatggaaaaacagtaatagttgctggactagatggtaactatttgaggaggagctttggttccgtccttgatataattccccttgctgattcagtaaccaagttaactgccagatgtgaaatctgtgggaagcgtgcttgctttaccctgaggaagacacaggataagcagattgagctgattggtggtgttgatgtctacatgcctgtgtgtcgccagcactatgtcagtggacaggtagccatggaagccacaaggcatgtccttgaatctcacaaggttgaatgtgcctcccatacataagctgctccacatttcttagcggttacgtacatgcctagtgtttattcatggttgtgccatatcttatattgaaagaaacgagtaggttatttttcaatgtcaatttagtttcaatgtttgattctaaattgaaagctagtattgatttgctccattttatggacttggattaaatagttcagagaagagacgagggccagggagtatgtaacgcccttcttcacattgatgtatgttttgtttagattgaggtttggtgtagctcgggactatatataaatgtggattaaatattaatcaatctgaaaaatatgtttagtaggctatgtaacttgatgtgaaaattttcaaaaagtttaataattgcaacattagtccaattcaaattaattcatgacaccagttgagaaatctctgccactttagtgtcactgctattccagtttccaatcctcatgtgttcaacattgtgcttgtatcggtgaatgaaaaggaaatccgaattctaaccccatatggaagaaggcaataatacatttatgttggatcttttcttcagagaatgagaatgcgaggctaaccaccgtttaagtgtaacaatgttacaggcaaaaaaagattttgcatgtaatctattcctttccc

SEQ ID NO: 99540 - DNA, 387 bp, Glycine max
  Clone ID: PAT_MRT3847_608C.1
ttttgtgggaattaaacactttatgtgccggtctccaccaatgcaaatgttttaatgagaaaaacctttgaaaacagggaacacagaagggcaaactcagggaaatcctaaaaaggccacaaaagactctttttcaacaacgcccctaaacaaaaagggggggggggggccaaaatggggggacccccccaaccgggggggaaaaaaagaaacaaagcacaaggggcagggggagaaaaaacgccgattcctccaaagaaaaaatgggcacccaacaaaaaaagacggtttaaaaaggccccccacggggggaaaaaaaaaaaaaaagggggggggccccccccccggggggtactctccttggggaaagaaaaaaaacttgggggg

SEQ ID NO: 99541 - DNA, 210 bp, Glycine max
  Clone ID: PAT_MRT3847_60900C.1
tagaatcaattaactaattaccaccttttagcgtccgcatttgtgatattccctctgaaagttctgcagtccaataagtagttctataaaaagggtttgagatgcctaatgaatgttttatccaattgttgctgtaattgtaaccacccggaatacaataaagaactctattgtgtgttaattttcatatcaaatgagttttactgtgca

SEQ ID NO: 99542 - DNA, 363 bp, Glycine max
  unsure (1)..(363): unsure at all n locations
  Clone ID: PAT_MRT3847_60901C.1
gttgaatatggagagtgaaagcaagcaagttaagcanaagctgggggtgttggatatcctcaagggagctggaacattctatgtcagcaatatcaacttcattatcttcacctttctcaattcccttcctttcttttttgtcatgctttactttgaaattttgttccagcaaactatcgttgagaccccggaaattttttcacttctaccttttaacgaaagaaatcatgcctatgaacttgatgtaatttatgattacggcacanacattcctagtagaaagtttcgtaagaactatttgcctgataaaagttttagtaaggattatttgcctgttttgattctacttggattcatttactt

SEQ ID NO: 99543 - DNA, 332 bp, Glycine max
  unsure (1)..(332): unsure at all n locations
  Clone ID: PAT_MRT3847_60902C.1
gcctctacgtaagcttttatcctataagcggccgccctttctttttttttttttaaaaacttatgttggggttgtctttgcataaaataatggacgtaagttacaagcaaagtttcctgctgacaacctatgttggaagctgggccataccatatggttttttctacaatacacgctacgatctggggggggggggatttaatttacaatagtggttgaggtaaaaataatnactaggaagaatatacccgttattgggtagtaaaatctagtacttaaaacgcttgggggatcgtgtttccgacataaatgtggctacgccaaccggctac

SEQ ID NO: 99544 - DNA, 1768 bp, Glycine max
  Clone ID: PAT_MRT3847_60903C.1
ggcgactgcttgcgtacggctgcgagaagacgacagaagggcaacgttacaagcatcagctatagttattcaatcagggttgagagcattagcagcacgaaatgaatataggtacagaagaagaacaaaggcttcaacaaaaattcagacacaatggagaagagcccaagctctttctgattacaaacagcaaaagaaagcaactgttacacttcaatgtctatggagagctaaagtggcaaggaaagagctcagaaagcttcggatggctgcaagggaaactggggcacttaaggaagcaaaggacaagttggacaaacttgttgaggagcttacatggagaatagatatcgaaaagcacatgaggacggatcttgaagaagctaaagggcaagagattgcaaaattgcaaaatgctttacaagaaatgaaagctcagttagatgaagcccatgctgcaattatacatgaaagagaagcagcaaaaatagcaattattggagatcccttgaagcagaaaagactcatatttttgataaaattacacatgctatccgatcatctatagagagtcaagaaggaatccatgatctagcctactggctttcaacaacatcaacacttctgttttatctacaatgtacaatgaaggccagcaatacaactaaggcagtgtcacgtaatcgaaactcgcccgcctctttgtttggcaaaatggcacaaggtttacgttcatcttcaatgggcttggggatttcaagtggctacagtggaatggtggacaagacaaatggtcaatctaaagtagaagccaagtacccggcaattctatttaagcaacatttaactgcatatgttgagaagatatatgatatggttagtaattgcttaaagaaagggacaggcaccttataaaaagaatttattagtgaacaatttatgatcaggacgcgattaagaaataaatccagacaaaatcaaaccagaccaagaagttgctgttgtagagaagatgcaagtgcagccaagagttattgcagataatacaactgcccaaatcaagatacgaaaaataaggttgcatttagcaaaagtggcacagaaagaaaaaaaaaaagaagaaattctgaagcaggcccaatccaataggggcgctcagcgcgcatcaggcgctaagcgagcaactaactggaggcgcttagcgtggcagaaaccgctgccaccgttacgcgcgctaagcccagctaggcgcccagcgcccgatccaacagacgcacaggcgcccagcgcccgatccaacagaagcacaggcccagcgtgcatggcgcgcccagcgcgcgatctgaacgcgctaagcgcgaggtgtggcgctgagcgcgactacgaaggcccgtaagcccacttcagccactataaatagagaggcagtcccaaggaaaaatcatcccatctcagagcatcactctcagtacttcaagcctgagttttcttccctctctacattctttgttttgtagtctagcctttctttcatccccagttgtaagccctcaatggccatgagtggctaaacccctagctagggcctggcaggcctaaaaagccaacgatgtacaatgagcttcaggagttatcaatgcaaaggaatttattccaggtttttttttgttctatttcttttcttttattcttgcattcattcttagatctctttttgggttttaatcgctcgggagagggtacccttctgtcgtttctcgcagccgta

SEQ ID NO: 99545 - DNA, 380 bp, Glycine max
  unsure (1)..(380): unsure at all n locations
  Clone ID: PAT_MRT3847_60904C.1
tagcccggactcattaaaatcagtanacagctaaaggagaaaaaagagagcaaaagcccagccgagttaaacggcttagagaaaatgaaagtcattaacaaaaaaaaggcgcgcctcgacggcaaaatacaaaaaggagaaaaaaaaaggtacgaaatggagatctgagtaagacactacatccaaaccatacccgcatacaaaaaaaaaaatttccataccacacccggccagaaaaaaaaaaaaaaaaaaaaaaaaaaaaaggtggttgtctcagaggacttaagtccatgcatgtgcgtacgtgatgctacagtctcctcacagcgctattcaaacctaacctatcggttgctgccccataatgctgcgatcgggaa

SEQ ID NO: 99546 - DNA, 935 bp, Glycine max
  Clone ID: PAT_MRT3847_60905C.1
ggaattcggctcgaggggaaactggggcacttaaggaatttaaggacaagttggacaaacttgttgaggggcttacatggagaatagatatcgaaaagcacatgaggacggatcttgaagaagctaaagggcaagagattgcaaaattgcaaaatgctttacaagaaatgaaagctcagttagatgaagcccatgctgcaattatacatgaaagagaagcagcaaaaatagcaattgaacaagcaccaccagtaattaaagaggtaccagttgtggacgaaaccaagctagagttattgacaaataaaaatgaggagttggagactgaagtagaagagctgaaaaagaagattaaagagtttgaagaaagttgctctgaaattgagaacgagaaccaagaaaggctgaaagaggcagaagaagcacagcttaaagcaacacaacttcaggagactaatgaaagattagaattgagtttgtcaaaccttgagtccgagaaccaggttctatgccagaaggctttggaagaatcaaaaaatgaagaactctttgaagagatcaaaatcctcaaggatcagatagcaaatctacaatcagagaatgaatccctacggagtcaggcagcggctgttgctttcgagcagaaagttcatccagaaaaaatagaatcagaccattcagcagcttctttggagcagaaagttcaaccagaaaaaatagaaccaggccattcagcctgctttagagcagaaagttcatccagaaaaaatagaaccagaccattcagcagctgctctagagcagaaagttcatccagaaaaaatagaaccagaccaagaagttgctgttgtagagaagatgcaagtgcagccaagagttattgcagataatacaactgcacaaatcaagatacgaaaaataaggttgcatttagc

SEQ ID NO: 99547 - DNA, 760 bp, Glycine max
  Clone ID: PAT_MRT3847_60906C.1
ggctcgggcccagttctgtttaattctgatgacaatgtcttagttgctgctccaacagggagcggtaagactatatgtgcagagtttgctattttgaggaatcatcaaaaagggcctgatagtgtcatgcgtgtcgtttatgttgcacccgttgaagctcttgccaaggagcggtatcgtgattgggagaggaaatttggaggtggtcttaaattgagggtggttgaattgactggagaaactgcgaccgacttgaaactgcttgagaaaggtcagattattattagtacccctgagaaatgggatgctttatctcgccgctggaaacagaggaaacatgttcaacaagttagtcttttcatcattgatgagctccacttgattggaggtcaaggaggtcctattttagaggttgtagtctccaggatgagatatattgccagtcaggttgagaacaagagtcgtattgtggctttgtctacctcacttgcgaatgcaaaagatctgggagaatggatcggagctacctcccatggccttttcaatttcccccctggtgttcgtcctgtgcctttggaaattcacattcagggcatagatattactaattttgaggcaaggatgcaggcaatgaccaagccaacttacactgcaattgttcaacatgccaagaatggaaaacctgctctcatatttgtacctacaaggaagcatgtccgacttacagctgtggatatgattacatactcaggtgcagaca

SEQ ID NO: 99548 - DNA, 992 bp, Glycine max
  unsure (1)..(992): unsure at all n locations
  Clone ID: PAT_MRT3847_60907C.1
atccatccgcgcatattctcatttcaatttgcatttgcatttgcgtttcatttggcgttttgtttctttctggaagcttcgttcgggcatcaatggcgtccttcgatgaagctcctcccggaaactccaagaacggcgagaagatcttcaaaaccaagtgcgctcagtgccacaccgtcgacaaaggtgccggccacaaacaaggacccaatctgaatggtttgtttggaagacaatctggtacaactcctggatattcctattctactgctaacaaaaacatggccgtaatttgggaggaaaagaccctctatgattacttgctcaaccccaaaaagtatattccaggaacgaagatggtatttcctggtcttaagaaacctcaggaacgtgcagatcttattgcatatcttaaagaatctactgcttaatgattaaattttcatacagttatgcactttgcttcaaagttctggagatttagttttcagacatttaattctgtggtgcagtaaatactgtatcaacaaataaagtagacttgattggtttgcaatgctattttgttcgttttgcattgcttcttaagaggctgccatatattggctactgttcaattaatttggttgttgaaagtactagccagaagaatacgttagttccaagaggacttaaatggagcaaatcagttggaagaacttggagctagcttcccaactggcttatcanggtgtggagaagcattattaagccttaggaataggagagtaagtactgtttgtgaatgtctttggtttaagaactccgtcttatgtcaacttgtattctgttatacagttctcagcaataaactgctctggcaagtaaatctctccgccagcttcaccatgttgctccccgctgatagttttcttggcagcttggggttcaccactcctagcatccatcccaccctgcaaagttatttcgactccaccctcatgtccttccat

SEQ ID NO: 99549 - DNA, 377 bp, Glycine max
  Clone ID: PAT_MRT3847_60908C.1
ggatgacagaggcagggccagtgctatcaatgtgcttagcgtttgcgaaggagccaatgcaggtgaaatcaggtgcctgcgggactgtcgtaagaaatgcggagatgaatatcgttgaccctcgaactggtgcttcgcttcatagaaatcaagctggtgagatttgcatcagaggcaaccagatcatgaaaggttacctaaatgatcaagaggccacacaaagaactatagacatggaaggatggttgcataccggcgatattggatactgagacgatgatgatgagcttttcgtagtttgatctgtaaaggatcttaatgtgtacgaacgtgatagagtaaatccagctgagctcgaagccattttaattgctcac

SEQ ID NO: 99550 - DNA, 474 bp, Glycine max
  Clone ID: PAT_MRT3847_60909C.1
cccgggccggacccacccgacgcggtctgtttttaatcttttccaatggaacaaatccctaagggttcttgctagctccaatcgccggcggcattgcttcctcttaatgttttttttttctttttttattaagtcttagtgtaccctccattactcccttactgatacttgtttctctgcctgttctttacaacttttatttttttcttgtgtaatcattatactttgtttagatattttctggctatatttatggaacccgcatctggagaactaagactgaatatcacaatcttgctttacgtttgattcttggggtaatattctctcgggtacagtaagagtcttgcctgttttaaaacgaaaaggttaaacatttctcttttttttttcttgttgcaggtactgtgagactctatatcatgcagttgctaaattgtgcttgtgcttgttaacgctttggctatggaaaac

SEQ ID NO: 99551 - DNA, 715 bp, Glycine max
  Clone ID: PAT_MRT3847_6090C.1
aaaaacttgacgaaaaaaattacaactttcctttaataccctgcaaaatacttcatcgtcccccgaaactattttttccctgaagaaataggtttggtttctgagaggaagagtttgtggaatctagtgagagagagcagaggaaaaggggaagaaaaatgttgagtgcgacggcgatcggcgcgttattgggtttgggaacccagatgtactccaatgctctccgcaaactcccctacatgcgccatccgtgggagcacgtggtcggaatggggttgggcgcggtgtttgtgaaccagcttctgaaatgggaggcccaagtggagcaagacctcgacaagatgctcgaaaaggccaaggccgccaacgaaagacgttatatagatggagatgatgattaatgcatgtcttcaaggattgtagcatttggtgaaaataatcatgaaatatgttgaacttgttgcctttgttttctgatttcatagtgctatgtttgtaaggctgttaaacatcagactattttgtgcacatgcttttgaaagcagtgaaattgttgtaagtgataatgttctggccttgtggcttcattggtaataagattaaatccgacgatttgcttgactttatatcacgatatctgtgactccatttcgtcttatcaaatccgacgatttgcttgactttatatcacgaaaaaaaaaaaaaaaaaaaaaaa

SEQ ID NO: 99552 - DNA, 230 bp, Glycine max
  Clone ID: PAT_MRT3847_60910C.1
gtgtttttgacttcctcggtaagaaaaaggatgaagaagacaagcctcatcctcaggaggaggtcttcgccaccgagtttctaaaagtcactgtcttagaccaaggagagaactagcacagcctcttagttaagcttcaccgatctcacagcagctctagctcttcaagtgaggaggtaggagaagatggatagaaaaggaagaattagaagaaggaaaacaaagggctg

SEQ ID NO: 99553 - DNA, 3739 bp, Glycine max
  Clone ID: PAT_MRT3847_60911C.1
gccttcttcctcttctcttcttcgctctttcttttggaccctttcttttccctccttctccttcacctaccatttttagggttctctctccgatttcactctctcaatctacctaccccgatcgcttctgtttttcttctccacatttaaatctatttcgctctggataattattgcttccttcctcgggatcttctccatacctatcaattttgggttagcgagtgcgaatattcatcgttggagtgcctcggggcatgatcaatttttttggttcttgatttccttcttttctcttggtttgtgttgtcgttgagaactcgcacataatcttcttccttctcgattttcctctccttcgacgattcttagggtttcgcttcgttcaccaacgcgcgtggtttctcttctcttcacgattttggggtcgaaatttggagtttagtttgccggcatgtccatgagtgagcgcaagactattgacctagatcaaggatgggattttatgcagaagggcattttgaagctgaagaacattctagaagggcttcccgagcctcagttcagctcggaggactatatgatgctatacacgaccatatacaatatgtgcactcagaagcctcctcatgactattcccaacaactgtatgacaagtacagggaatcatttgaagagtacatcgtatcaacggtattaccttctttgagagagaagcatgatgaatttatgttaagagaacttgtgaaaaggtgggcaaaccataaaattatggttaggtggctttctcgtttctttcactacttggaccgctactttattgcccggaggtcacttccgccacttaatgaagttgggttgacttgcttccgtgatttggtttacaaggaattaaacgggaaagtgagagatgcagtgatttcccttattgatcaagaacgtgaaggagagcagattgaccgagctttattgaagaatgtattagatatatttgttgaaattggaatggggcaaatggatcactatgagaatgattttgaagctgcgatgctcaaagacacttctgcttattattctcgaaaggcttcaaactggatcctagaagattcttgtcctgactatatgctcaaggctgaggagtgcttaaaacgggagaaagatagggttgcccattatttgcactctagcagtgagccaaagttattagagaaagttcaacacgaactgttatctgtatatgcgaaccaactccttgaaaaggagcattctggatgtcatgcattactaagagatgacaaggttgaagacttgtcaaggatgttcaggctcttttctaaaatacccagaggtttagatcctgtttccagtatatttaaacagcatgtgactgctgaaggcatggcattagtgaagttggctgaagatgcagtgagtaccaagaaggcggagaaaaaggatattgttggtttacaggagcaggtttttgttcggaaggtgattgagctgcatgacaagtacctggcatatgtgaatgattgtttccaaaatcatacactttttcacaaggctcttaaggaggcttttgagatcttttgcaacaagggtgtcgctggaagctcaagtgcagaactgcttgccactttttgtgacaatattcttaagaaaggaggaagtgaaaaattgagtgatgaagcaattgaagaaactcttgaaaaggttgtcaagttgcttgcctatattagtgacaaagatttgtttgctgaattttataggaagaagcttgctcgaaggctcctttttgacaagagtgccaatgatgatcatgagagaagtattttgacaaaactgaagcaacaatgtggtggtcaatttacctcaaagatggaaggaatggttacagatttgacattggcaaaggagaaccaaacaagctttgaggagtatttaaccaataatcctaatgcagaccctggaatagacttgacggttacagttttgactactggcttctggcctagttacaaatcttttgatctcaatcttcctgcagaaatgattaggtgtgttgaagttttcaaagaattttatcaaacaaaaactaagcacaggaaacttacttggatttattccttgggaacctgtaatattagtgggaaattcgatccaaaaactgttgagctgattgtcaacaacttatcaggcttcggcattacttctatttaattcctcagatagactgagttactcagagataatgactcagttaaacttatctgatgacgatgttattagactgctccattccttgtcatgtgccaagtacaagattcttaacaaggaaccaaacacaaaaacaatatcttctaccgactattttgaatttaattcaaaatttactgacaaaatgaggagaatcaagattcctcttcctcctgttgatgagaagaaaaaagtaattgaggatgttgacaaagacagaagatatgctattgatgcctcaattgtgcgtattatgaagagtcgaaaggtgttaagttaccaacagttggtaatggagtgtgttgagcagctaggtcgcatgtttaagccggatgtcaaggcaattaagaagcggattgaagatttgatctctcgagactacttagagagagacaaagacaatgcaaatttgttccggtacttggcttgatgtggtcttgacgattttgcaaaagaagtggtggttactgcattcgatacaaacagcaaaacaagagcatcatatttgaacatgcaaaatatcagtttctccatagtttccttggaaggaggagctgcgagtgcttgtacattttgcctccatatccaggtatggattactgtagatgtgtgctcctgttggagaagttgtaatgaattccataagtagggccagctcactggtaccttcacttccttttccttttgattgctgcagttccatatgatgacaacttagttgatgcctgtgttaattatttcacccaacccccataaaggaaatagaaatcgtgtaacactagtttcagttaaattgtagttttattgtcgtcttcaaaaccatcaagtgaatgggtatctcaaggatttcaagattgtgcctgtcgtcattgtcgccttttattacgtgttcttccggtgaatgctttatatgataattccgaggaaatggatcttatactttcacatctcgggatatttggatttgtcatactaagacgtgacagaataatattatactttcaagttttttttttcctgcaaaactcaaaagtatactctccctttttgtgttgtggcaatggaaacttattttgggtgccttttggggggtctttgacccccccccccggcgccggttttgtatttcgggggggggcgctattataaaaaaaaaaaaaaaaaaaaaaaaaagggagaacgacaactaaagagctaaaaaacccagaaaattaattaacaaaccaaaacactacaagtgtccaagacagatcagcaatcaaaaatgcaaactagtgcgaataccaatcttgttaagcaatctgcatccgctcctgcgcaataacatgtgtagcttcttaaagataattgtttttttctatcaagttttgttgttcctccccataatgcacctcctcaacatcctccacaacagggtttgccacctcccccccttcttccgaaccaattctctcaaaaaaaaatccctgctagatatag

SEQ ID NO: 99554 - DNA, 738 bp, Glycine max
  unsure (1)..(738): unsure at all n locations
  Clone ID: PAT_MRT3847_60912C.1
ccacgcgtccggacaagtcttgtttgctgaattctataggaagaagcttgctcgaaggcttctctttgacaagagtgccaatgatgatcatgagcgaagtattttgacaaaattgaagcaacaatgtggtggacagtttacctcaaagatggaaggaatggtcagccatttctaatcttcgtaaacagaagctgatatgctataatcaacttttttggtgagttgataaaagaaaatttaaatgcttttgctttgctaccaggttacagatttgacactggcaaaggagaatcaaactagctttgaggagtatttaagcaataatcccaatgcagaccctggcatagacttgacagttacagttctgactactggtttctggcctagttacaaatcttttgatctcaatcttcctgcagaaatggtaatctggatcttcttgatataaaaaattagtgcccagactttggttataactaataccgtcctatttattcctttttctagattaggtgtgttgaagttttcaaagaattttatcaaactaaaacaaagcacaggaaacttacatggatttattcgttgggtacctgtaatataagtgggaaatttgacccanaaaccgtggagctgattgttacaacctaccaggcttcagcattactgctttttaatttgtcagatagactgagttactctgagatatgactcagttaaacttatctgnacgatgatgta

SEQ ID NO: 99555 - DNA, 619 bp, Glycine max
  Clone ID: PAT_MRT3847_60913C.1
tctagtcatcagggatcatttagaagctaaaaagccgcattcaagaagtataactccaaatgtagcagattcattaagattttatacaacattacagcaaactatatatatagaacacatacaattcatgatttcattaaataaataagaacaacgcaaaatttataacataccaagatgatagttttacaaaatcaaccattgcaccaagaaaaacatcaagcattcttatttttaacccctgaaggagaggacttgaaccaaggtatccacacagaagttgtattctgatacaccctaaatgcttctgctctactttcttgtttcaacattcggtcctccacaagcctagtcacataagccaaacacatagtattaacaaaagctccaatgaaggtccatcccactcccaggctccatgcaaacacaaccagcccccaccaccacagctgctcgccaaagtaattcggatgtcggcagtaataccacaagccactgtcaaggaccgaaaccacgggtttaccaagccccttcagcttgttgtttctactcacaaactcatagagctgtgtatcagcaaaatatgctataacaatgccacatgtgggacttggagtag

SEQ ID NO: 99556 - DNA, 1637 bp, Glycine max
  Clone ID: PAT_MRT3847_60914C.1
gccaaacccgtctttgtatttttacacttttttcgttttctctctcttatcatacaactgttactattttttcttgatattctcactttctctctctctctctttctctctcttatggggtagcgcactggttgtgctccttcagctgaacttcttcgttgcggcactgagtgaggtggttcactctatctgcctctttcgttgcgcggtacgtagcaaaaataaatcaggtttgagtatcaagggagggaaaatgggagaaataaggaagaaggggtctgtgacctcacccgcctccctctttccagtacaggaggctcaaaggtcggacaagcgcgtggaaaacgcccttcccgacaagcagaaggagccagtgcgcccaagaagtttcaccaccgacaacaacaacctcatcaacctcgtccacaagctccccgaacagctctcccacgacatcatggttccgtttgggaaagcagcgttcttcccaggtcgtttgattcacaccaatgagttcctggttcttttgggagaagggtattatgctgagagaacttcaaagcaaaccgttgagattttgcagcgaagagggaagtccttggattcgcaggttgattctcttgaggccaatatcaaggaccttgaagcagaggcttcatttttcaatgccacagcttctcaagtagcggagggtcttgtggagataagggaagattatctggagaaagactctaacgaaggggaatttaaatcatttcatctgcagcaggcaactcctaatttgggaaatgctacagctgatgatggggtgcctgctcgtatgctggctataatggatgaacttgaaaaagaagagcttgctgcagaatttagcgctgaaatgcataattttgatgatggtaattgggatttccatgatatatcatatcaggaacatattgataacaaactccaaaattcaaaagatgttcatcaaagtgaactactggaccagattaataataaaattataacagctgatcttccaaaaaaacagaatcgtaaagaagatataactgatcagttgaattttgctagcctggcagtagaatctagggtcaaagagagggaaaattttgtagaatacattgatcctagtgaaaagattcctgctcgttctaaagaaaggtcagttcaagcaactacggcatcaaaaactgaggttcgacaccaaacttcacaaccatcatttgacagtcgcaaggcttttacaggctctattatagagcatgctgagaatataaaaccaactacaagacaacaaagttcagcttcttcacaggattctggttctcaatcttcaaaaccagtctccagattcaaaatgcagagaagatagctacaagaagatgagaaggttggatctttttgtatttggcgatctaatggtgtagcatccatgattctaggatgtgctgcttgagatcaaaagtagaaagagtaacagtgggataaatcgttttgacttttgagcaacaaatttttggacctttaaacaatgattgtggttcaaacagacttagctatgttttatagaattgaattgagatagtgtattttaatatattatttttgaaccgtgagctgtatagcattcg

SEQ ID NO: 99557 - DNA, 776 bp, Glycine max
  Clone ID: PAT_MRT3847_60915C.1
ttttttttgaaattaaacccaacatacacctttagttaaaaccacatttaagtttgatgataaaaacataaaattacgtctacagtttcggaagacaaatatatacataaatacaggatttggattatatatatttacagttttaatgagttgaaatcggcatgggtatattcatttacaattttatcattatttgctatctaccttgcatgtctgtgacagtaacattgttgatggactgtgttctgtggttctgtcgagatgactccgcagacgatacaatttgcctatcgacaaatgcaggatgtgatggccgaggaagattgacaatctcactattgagcattgaaactactgtagccataattggcctttcggttgcaagattttgcaaacaaagaagtccgatgtgtatgcatctctcgatgtcattcacatgatttggattagatatttcagggtctatcacggattggatgtccttttcattccataatttccaagcaaatcctaagagactcattgattggtcatgatcgtaatagctactgatttttctcccactaataatctctagcaacaagactccaaagctaaagacatctaatttctcagaaaccagtcctcggaatgcatattctggaggcatataaccaaatgttccaacaacccttctagtattggtctgtatatcattgcctccaaagattctagccataccaaagtcagatatttttggatttagctctccatccaacaagatgttaccctcgtgc

SEQ ID NO: 99558 - DNA, 912 bp, Glycine max
  Clone ID: PAT_MRT3847_60916C.1
tcgtttcacttttttcgccttctctctcttatcacacaattgttactatttttctcttgatattctcactttctctctctctctctctctcttctggggtaacgcactggtcgcgctccttcagctgaacttcttcgttgcggcactgagtgaggtggttcactctctctacctctttctcttctctcttcctagaaacaaaccatcattttcttagatctataccaacgacgaaggaaataatctcttgccaaaagcaaaaccctaaacacttcctccgagtatttaccagaaccatagtttttaaaagcagagagcgtcgaaggcacagctgtcatgtgggaaggtcccaatgtgtgctagaaattataaagatcattgacaccattgccgaagaaggggtctgtgacctcactcgcgtccctcttcccacatttcaactttcatgttcattaacttggtagtgggtggtaggttcccgttgggaaagcagcgttcttcccaagttgtttgattcacaccaatgagttcctggttcttttaggagaaggatattatgatgagagaacttcgaagcaaaccgttgagattttacagcgaagagggaagtccttggattcgcgggttgattctcttgaggtcaatatcaaggaccttgaagcagaggcttcatttctcaatgccacggcttcatttttggttgctaggttcttttgggagaagggtattatgctgaatttttaatgctgaaatgctgaatttgttctatgtaaattcttccattaaaaatattaggaattttgctttttgatctcaaacgtgtagagagactggagagcctttgactgtcaatttttatgtgtacaatggaagcaattttttatgttaattctgcagttcaattcaacttct

SEQ ID NO: 99559 - DNA, 362 bp, Glycine max
  Clone ID: PAT_MRT3847_60917C.1
ccactgaaaggggaaccgtgaaccaaaaggttactctagaaaggtacagggatttcataaagccagacatgaatactgctaacggcaatcttgcaaagcaggctatggtgataattgctgtacgtaataacttctagatggatactttcaagccgatgaacgagttccttgagctaatgtaccttaggaatcactgatcaagtatgagtgacaagccaacaagataactgctgaatactattagaccttggtcatgtattatacatcacagattttgcgttgttgtaacgtgctacatagatcactcattatgtaaatgggactgtgctaagcattgataaaaaccattctacaaaagctag

SEQ ID NO: 99560 - DNA, 219 bp, Glycine max
  Clone ID: PAT_MRT3847_60918C.1
ctcctttttttaagcatgggagctctcataacagcatactcatcttgtgtggttagcatggctcactcaatgtgtgggaacccaactccctggcatcataggccactgctgtgacctctaaccccctgctgcccaataacaataaaatcaattaacacagggttatgattctatattctgctaagaagaactccaaattaacagctgaagcaacacctc

SEQ ID NO: 99561 - DNA, 102 bp, Glycine max
  Clone ID: PAT_MRT3847_60919C.1
atgaattttcacgggtctgaaaatgctgggaacaagcaacatcaaaatattgcttcaaatggcacctctagcgtagtggactaacatggatgggagaaacct

SEQ ID NO: 99562 - DNA, 600 bp, Glycine max
  Clone ID: PAT_MRT3847_6091C.1
cccacgcgtccggtcggctgcgagaagaggagagaaggtggaatctagtgagagagagcagaggaaaaggggaagaaaaatgttgagtgcgacggcgatcggcgcgttattgggtttgggaacccagatgtactccaatgctctccgcaaactcccctacatgcgccatccgtgggagcacgtggtcggaatggggttgggcgcggtgtttgtgaaccagcttctgaaatgggaggcccaagtggagcaagacctcgacaagatgctcgaaaaggccaaggccgccaacgaaagacgttatatagatggagatgatgattaatgcatgtcttcatggattgtggcagttggtgaaaataatcatgaaatatgttgaacttgttgcctttgttttctgatttgatgatgttatgtttgtaaggctgttaaaactttttcgtgctaatcagcctattttttgcacaagtttttgcaagcagtgaaattgttgtagatgataatgttctggcctggtggcttcattggtaataagattatcacgatatctgtgactccattacgtcttaaacccaaaaaaaaaaaaaaaaaaaataaataaaa

SEQ ID NO: 99563 - DNA, 365 bp, Glycine max
  Clone ID: PAT_MRT3847_60920C.1
gaatcatcaggctggaaaactcacgagcgtgctctgtgctgttacacttgggcgaacagagatacagtgtgttccatggaggctctacactacagtttgacaaggccaggctgatgaactcgtgaatgaaggactcatgctagttgaagaaaggacgagacctccatgagagggggggtgtgtgcctatcccctcgctttgagggagaccacgcgatacagagggacagagaagcctggctggcacagaggccaactgtgcgagacgcccgtgaccagattagagagcacaagaggccccaggacaagccgctagagattcccctgaatgatgtgaacctgattggagatatagaaaatgggcct

SEQ ID NO: 99564 - DNA, 1207 bp, Glycine max
  Clone ID: PAT_MRT3847_60921C.1
ccacgcgtccgctttttctcaaacaaacgacgactttcctttcctgctgcgttcattccaaattccaaacccaccataatatctagcttcttgtgaaggctgttagtttgatttagaagttgatattgataatttgctgtgatgggtggccaaaggagtggttatggtaagcgtccccactctcaatctgaccatgataatgggccaaataaaaggaggaatcatggtgatgacagagagcagtttgtgattgatttggaggatactgtgtatcgttacgtgtgcccgggtcgaaagattggcagtgttattggtaggggaggtgagattgttaagcagctgagggtggagactaaggctaagattaggattggtgagacggtgccggggtgcgaagagcgtgtcgttactatttatagtcccagtgatgagactaatgctgttgagggtggtggcaactatgtgtctccggctcaggatgctttgtttaaggtgcatgacagagtggttgccgaggactttcacggtgaccaggatgatgatggaggccaacaagtgactgctaagctgctagtgccatctgatcagataggttgtgttattggaaaaggtgggtcaatagttcagaacatacgtagtgaaacgggggcccagattcggatactgaaggatgatcatttacctttgcgctttgagctctgatgaacttgtgcagattactggggatgcttcagttgtgaaaaaggctctgtgtcaaattgcatctcgacttcatgacaatccttcacgatctcagcatcttcttacttctgctgttcctggtgtatatcctgccggtggttcactcattggtccaggtgctggagctccaattgtggggatagctcctcttgttggtgcttatgggggatataaaggtgacactggtgactggccgccgcggtccatgtactcagctccaagggatgaggcatctacaaaggaattttcagttcgattggtttgtccaacaggaaacattggaggtgtgataggaaaaggtggtatgataataaatcaaattaggcaggattccggggcaacaatcaaagttgatagttcaacaatagaaggggatgaatgcttaatagccatttcgaccaaaaagttctatgaagagacttcctctccaacaaaagaagcagccgtgccgttgcaccctccatgc

SEQ ID NO: 99565 - DNA, 224 bp, Glycine max
  Clone ID: PAT_MRT3847_60922C.1
tccggtgggagagagaccacagaggaggcttgacactttgggcaaagatacatatggggctagtcatcaactaactcgagcactccacattatatatacagctgcatgcaacaacatgtaaatgacactgctctacatcatgttgtaacgtctacctactcatacaagtgagtgtgtgttgctatataactggtgattgctgtaggctaagcggagcatctata

SEQ ID NO: 99566 - DNA, 487 bp, Glycine max
  Clone ID: PAT_MRT3847_60923C.1
tcttggacatgcatggagactctggactgaaggaaggccaacagacctgatggatgcatttttatgtgaaagatgcacttcttctgaagttattcgatgtatacatgtaggtttgctatgtgtgcaacaaagaccagaagataggcctgatatgtcagctgtggttctgatgttgaatggtgataaattgttgccacagccaaaggtgcctggtttttaccacggaagtgacaaagcatatttgtctggaaagttcaaatcattctcttacaatgatgtttccctaacagttttaggagcaagataaagatgaaggctaaagaaaatgaaaaggtttatactttataatataaattgtaggcaaagttattgtattttgcttgaccactcctcaacttgtagttgttgtatatctagtttcattgttctaaggagaattggtaatatctgcaaataatgtttaacatcccttcctaaaaaaaaaaaa

SEQ ID NO: 99567 - DNA, 236 bp, Glycine max
  Clone ID: PAT_MRT3847_60924C.1
aattcggctcgaggagtgaacatctctttgtaacattcacaacaatctcactatgaaataaatcacacagaaacaagaaagagctggggatatacataacgttgggatgagacttccatccagcttgcgtacagaagaaacctttggctactcatgctaatcccagacaaagaaagtgtccactagacctaatacaacaccgcctgtaaccactcccatataaaccaagatgtcat

SEQ ID NO: 99568 - DNA, 451 bp, Glycine max
  Clone ID: PAT_MRT3847_60925C.1
taggaagtgtgatgatgagagtcatcattgcacatgcactcaggaacaggatactttgtgacatccctcccagacttgctagtcctgaattctggctgacctaatgaatcctgatgcaattccttgataatcctattgaactcttcttcggggagggaagaatccagaaaataggggagcatctgtcttttgtttggggttatatatttcttgtgtcctgcgtaggcccggtgaccctgaaataacatttagtttcaataattatagaaattgtcacattaagaatatgagttattacaatataattatagaaacggccatctatattacttatataaatctttatacctgaagtgcatggcccatattgcctccatgagatggcatgaaaccatgagttttctcagagcttatgtaatcaatggcagccattagagaagctttatttgca

SEQ ID NO: 99569 - DNA, 376 bp, Glycine max
  Clone ID: PAT_MRT3847_60926C.1
tacagctgtgagaacacgacagaaaggaatagataccttacttcgtgttgattgcttttaaaactcctgagctactacaaactctcatcttgcctctttgatacccctgggggggggtgatctacgaaaacatcattgctttgatcatcatggctgtcttgaactcttttgccctcacaaacgacacattcaacacatgctcacatcttctttcaaagctcttttgagaacatgctggactgtaaggttgcgtggccataatattctgtgacaaaacacgggcatcagctaatgctccacagccaatgcttgaaaattgactgatactcatcctaattgttgatgcatgcatagcatgatacttgactcatctgta

SEQ ID NO: 99570 - DNA, 205 bp, Glycine max
  Clone ID: PAT_MRT3847_60927C.1
ctaggaaacacgctcaacaactcttaaacgagatcgggtgatggacttatctccattgcacagttaaaacaaaacctttcgttctataatgccggcgcacacaggaaaatcaaacacaatgaaacaatttgtctctactttctggggaaaaaagtggggattgtgttattacacactcaatgtcaccttaagttgctactcccaa

SEQ ID NO: 99571 - DNA, 419 bp, Glycine max
  unsure (1)..(419): unsure at all n locations
  Clone ID: PAT_MRT3847_60928C.1
gtctctctctctctctctctctctctctctctctctctctctctctctctctctctctctctctctctctctctctctctctctctctctgtctctctctctctctctcggggaaacgcaatatctatttctatagcgctctctccacctgcccgcacacgcgcgcccgccccccccccctctccctcactctcacactcgttttctatctctctcggtatccatgtgtccgtgtttgtgtgtgtgtgtgcgtgcgtgtctgtgtctctctctcccactcacactcactctctctctcactctcacactcacactctctctcgcgcttgcgcacgcgctctatctttttttcttttttgccttngcgggctcgctctgtctctctctctctctcacacacacgctcgcgctctcgcgct

SEQ ID NO: 99572 - DNA, 773 bp, Glycine max
  Clone ID: PAT_MRT3847_60929C.1
gtcacttccgattgttgcccaggatgcaaaagccccctcatacttcattcggaacactgcaaatttttctccttccgtttggggcgattatttcctttactatgttcctatttccgtggtaggtgcatatcccctcccccttgtctaatcttatatttgattagatttaaatatgtctacttaaagatatgtaacttgttaatacacttatgcttaaaaaataagtatctgtataggatctgctaatgtacacgccgggacggaaccacatggtaaggcacagggcagtcccccccccccccccccccccgtcgtcatcgttcgaatattacaatatatgttcaaaacctgttggagtaaaaacattaagtaacgtgtctagttcttttacttggtgcttcttttgctttgatttcattttgtagattttatttgtattaataattaatagttttatacattaggcagatagaatatacgctgattgctatagttgtttttttgtcattaattgttcaaatatattaattatgtctataactatttccttttacgtcaattgcttttgatcatttaatttatttggcagagtctcaattatattaattgcttttaaataggttttctcattatatgtttggttataaaaaatatattttataaataaattcatttgtataagaaaagttcatttaaactatggattatcggggattcaagtattaagactatgttggacaagatattttgggtaatttttaactatttttact

SEQ ID NO: 99573 - DNA, 532 bp, Glycine max
  Clone ID: PAT_MRT3847_6092C.1
aattagcaacgtctcaaatcgggatctgaaacaaatactaattacagccacatgtacaaattaataaattattgcacggacaaaacaaattaataactcgacactgttgaaataatgtatgcacaaggcaaatagccctttgattacttgagtagtaaaactccctatcaaacgctccataattttaaattgggggccatgtcacaatttttaataaccatcggggtatcatcttgactccatttgaggcaaggcatttcaggcaggtaggacacacttcaaaatttgacttactccctgcaaaaactcgtgaacattatcttcttacccaaatcaaggagcatcagtgtggggttaaaatggcctcaactttatttaatgatgcttgaagccgtcctgagggcatgttgaacattggcacttaagtacccaatgccccagtaatttcaggaaaaacatagtttggcctccatccaaaccgtaaatcaaaaccgggaaaacaagccaacgggaagttttattttcggattcc

SEQ ID NO: 99574 - DNA, 304 bp, Glycine max
  Clone ID: PAT_MRT3847_60930C.1
caaaactactctcagacaaaacttttaatttctgattttctgaattcctgatggtccactctaattataagagctgcaaacggtactaaatctaaagttgaacaaaatgtacatccaacaattcagtatttcgcatcaaaagtttctctttgctccccttaatatctagcatttccgctctcgaacctccaactggagatcaaacaccgcttcgtctgtcatacaaaagtatcagatattgaatatattttctatccaactgttgcacctaaaactcctgaccacatttataaacttgttccac

SEQ ID NO: 99575 - DNA, 339 bp, Glycine max
  unsure (1)..(339): unsure at all n locations
  Clone ID: PAT_MRT3847_60931C.1
attaaangaaaagccacagcccaaacaatattttttggcaacgaaaaggcccatttttaaattctgtgggaccaaaggctcacacaaaaaaattaaaacccgttagggggggttttgtcatgcctaagcttactgcactatatgctaaccacgccttcaaaatttgatccaccggataggggaacaacccaatttttaaaggcctgctctaacaaagggaatacgcatttttttctcttttacaaacccccagaggctttttcattcccaaaaaccttaaccttaagggactgggatgaaaaaacccccccactgcggggaaaggaggcacaccaaact

SEQ ID NO: 99576 - DNA, 652 bp, Glycine max
  Clone ID: PAT_MRT3847_60932C.1
aagaatctccaactcttactcaacgactcgatagactgaaattactataatcacgaatatctttgtacattctccatctcccttgtccatggcggcgatatccaagcccatgcacttctacaacgaactgataactgccgagaatgtcgtcgcttcttcccaatcttccttgtctagctagaggatcaaaagcctccctccgactgggatgaaaacgatgaaatccgtacatgaacttgaggtaccctactatcttcatgttcagtccatgtacaacatcgtacataccagaagcaccaatgaaatgacaatgtcccttgctgcgctatcgtgctatcatattgggtgtagacatgcctgaggatgatgacatactcctctaaagaaagatatattcttgtcaagagatcatgcatctactactattcgcaatgaggtagaatagaagttttgtagactatcctatggaacaggaagtggatttgccatttcaaagctgtgaaagaacattcaagtactttcaagttcctttgtcaataagcaagagcaatacactgtgcaaggagtgcagaatcttggagaccaagcagagatgtgtcatgacctaaatttcagaactgcagtattttactgccataaagcccgtgaaaca

SEQ ID NO: 99577 - DNA, 349 bp, Glycine max
  Clone ID: PAT_MRT3847_60933C.1
cgccaagaacacattctacactcttctctacttaacagaacctgatgatgcaccattgtcacaggaagtctaatactttttaatgaaaggatctataccatgcttgcaatacaatttggagcacggtttcgtgtaccgagagctcaacaggtcacctggatactatgatggacgctactggaccatgttgaatctgcctatgttctgctgcactgatgcttctgatgtgttgaaagagcttcaagaaagttagactgctttacttgttgggctcatgcgtataatctgatcttacaacgttcgcccaactgcgggcaattacttcatcacctactatcctcccggcttc

SEQ ID NO: 99578 - DNA, 515 bp, Glycine max
  Clone ID: PAT_MRT3847_60934C.1
agccgatgagtatgataaatcagactctagcaaattttgcttcaaagtctttgtcaatactcttatcggcttcagaggcgcgtgagaaccaatgaggtgaggaaaatttaacttagctttgctgccacgcatctcaaaagcagctctatcataagctaaacccgcttcttcttcagtttcgtaagtcccaagccatatcctagcaccattcttcttcggatctgttatttccgccgcgaacttgccccaaggtctacgcctcacaccccggtaacgcttccatgctggtggcgcgtgaacttcacgctccaccttagggtgttctcttttgcatgctaacgacccttctgcatcatggacaccttccaagcggaacgtagtagagcttgggaatgaattgtacgttggagaatagcaaatttcgtgattggaagcgttcatgagtgtgttggaatcgtgctcaagctcaagacgacagtggtgaatagattccactgaagagaaatcacaagata

SEQ ID NO: 99579 - DNA, 1848 bp, Glycine max
  Clone ID: PAT_MRT3847_60935C.1
cccggctcgagccactttcagcttcagtttctattgcatttctcaaagtctagttactcatcacagtaatcatttgcctccttctgagagacacacacatagatagatatgataacatagttatcgaaatggctgccacgtgttgcaacttcactcaagcttcttctagtttcaagaaactgcatgagaacattcagctgcagagctacttcacaaggtgccagcaaagatcaacgtgtagtgttgaaaaaaacttccataggggatatggaggaaggttgcaagttgaaagatggcatcaatatcagtatgtgttatgtgcaagaggagtggagttgtccccttctgtcaatgaagaagttggagaggagactgaggaggatatctcaaaggaaacgttgatttggagagccatcaagttgccaatttactctgttgcatttgttcctctcactgtaggcagtgcagcagcttattttcagacagggatcttctcagctagatgttattttgttctcctggcttcttcagttcttgctattacctggctcaatttaagcaatgatgtttatgattttgacactggagttgacaagaataaaaaggaatcagttgtaaacatggttggtagccgcaaaggaatcttcattgctgcctactcgtgccttgctcttggcttccttgggctgacttggactgctgttgtggaaagaaacttacgttcaatattgtttcttgtttgtgcaattatttgtggctatatatatcagtgtccaccatttcggttaagctaccaggggctaggagagcccttgtgctttgcagcatttggtccttttgccacttgtgctttttatttattacatgccagtgcaagggtgaagaaccatttcccattaagtggaacagttctttcagcatcaattcttgttggcttcacaacatcacttatcttgttttgcagtcatttccatcaggtggaaggagacaaggaggttgggaaaatgtcacctttggttagacttggcaataaaaaaggtgcagaggtagtgaaaggggcagtctttatgctctatgctcttttggttgcttttggtctaatcaaggcacttcctctcacttgtatatccctttgtacattgaccttgccgttgggaaacctggtagttagatttgttgaagacaattacaaggacaaaaataagattttcatggctaagtacttttgtgtgaggctgcatgctatgtttggagttgcactggctttaggactagtgctggctaggaatacaaaatttacatcatggccaatattgagttgaagattggcttgtcgaaagaggaagtaatgtagtgtactaaggggattgctcaagaggaccaaggatgcaagtctgcatggtgcaacagccattaagatttcggtcatgagcaatttttctgcagggggttttgaatcagttctcattttcttcccatttccgtggccaaataagattgaaagaaactgcatgacactgataccaatcaagagttgtgtgcagcaagcttacctcatcaatctcaggtcaggagatggttccactatctaggcacctcgttttaacattctccaataaaccttagttgatgcaacatttgctgcaaagaattttttgtgaaatcagaccacatgttgattcttttatttttgccaagaatctttgcaaattacagtggaaattggatttacaacatttggtgtaagttcttgaatgaaaatatatggcagctagccttggaaaggagttaaagagcaaaatgcttttatctttagtaattaatgtaaatttcaaaataaaaattctc

SEQ ID NO: 99580 - DNA, 292 bp, Glycine max
  Clone ID: PAT_MRT3847_60936C.1
agtcctgattaagccaactcatggtggcggtggaaagggaatgaggattgtacacgctccaaatgagtttgttgaatcgttcttagcagcacaacgggaagcagctgcttcttttggtgtcaacaccatattgttggagaagtatattacaccgcccagacacatagaagtccagatatttggggataaacatgggaatgttctgcatttgtatgaaccagaatgcaatgtgccaagaaaacacccaaaaataattgaagaagctcccacttccaatatttctggccacctt

SEQ ID NO: 99581 - DNA, 2481 bp, Glycine max
  unsure (1)..(2481): unsure at all n locations
  Clone ID: PAT_MRT3847_60937C.1
cccacgcgttctcccacgcgtccgtatgaaaggactattaaacttctcatttcggctccgtcgattaatgcttataataatactcacaaaactgcataaagctgcttctgtcgccgtggctggttcttcttcctcttttctctctctctctcttctctcagcttctgctgcaatttctttctctttttttttcttttttattttcttttggttacttgtttctgctttggcactagcaccggttcttgtctcccttggactctgaccctgttgttgccagctttgactcaagaagatgcttgtggcattgctcttgctggtggcattgagcaatgccgttagagttaatggagatggagggcaatgtggttccaacccaacactagaccctagaccacacagtgtctccattttggagtttggtgcagttggagatggtaaaacactcaacaccattgctttccagaatgccatcttctatctcaagtcatttgctgataagggtggggctcagctctatgttcctccgggaaaatggctcactggaagcttcaatctcaccagccatctcaccctctttttggaaaaaggtgctgtccttattggaactcaggatccatctcattgggatgttgttgaacccttgccttcttatggccgagggcttgaagttcctgggggaagatatcagagtttgataaatggatacatgttacatgatgtggtcgtaacaggtaataatggaaccattgatggcatgggaatggtatggtgggattggtatagcactcattccttgaaccacagtcgtcctcatttggttgaaattgtggcatctgattatgtggtagtttcaaatcttacattcttgaatgctccagcttatagcatacacccagtttattgcagccatgtacatattcaaaatgtttcaatctctactcctccagaatccccttatactgttggtatagtgccagattcttctgataatgtgtgtatagaagattgtattgttgccatgggatttgatgcaatttctcttaaaagtggctgggatgagtatggcattgcttatggcaggcctactgagaatgtacacatcagaagggtgcatctacatgcattttctggctctgctcttgcatttggcagtgacatgtctggtggcatttcaaatgttctagtggagcatgctcatcttttcaactcaaaaagtggcattgagttcagaaccaccaagggaagaggtggttatatgaaagaaattgttatgtcagacatacaaatggagaatgtccacacagcaattgctgccacaggtaattgtgggtctcatcctgatgacaagtttgatccaaatgcactcccacatttggatcacattaccttgaaggatgtcacaggtacaaacatttccattgctggaaacatagctggaatagaagaatcccctttcacaaacatatgcctctccaacataaccttgtccacaaattctgtttctccaattacttgggaatgctcaaatgtgtctggtttttcagactcagtgctcccagaaccttgtcccgaacttggcaacccctcatatgattcttcctcatcatgtttctacctgctgagtgtcagtggcaaaactgtagtgcagtgataataataatcctttctcaacagaagaagattcttattcttgagtaccctgctgcttgaagttgatgaaaaagtgaatggccatttcccatccaaagatttaagctacattcttttccaataagacagttgtgaggattattcattttttcatccttttagatttgcattcttgcatgttcctaccatcacattatttgtacagcttcttcatttcttcattcatgtgtaaggaaattttggtagtgccgccctcatatgactcaaaaagaagtttgattctatctgctgagtgtcagtggcaaaactgcactgcagtgataacaatcctttctcaacagaagattcttattcttgagtaccttgctgcttgaagttgatgaaaaagtgaatggcgatttgccatccaaagatttaagccacattcttttccaataagagacggttgtgaggattattcattttttcatccctttatagatttccattcttgcatgttcctaccagcacattatttgtacagcttcttcatttcttcattcatgtgtaaggaaattttggtagtgccgccacaggaggactcaaaagaagtttgatagttttttgcattagttccattgtgatttcactgtaaagcatgtagtggatttggtgatacttcaattaaagaaagttcaactttttgttatcgttaaaaaaaaaaaaaaaaaaaaaaaaaaaaaaaaaaaaaaaaaaaaaaaaaaacaacngggcgggcgcttaattgtatactcgtcaggccggaatttaatttcgtaccgggccctgccgggatataaacatatccct

SEQ ID NO: 99582 - DNA, 700 bp, Glycine max
  Clone ID: PAT_MRT3847_60938C.1
cagtcatttccatcaggtggaaggagacaaggaggttgggaaaatgtcacctttggttagacttggcactaaaaaagggtgcagaggtagtgaaaaggggcagtctttatgcttctatgctcttttgggtggcttttggtctaatcaaggcacttcctctcaggtggaaattcctgtgtgcattgaccttgcagatgggaaacctggtagttagatttgttgaagtcaattacaagaccaaaaataagattttcatggctaagtacttctgtgtgaggcttcatgcattgtttggagttgcactggctttaggactagtgctggctagaaatacaaaatttacatcatggccaatattgagttgaagattggctggtcgaaagaggaagtaatgtagtgcactaagggtaagcgtgaaagaaactgcatgtcactgaaaccaatcaagagttgtgtgcagcaagcttacctcatcaatcccaacgcgtcaggagatggttccactatctaggcgcctcattttaacttacaccaataaaccgtagttgattagcagcacgaaaacatttgctgcaaagaattttttgtgaaatcagaccacatgtgttgattcttttatttttgccatgaaaattggatttaccatatttggtgtaagttttttaatgaaaatatatggcagctatccttggaaggagtt

SEQ ID NO: 99583 - DNA, 657 bp, Glycine max
  unsure (1)..(657): unsure at all n locations
  Clone ID: PAT_MRT3847_60939C.1
ggctcgagaatttggaaagccgtaaaggaaccttttattctgcctacttgtgccttgctattggcttccttgggctgacttggactgctgttgtggaaagaaacatacgttcaatattgtttcttgtttgtgcaattatttgtggctatatatatcaagtgtccaccatttcggttaagctaccaggggctgggagagcccttgtgctttgcagcatttgggccttttgccacttgtgccttttatttattacatggcagttcaaggttacctcagctacctaattagaatgtcttataatatttgatttttcatggttttgatatggaatgatttggacagtgtgatgaaccatttccccttaagtggaacggttctttcagcatcaattcttgttggcttcacaacatctcttatcttgttttgcagtcatttccatcaggtggaaggagacaaggaggttgggaaaatgtcacctttggtacctgcactttctttaaattgaacttttttctaatccatgttaatgatgtgaatctacctatgttacttattntccatttctctttcangttagacttggcacttaaaaaggtgcanaggtagtgaaaggggcagtctttatgctctatgcttctttgggtgctttggtctaat

SEQ ID NO: 99584 - DNA, 240 bp, Glycine max
  Clone ID: PAT_MRT3847_6093C.1
gatccttatactttaactttaaaggtccaaagaccaataggtaacaattatttgaccaagaaacaaagttagaaatttttagtaaagaaacgcagccccgggatttttttgaaagggggggaaaaaaaaactcttttaaaaaaggggggtaaaaaaaaaacccttggaaaactggcccgcaagagaatggaccatagatcggcggcgccggggaaaagcattacctagctaaggatttta

SEQ ID NO: 99585 - DNA, 251 bp, Glycine max
  Clone ID: PAT_MRT3847_60940C.1
aatctaccttctttaaagtaaccatcatttaatttctcttatttcctttttgtggattaaagcctcattttccttcttggcagcttataatattcccctagcccaagattgcttcaaagtacacactaagagaagtaaaaggttaattattttatctttagatggcatcatcttggacgccaaggcaaaacaaactatttgaagaggcccttgctatacatgatagggaaactcctgacaggtggcagaat

SEQ ID NO: 99586 - DNA, 2083 bp, Glycine max
  unsure (1)..(2083): unsure at all n locations
  Clone ID: PAT_MRT3847_60941C.1
ggctcgagagaagatctatctatggacaactgaatcaagcaacctctgaaatttgaatccgtccatgcctatagatgtctgcgattgcgatcttaccctttctactccacgttctaatggctgcttcagaatcagaaccttttcaagacagtattctccagtgcctctctctctattctgacccctctcttccaaatccaatctctgctgtcacctatttccccaacagcccctcataccctcccatcttagactcctacatcagaaacctcagattcagttcctccacaactccaaaaccatccttcatagtggcaccaacccacgtgtcccacatccaggcctccatcatctgctgcaaaagcttcaaccttgagatcagaatcagaagtgggggccacgactacgatggcctctcctacgtttcagaagccccatttgttattcttgacatgtttatgctcagatcagtcaaagtcaacttggatgatgatgatgacactgcgtgggttgactcggggtcaacgattggtgaactctatcatgcgatcgctgagaggagcaagatccatgctttcccagctggggtgtgtcacagtgttggtgttggaggacatttcagtggaggaggctatgggaacatgatgagaatgtttggtctctctgtggatcatgttttggatgcaataattgtggatgctcaaggtagagtcttggataggaagttaatgggggaagatcttttctgggctattagaggaggtgggggagctagctttggagtcgttgtgtcgtggaaaattaggttagttcctgttcctgaggttgtaactgttttcagagttgaaagaacattggaacaaggtgccactgatgttgttcataagtggcagtatgttgctgataagttacatgatggcttgtttattagagtggttcttagttctgtcaaaagaaagggtgtgaagacaataagagccaagttcaatgccttgttccttggaaattcacaagagttgcttggtgtgatgaataagagcttccctgaacttggtttggttgctgaacagtgcattgaaatgagttggatcgattcggtgttgttttgggacaactatccagtggggacttcggttgatgttttgcttcaaaggcataatacacaggagaaatacttgaagaagaaatcagattatgtgcagcaaccaatttccaaaactggccttgaaggtatatggaacaagatgatggagctagaaaaacctgctcttgcattgaatccctatggtgggaaaatgggtgagatttctgaggtggaaacaccgtttccacatagagctggtaacatttataaaattcaatactctgtgacttggaaagaggagggtgaagatgttgctaacagatatctagatcggattcggaggctctatgattatatgacaccttatgtgtcaagttcacctagaagttcatatatcaactatagagacgttgatataggtgtcaatggacctggaaatgctagttatgcagaggctagagtctggggtgagaagtatttcaaaagaaactatgatagactggtagaggtaaagaccaaggttgatccaagcaattttttcagatatgaacaaagtattccatcacttgcatctggtctaagcataatgtcagaatagaagatgccttcaagatgtataaaataaaaggtttgattcaggacaaaaagttatctagaagcaagcatgtcttggaaaaccagttcagacttacgtacaagtgtgccataaaatttgattggttagagaattatttgttgtgcaattgtattttcccttattaagggactttttttaacttcaattctatactaagattgctgctnaaaaaaaaaaaaaaaaaaaaaaaaaaaaaaaaaaaaaaaaaaaaaaaaaaaaaaaaaaaaaaaaaaaaaaaaaaaaaaaaaaaaaaaaaaaaaaaaaaaaaaaaaangggggggggccccccaatttggggccttcccccccgggaaattattccgggccgggccccgggggggtcccaatttttctttttgggg

SEQ ID NO: 99587 - DNA, 267 bp, Glycine max
  Clone ID: PAT_MRT3847_60942C.1
aactattgtaattttctaacttctttaattttttaccacaaactcatctccgggctccgtgttatttcacatcctttactcaacaaacaacagccaataaatcatataaaaaaaattaccatcttttgtcggatccgaaccaaatgtatactctaaatcaaattatctacttaatcctcattttactatatatgtcatacttgtttcaaatctatctaaaatatacacttaaccttggctgttacaaaaactttcttctttagaatt

SEQ ID NO: 99588 - DNA, 390 bp, Glycine max
  Clone ID: PAT_MRT3847_60943C.1
aattcggctcgaggtccgatcttacgttgttgcctcgcagacgcaacgggcaaaagaagcgcctaactttggacagcacaagggttacccggtcattgaccatgagttcgacgcggttgttgtcggtgctggtggagccggtctgcgagccgcgttcggtcttgccgagggaggattgaagaccgcttgtatcaccaagctcttcccgacccgatcgcacacggtcgctgctcagggtggtgtcaacgccgctctcggtaacatgacggaggacgactggaggtggcacatgtacgacacggtcaagggatcggactggctcggagaccaggatgctatccactacatgtgccgagaagcccccaacaccgttgtcgagctggagcacta

SEQ ID NO: 99589 - DNA, 319 bp, Glycine max
  Clone ID: PAT_MRT3847_60944C.1
ggctcgaggactatcgggcatgaggcaactgtgtttacgcttgggctgcctgagaaacggaccaggggctgtccgcttaaacgtgatgccgcaataagatagctttctctgcgactgtatctgaaactgatgacgacgtgtcggctacctctgcgggtctgatgctgaatgtatcttgtacagaagcttgtgctggtgccacatccacctgaatagcgccacactttgcctaaggagatgactcttatggctgcatatcctgctaagccttcaaccaaggcacaggtggtcggttggccacctgtgctgtccttccgga

SEQ ID NO: 99590 - DNA, 309 bp, Glycine max
  unsure (1)..(309): unsure at all n locations
  Clone ID: PAT_MRT3847_60945C.1
ntnnnnttnaagangtcgcacgcacgcgtacgtaagctcggaattcggctcgagncgcgttcctagcacagggctcgctgttgaacatgcgatctttcctgggagtcagtgcaccgcatgcagcacctcanggcccacacgtgaccgcaccgccacctccgcagctgcctgtccaggttgccacaggggtgctccatggtgagaaagcctcggcnagtagcagtcctgcgcttggcagagagagacctagtcaccaggccggattcgcccccacagcagctaaagtcgcccttccagccggtgcgcgat

SEQ ID NO: 99591 - DNA, 661 bp, Glycine max
  unsure (1)..(661): unsure at all n locations
  Clone ID: PAT_MRT3847_60946C.1
ggctcgaggattcatcgtgtccttaaaataaaacttttgaattcaaatgagatctaattagtaattaccttatatatatatatatatatatatattgaccaattaacaatctgccacttttaaccatgatcattatttatatatatacgtacaatagttttgggcactggcgatgggaataaagtagtggtccactgctacatgtatgaacttagagctatgattaatgtcaatgaagttattacttaaaaatgttaatacaaaattgaggcagacttcattccttttttttaataagaaaggggccattaggattttgaacttagaattttgttcaagctgctctttccatttaggtcgatcctagtgaatttcaaaacttatagctcatttctatatactgtctattatagtagacatacctgttttaccacacaatatttaattctaattctcttattccatgaacgaacacactataattaatacatgactntgagaaagagattatgtgttaaaattctcttactaaccagaattaaccattnnatattatcaatcanaagaagaaattanaaaaatcaacctcagaatcttcattgtaaatatttatatatatatagatatatatatatatatatatatatatatatatatatat

SEQ ID NO: 99592 - DNA, 708 bp, Glycine max
  Clone ID: PAT_MRT3847_60947C.1
ccacgcgtccgccaaaaccaatagcggccacatacctgcttgggtcgcggaccaccaaacctccgcgcccctatcaaccaacaaatccgtcgctcctagccacgaatccaacgaacaacctgcgacccctaactttccgcaaacccaagacgcaccacctacgaccaaacaccgcgcaccctcgttgatccgcatatctacgaagagaagagaggttgagcaatggaggggggcgagggaggagaggggttgaaccaggcagtgcagcagcagctaaatctgaagcaagtgaagacccgcgctatcagcctcttcaaagccatctctcgtattcttgaagatttcgaggcctacggtcgcaccaactctacccccaaatggcaagacattctgggtcaatattctatggtcaaccttgagcttttcaacatcgtcgatgacatcaagaaggtgtccaaggcctttctggtccatcccaagaatgttaatgccgacaatgctaccatactccctgtcatgctttcctccaaactactccctgaaatggagaccgacgacaccgctaagagagatcaattgcttctggggatgcaaaaccttccaattgcaacgcaaattgagaagctgaaggcccgtcttgatctgatttccgcagcctgggattgtgctgatgaagtgttggctgcactcgcaaagcctactggtttc

SEQ ID NO: 99593 - DNA, 364 bp, Glycine max
  Clone ID: PAT_MRT3847_60949C.1
ctgtggtatttgcttgatcttcaacaccctgtgatgctgggattatggtgcacatgaggttgtggtcaccgtacacattatcaacacgttctgtggtacgcccgaactttgcagtaccgagccctggagctggtaaggctgcatattccctggagtatggttttgtccatgcatcagccatgaccactgatgggggatgaggcgcgcccttaagtacattgttgataatgtcaacctttcctttttcaatctcagcaatttcttggctaatgggcataagagcctcaaagaaactgtcttaatcgggccttgctttccctctcaagaagggttcatcattaagtgtggccatgctccgcgccca

SEQ ID NO: 99594 - DNA, 350 bp, Glycine max
  Clone ID: PAT_MRT3847_60950C.1
acaagaccgccgctcatgcttcttattaggcgcgggcatgaaaggacctgagtgcacaggtctctagcgttatgctacacttctcatcatgccagaggaggctgcttaacagattgttgcacgcgaaccccacctatctctatgtagctgagctacagacgccaactgtattcttaaagtgctcgggaccacctaagactggaccggagtacacagagccgtgcagatcgtaccttgggaactattgatctacttctatgagaaagaaagatgcgcctgttgattgacccgtaatgtcctataagcccctggcagcactgagagctttatctggctctgcatggctgctt

SEQ ID NO: 99595 - DNA, 338 bp, Glycine max
  Clone ID: PAT_MRT3847_60951C.1
gggagaagttcgaaatacatggaaacagggcacggtaaaaatacttaaacgtaacctccctttcccgaacatgcaagttacaacccccgaacgatcgcaacacctatttattcacaaggcgccagactaaactaccccaggcaaaggccccgcaccacaactacaatgggcgtgtgtgttccgggtatacctttcaaccctgccctgtaagagagtggatacgaacaactatggggggaactgatccaacccaacaaacggcgcaaattttgccattcctcggagtggtctctgtaacaagacagaaatccgtgggggcaggctcttatgtggggggg

SEQ ID NO: 99596 - DNA, 283 bp, Glycine max
  Clone ID: PAT_MRT3847_60952C.1
aaaaaaaatctgtttttttaaatttcaacaggggccgcggcaaaaacaaataacaacaaaacattcatccacaccaccatcctccgaacatatcatcttttcattacctactaaacatacactctaatctacaaaaattcatcaaactcatcaatatttccatcatcatctcagctccattctaattcacttacccataatattaaccactcaaaccatcaaccattacaacaacatcaaattactcacccacaatcacttcataaaaccctctacctaatct

SEQ ID NO: 99597 - DNA, 324 bp, Glycine max
  Clone ID: PAT_MRT3847_60953C.1
ggctcgaggactgctacacctttgacacttgtttttcctgctaggaactggcgtaccttactaggggccatttgccttatcgctataacgcatattgtgttctctccaccggcatttgtggcactgaaaggtgcatttgacgacttttacggcttgacttgacgtgactatatgtactgggtggagtccctctgggtttggaatactgctacttacctccatgtaggggctattgcacctaccgggcagggcactgaggattcagatgctataacatccatgtggacatgtacctatcactatgtcgggacatgcgatctatta

SEQ ID NO: 99598 - DNA, 450 bp, Glycine max
  unsure (1)..(450): unsure at all n locations
  Clone ID: PAT_MRT3847_60954C.1
ttagagcgcaaggtaagcttacggttatgattttgtgaattagaagcctgaatttcccaattgatgtgtcatgcaatgcaaatagacttgtttgctataattttggaactgggggtggtatttttcatttaaaaggctgctggatgagtctttttattctcttcaaattcatatatttgccttttgaagttatattccatcatgattttgcagcaccacctatgtgagtattgtactcagttaagtgagttagagtgtggttttgacagctggcaactaactgattagaagcttgctctacaagtttgtattagttgctctgcaagtctcataggtctatataaactacagtgtaactgaatccatttgggaataatattagaattcacaatttcacaaactgttactctctctctctctctctttgnttatttctttctgattctacca

SEQ ID NO: 99599 - DNA, 829 bp, Glycine max
  Clone ID: PAT_MRT3847_60955C.1
attcggctcgagccctgttggatagaatggaggttgttgctattgctgggtatattactgatgagaagatgcatattgctagagattatctggagaagaccactcgtgaagcttgtggaataaagcctaaacaagtggaagtgactgatgctgctattcttgccctaatagaaaactactgccgagaagcaggggtcaggaatcttcaaaagcacatagaaaaaatttaccgaaagatagcgctacaactcgtgaggcaaggggaaatgattgatgcaaccgtggaaccaataaaagaaaatatagactctgatgaatttggtcaaaatacagttcaaaataagaactccgagttggtggagggtagtgatcctgaaaaagagggtgaaacctctgataaagttgacaaggtgcaaacagatctatcatctgatgaatctcaatgcctcgaggttgcaaaagaaagcgaggaagataaggaaattaaaacaaagactatagaaaaagtattggttgatgagtctaatttaactgactttgttggcaagcctgtcttccatgctgagcgcatctatgatcagacacccgttggtgttgttatgggtcttgcttggactgcaatgggtggttccacactgtatatagagaccacacttgctgaagaaggggagggaaaaggaacactgcaccccactggtcaattaggagatgtgatgaaagaaagtgctcagatagctcacactgttgccagagcaatactactggaaaaagaaccagaaaatcctttcttttgcaactcaaaactacacctacatgtccctgcatgggc

SEQ ID NO: 99600 - DNA, 137 bp, Glycine max
  Clone ID: PAT_MRT3847_60956C.1
caacaatcatctaataataacattaaagcctcgtggaagttaaaacaacatctttcacctcccatacatgactaattaataatacacaggaccttatttcatttacaataattatcaactaaaaggcttgattttat

SEQ ID NO: 99601 - DNA, 728 bp, Glycine max
  Clone ID: PAT_MRT3847_60957C.1
gctgtgtccgccttcttttatgtgtctaccacgtctgctctttaaccaaagacggtctaacttccgcctgatgtcagcgtgggtctgaacatctatggttccggtacttcaaccactgcgtctagattaacaaagcctacgttctctctgaccgtcacaaatatgagaactttcttgtccgctataggagtcaacatgaaaatagaaaaggtgcttgtccttatctggatgctaactactaagatctcgttaccagatatcatgactgcttggcgctattcttcactttgtccccgatagtataggtaatttcttgctgagaccattagatcacatcaacactttcttgctacacaactgggactgaaacagtggctaagcgtttgggatcccggctgttgaattgtgacactattgcgagcaaatcgctcgctctcatcttaactgtcagtaccatggttgaataacgttgagtaccatacaacatgatgactggaactcagtgatcattggtggtagctggacaagactagtcatttatgtcaaggctgcacttcatcaaaatgccattaccagacaacaggcttgatgcagcgtatgctactgaatccactttccatgctccatatgcttatggaagctataagcagattgttagagtgctaaatcctggacaatggttggccgcttatgaatggtgcatgaccgattcttttgatccccaaacc

SEQ ID NO: 99602 - DNA, 355 bp, Glycine max
  Clone ID: PAT_MRT3847_60958C.1
ggctcgaggttctagatcgcgagcggccgccctttattttttctttttttttttttttttgattatttcctttttttctattttctttcatagctttcttttctaatttaattcttccttctttttttttgactacaaccgttcggaggaaacagccctagactctaggcccacaaggatcatctgaggaggacactctaacccgcgggattgggactactaacgcttcacggaaattgcgaataattgcggggcattgctattctgcgaccgcgccccacctaggggccgagcgtccatcaagaagggaacagccgctttgagtgttgccaccatgtgaccaccaccccgcata

SEQ ID NO: 99603 - DNA, 1520 bp, Glycine max
  Clone ID: PAT_MRT3847_60959C.1
gcgtacggctgcgagaagagacagaaggggacatttcatttctcatcctttgtccagttacattgtcgatcaagacccattattctctaaaaagctgtctccaaattccgaaggcagagcagagaaaagaaagaacctttactttgaagagagaattaatggcgagtagtgttattccactgttggccatgattattgtacaattgggctatgcagggatgaatattacctcaaagcttgcaatacaatctggcatgcaccctcttgttctcgttgcttatcgccaaatttttgcaactatttcccttgctcccttcgctttttggttagaacggaatacggctccccgaatgacaaagcacattgcgttccagatattactatcttccttaacaggagtaacaggaaatcagattctatacttcttggggcttaaatattcaacccctacaattgcatgtgcactaaacaacttgctaccagcattcacttttattcttgctgtcctctccagacaagagtatttgagaatcaagactagggcaggggtagcgaaggccttagggacagtccttagtgtgggtggagcagtgcttttatcattttaccatggaaaagtacttggtctaggtgaatcaaagattcactggagatatgcagaaaacatgcaaagagaatcctcttcttctggtggtggaagaaaccatcttctgggccctgttgctgtaattgttagtgctcttgtttgggcagtatggttcatagttcaaaaaaacatgagcaagagctatccagctccttacactagcactttctacatgtgtttgatggcaagcattcagtgtgtggtcattgccttggctgctgaacacaatgtctcagcttggtcactccacagtactataagactaacctctgctctttatgcggggactatttctactgcgctagcgtatgtgctccttgcgtggaccattgagaggaaaggtcctctctatgtgtctgtgttctcccctttgctgcttgtcatcattgctgttgctagctgggcttttcttcacgagcaattatacgttggcactgtcatagggtctctgctgatagtgttggggctgtattttgttctgtggggaaagaacaaagagatgaataagatagacgttgttgaagttgaaggcacggtcatggaggcaataaaggatagcgagaaggatgaggtgaaagacctggaattgcaaccctatgaatatgatccttccaacgttaacggttaccatcatgatgctaattaaagggcagaggattcaatgcagatcaagtgcatgaagacaacacatttctaatgcctggtgcattttgttatcttgtgtcacatttgaaagcctagattgaaaattgttcctacacatttttaatttattacccctatctagcaataagaatgtgattctcaagttgagaaaagattgttacatgttactaaacgatatcaattttaatgcagaagaattttattcaaa

SEQ ID NO: 99604 - DNA, 312 bp, Glycine max
  Clone ID: PAT_MRT3847_6095C.1
ggaaaacccccacttttacttaattattttgtaatttaaccccccacacccaaaaaaacccccggaaaccacaaggttccggggcaaaatcacccctagagagctttattggggagaaacccccccaaccaatccaaaaaaagcgaaacccctcgccggataaaaccccccccccaccgggggggccccctttggaggcaaaaaaaaatttacgtttatttttccccccccccccagggggttttacccccggtcccccaaagttcaaccaaaattacctttctcccccattctgtaaaaaggtgccaaaaa

SEQ ID NO: 99605 - DNA, 505 bp, Glycine max
  Clone ID: PAT_MRT3847_60960C.1
acgcgcgctgagtcgttgggccacgcggcctggtgtgatgactggtaaggagatagaacgggctctactgatggaaggtataagaaatacgacaattcaagtgtgtgaacaccatgcagctatagatcttctaacttgtgaggatcgatctgagatgatagagctcgtggtcgacacactgaattctaaaaccgctagagctattaggtgatgagattctactcaaaggtaactcaactcgcgtcaggtgtagctggacatatttatactaaaactacgaatcctgtggtaaccactggagagggaattgccatagaacaccgagactaagatgagatttccaacatggaatttgtgcagtttcattcaactgccttagctgatgaagggcttactattaaacgaaccaagcctcgcgaaaatgcatacatgataactgaacttgtcacaggtgatggaggcatcctctataatcttggcatggaaagagtcatgccctagactg

SEQ ID NO: 99606 - DNA, 506 bp, Glycine max
  Clone ID: PAT_MRT3847_60961C.1
aattaccactttatgttttttcgttactggagagaacgtaaacatcaattggcggtgcagagctgtttgttatcatgctctccactttcttaggcttaatcagagaacacgacgaagctaatgcggagatacggctgtggagctaaggtgctgttctattaccgacataaaatacgagacccgtacgttaacctccaattgagggattgttcattgataagcatgctagctattaacctgagcagagttaaagatgtcgtaaaaattcttggcagtgttaatgatcgaagcatcttgcgtacaaatgtgattcttccaatgcatgcataaactatcttgctggaacaaataagaaagcgacgaccgtaagctccctacgatttttagcccgccaagttagaacccaggtaaaaccgcgctgagggattgacagtcattcttcaggaaaaaatactttagcataagatacatggtttattatcgcgatgatactattattttcatag

SEQ ID NO: 99607 - DNA, 342 bp, Glycine max
  unsure (1)..(342): unsure at all n locations
  Clone ID: PAT_MRT3847_60962C.1
gtctgnnccacgngtacgtaagcncggattcggctcgagntngcttccgattngctgggtgtttcnngagaaagancnagnanaagcngccacngattntttgnncntcaagatacgnatcaatcantntnttctgtgcantgtgatncatgcgagttcncaattacntcgngcngcaaaggnaanaagcatccaangncagngcctngtnncagtctgtgcaanatctncatannannnagtgcggngggntgangnaacaggcccncnacanaggccanncagancnancaaganaagcnanatganaagtacacggncgtgngnnacaaccannacacc

SEQ ID NO: 99608 - DNA, 2160 bp, Glycine max
  Clone ID: PAT_MRT3847_60963C.1
ctctttctctaactaaactaaactcatttcacttctctctccaccaatgacttgagaaatgggttttctccggcgaattttcggcgccaaaaaaccatccgattccaaatccgccaagaaaagatggaccttcctcaaacacaccgtcaggaacaagtcactcccgccgccaccgccaccctccgccgttcccccctcacttactttgattcctcaactcccttggacgccaacaagcatgccatcgccgtcgccgccgccaccgccgccgtagcagaggctgctctcgccgccgcccacgctgctgcggaggttgtcagactcacaagcggaaaccttggcgtctcccgccacccaggcccgaccccgctatgtgggtgcggcgcgatggcaaccaccgccgccgttgaaacaatcggcaaggttccggcatttggtttgggacggaatgtattgaaagcaattaatgcaattggtggagttgcaagcataggggtgggacttcatggccaggaacctgagagctgatatgccttgtcgcatgcttctttcaactgcaactcctgcctttctcacgtgcctgtcgctgaagaattttaacaccctcctcgttgtttcagtttaaacttttacggattatcctgtctctgaagattatgatcacccacctcgtgcctatagtacaaagtttgatggatctattttcattagatgtagttccaatgcaaattttagggacatagacgtggagaaagcccggtttggttcccattggttagatagttggatggaagaaaattcatggagacaaactagagatgcttcattaaaagttggacgccttgatgatgagaagagtgacaagattcttgaagtggatacttggaagccacacttgaactcacaccatagtagtggcagctcatatcagacatcatcacatcattacttgtattctgattacaacaatgagaattttgtggcatatgaatctccatcaaagggttcttccaaaggtctaaatccaagtctctcttctagggaggttcttccctttgggtctttgacatttcacaaaggaaaagaagaagtggcggctttgccaaatgttgaggatagtcctcaagcattttctgcctcctctaggcttggaagtggtggtgcaaggagaggtccattcacaccaactaagagtgagtgtgcatggagtttcttcagtggctacccgggtcatcccaattacatggcgaatacagagtcttctagagccaaggttaggtcacatagtgctccaaggcaaagaatggagtttgagagatatggtcattccacaagaaggtctcttcagggtctttgggaagcagagcctagttcagatagggattctgattttaggagccaggcctatgcaacgaccacaagcagcagtttgaacagaattgggagtgccaatttaagatgacatcacaaaaaagacaaagaaaacaaaaaaatagaagagaaagagacattagtttcttttgcttggtgttttctgtgtatgacagcagttttaggatgtaagtatttgacatgtactcctatagtgtctttgtcccctcacgatcaaaggccaccttgttgactcatgattggatttttactgaattttgttatgtagaaaacgaataccgagtcttctagagccaaggttaggtcacatagtgctccaaggcaaagaatggaatttgagagatatggtcattccacaagaaggtctcttcagggtctttgggaagcagggcctagttcagatagggattctgattttaggagcaaggcctatgcaacaaccacaagcagctgtttgaacagaattgggagtgccaatttaaggtgacatcacaaaaaagataaagaaaacaaaaaatggaagagacattagtttcttttgcttgggtcttctgagtatgacagaagttttaggatgtaagtatttgacatgtactcctatagtctttgtccccacacgatcaagggcctggctcatgattgggttttactgaattttgttatgttgaaatattacttgttttggatgtttttactgaattttgttatgttggaatataacatgttttgaaagtgttcattaatcaatgttggtgttaattatgattc

SEQ ID NO: 99609 - DNA, 731 bp, Glycine max
  Clone ID: PAT_MRT3847_60964C.1
attcaattaacaccgtgttcgggtgaagactttatgaaatcgaggtcgtagtatggtggtttagcgggtatggattggaagcagtaccggctcgtacccaagaacaagaacatggattatggcttcctgcttttgctcctcttcttccatatcttccttcctcactcctctggtaaacccagtggagtgtgtgtttctcaaggaggtcgttttcctcccttcaaatcagagggtagcactcccaaaaagggtcctaaagatttgactctttgccggatctttcgcaaaaagacttgctgcgatgtaacccatacacatcctgcacttctgtctgtaaggaagcttgcttctactggggaagctagccaagagtgcttgcacttatgggaactgttggaatgttccatatgcgatccacgtgttggtactcagcctggacctcctcttatttgtgcatctttatgcgagagaatttatgaggcatgctcaaatgcatacttctctatggatgtgaaaacacaggtaccgggaccttttggagtcactgactttgaaattgttgactctgctgaatgggtctagggtgatagtcctgtatgtcttgttgcacctcagcaggtggtatatttttgatctgtagtttttgataccatttcgtttactactccctgctcccaaaaattcatttgagaagctgctgttgagggcacgatagctcacaggattggttg

SEQ ID NO: 99610 - DNA, 1026 bp, Glycine max
  Clone ID: PAT_MRT3847_60965C.1
acagcgcaagcaagcagtgtttcatcaccatagtcttatttaaaaaagactacaactttccccttccttaatccttacgcacaatgattggctatttgacttgttcacttcatggttttcgctaagtttgtcttctacttccgtgttagtgtcacaaaaatttgaaaaaataggttatgtatggaacgtgaaacaattttacaataaaatctcattataaactgccattatattagtttaaccaatggtcttcagtttttttgtgatttatacctaaaacaaattgtattatcataactgcaacatgctaatatcattaatttattattatactaagatagttaaacatctagaaagtatacataaaatatggaaagatttaaaagtaagtatataactactattatatgcagggttttagctcctacagaatcaccccacaaccaatgtttacattcataaggtggttcatcaaaccaatgtattattcccaaggataattcatggccccggttaggcatataatcaagcagcataattgtcttaaaataaaatcttgtttctgttcaaagataatccaaaaatagacattctcgtccgggtggtgtagttggttatcacgctagtctcactcactaaaggtcttcggttcaaacctaggctcatacatagaattttcaagtttacttcaagagatctttgtagtcttttttatatatgctttgtgatcaaattttacagattccacaatcaaggaggacatgagttgatttgagtatgtaaagtcacagcgcgagcaagcagtgtttcatcaccatagtcttatttagtccttgcttatacatataataacattttaaggtttgtctgatgttgtagtaacatctaaataaacatggatggctttttaagatcaaattggttagggtagatgttgcgacttgaaggaatgctagctgatgtgaatgagtgttttatcaaggcaataaatacatcacccattaatatccctatacatttgccccc

SEQ ID NO: 99611 - DNA, 408 bp, Glycine max
  unsure (1)..(408): unsure at all n locations
  Clone ID: PAT_MRT3847_60966C.1
tcgaattgaatcccgntccaatnnccaactgcgccggttgtttttaagtcgcttctgtgtcgttacaggtcattcttaaggtgacaatttctctgcacgacatgtctgatgaacgagctgtgcatcctgattgccggaatgctagtaacccttatcatgaatgcagtgattactgttttagagtaatagctgaagctaaaattaggtcacaacaacaggaatcagaagttggacaagctagtggtggaagcaactctaagcaagctatcccagatgaatcctatctcggtgaggaaatacacgacgacagacctgatcttgaagaaaactctgatagtgatcctgaccagcccgtccttcatgaagcagagcaagaagaggttgattacacaaaaacttttgcgagac

SEQ ID NO: 99612 - DNA, 545 bp, Glycine max
  Clone ID: PAT_MRT3847_60967C.1
atcgcgatttgcagatggcgagttcgcttttgacagaggacgttctgatataggctaatctgtcgggctaaacgctgcgcaggcacacgactcgggaatgcctttggaaattattcactagctgaagaccgtgctctctgtctttctattggggggagagaacaattcgtcctcttttcgtggagagagagctgccgccattgctaggcaggtagggcatagagggagtgtcgcacgatgaggctggtatgtgggactctggggacatgatcagcgcttcagaatacgatattgttatgtatttcttaacttgccggcgaagagggatgctttaacagactataattcgtcggttaggaagaaccagccatattaaggaggtgatccggatgcgttaaaggatgtgcggaagcttatggagttggagatgatgctgagaagatcgaactgtctgaccagatttgtgaaaaagcgatgaacgatggaatgaggtgaggagaattgcataatatggccagtatgaagaatggaatgatctataggag

SEQ ID NO: 99613 - DNA, 526 bp, Glycine max
  Clone ID: PAT_MRT3847_60968C.1
ataaattatgtttatttaattatagtaaaattagtattattgggaacataattttaaaatgcattggttaagcatatatataagtatagcgacacaaaagagcatatataattatgatattatcaaataaaaaactttagaaaaatatataaatttaaataaatcacaaatgaattcagtaaaaataaattaggcccatagaggaatataaacacatacaactttgattgacattaattctctgagcaacaatgtcaaatagtcaatattaaagctagtagtagatgcaaattatgcaatgtaaattatcattgtttagaaacatattatcattagtgagatctgatttcattacctatgaatacattgtatactcataattaatatcgagaaacttaaagagtgccaatatttttcttcacaaattatgaaatacatgttacatacaaagttgtagaataatcaagttaattattaaattcatgatcataaattgaaaaatggtagaaacttgaacttacatgat

SEQ ID NO: 99614 - DNA, 462 bp, Glycine max
  Clone ID: PAT_MRT3847_60969C.1
gagaagaaaatctaattgcatccattgttggtcgacacacacaaacaagctccgaggccctatcacattatcatacatttatacaattggagtactgcattatagcaacagttgtctgaatgcctgcaacgagcgaatgcaaacggccggatgtatttttcgcccacagccctacagttagttcttattcgcccctgtgagcctgtgagtacacctatgcgacccattttcttcatagatatcccaaagtctcttaagaacataatatgccacttgctatgcttcttgaccacagaagcagtggtgctgccacccaaaagagcctggtctgactgatcgcagcccagaattgtcacaaagtctttgtaatacatgctatccaatgagttcggagtgaccggatccaagggagccaatttggcggcagagtcagcttgattagtaaccacctctattaaattt

SEQ ID NO: 99615 - DNA, 314 bp, Glycine max
  Clone ID: PAT_MRT3847_6096C.1
gtcgttctttttttttttttttttttttttttatttatctttttatttttcattaaataatttttttttatattatgcatttgtatgtttttgaatttccactatatgaggcccacattaatgaaagcacactgaatcgtaacagctgggagacataaaacaacaacagacacagcagaaggagagagcgccggccctttcatgcccaataaacccacggcacaagaaaactccgtcaatgatacaaaaaaaaggggggggaaaccccaaaaaaaaatttgcaaggggccacccccaacccggggagacagggt

SEQ ID NO: 99616 - DNA, 743 bp, Glycine max
  Clone ID: PAT_MRT3847_60970C.1
ccaggagcgcataactagtatactgtatacggcgggatcggattcgctgaggagaagctgtctcatcgaacgacgtcgctttggtgtcctcggagatggagaagttcctgtgcgagttgttgctggattcctcgcagccaatttccgagcgtttcagagcgctcttctctctccgcaacctcaaaggccccgtccctcgcaacgcccttatttgcgccacaagggattcgtcgaatttgttggcgcacgaagctgcatttgcgttgggtcaaatgcaggatttggaagccatccctgctttggcctcagttctcaatgatctttctttgcatcccattgttcgccatgaggcagctgaggctctgggtgctattggttcagatggtaatgttcctttcctgaaaagcagtttggatttggatccagccgaggaggttcgagaaacgtgtgaattagcccttcaacgaattcagaatttaaaagatgctggtaatactgatgaattgtctgcaaatggtgtatctccttttaagtctgttgatccagctgcaccagcgatctctggttcttctgttgatcaactaaggcaagtgcttcttgatgaagaaaaagggatgtatgagcgctatgcagctctttttgcacttcgaaatgatggtggaaatgaagctgttaccgctatcattgattccttgggctcaaaagtgctctactgccgcatgaggttgcatatgttttgggtc

SEQ ID NO: 99617 - DNA, 389 bp, Glycine max
  Clone ID: PAT_MRT3847_60971C.1
gaagatttcaaccatccatatcctttctggaaaaacaaagaatactttgttgatctaccattcagattaaatgaagatatcaatccaacaaaaacaacccatccagggatgacaccttcagatctacaagcagacaagaatgtcaagatctgctgaggcaaggtctgattgagccaacccggtcaactgggcatgccaagctttttacgtaggaaaaaagagctgaaaaaattaaggggaaagaaaagattagtcattgactataagcctctcaatcattctctcaaagatgataagtttccaatcccaaaggcctcatctctcccaaccttgatcagagaatcaaacttattttcaaagtttgatttaaaatcaagtttttggcaact

SEQ ID NO: 99618 - DNA, 277 bp, Glycine max
  unsure (1)..(277): unsure at all n locations
  Clone ID: PAT_MRT3847_60972C.1
aattcggcaccagtaaaaatggaaatccaccccaaatgtggccttagtttttaacaactgaatgttaaaaatttagatatttacttgagacgcataaaggcagaaatttaagaaatgannatctgcgtaaagaatttggtgccaaatcattnaacagccttttnttatttgcttttctctttctttgtgtgtggttttctttataattattagtttattaggtttgnngccttggagaatgctatnntagatatgcnnggagcagggcaatccattt

SEQ ID NO: 99619 - DNA, 441 bp, Glycine max
  unsure (1)..(441): unsure at all n locations
  Clone ID: PAT_MRT3847_60973C.1
tactcagngaggtagaaccatggcgaatagaaaacttctactattatggagcatgtggagctggatgggtgattggtagcgagcaggctataggaagagacacccgactgcaacggtttttcataaccaaaactacggccttgactataatggagccttttttcaccgcggctgggtgacccgacagagtccacttcaagatcctttttcaaatcagggatcgtatagatagagcccacttttctgagtctatacaccaccgtattaaccatcatggaaggcccctgttctaaggctaagtgcacgactcatgggatacaaggaaccttttggcccttcggtggcatgatcttcgccctcgtttactgcaccgctggcatctcagggggacacataaacccggcggcgacacttctactgtttttggcgacgaagttatta

SEQ ID NO: 99620 - DNA, 157 bp, Glycine max
  unsure (1)..(157): unsure at all n locations
  Clone ID: PAT_MRT3847_60974C.1
cggccgctcgagccggcggnccggnatactctaatcttgttttgatccatctcnatttcttgatttctttcttcaccatgtcacttgctgggaaaatcaccactgaaatcggggttcatgcaaccgctacaaagtggatcaacctctgcgcaacaca

SEQ ID NO: 99621 - DNA, 332 bp, Glycine max
  Clone ID: PAT_MRT3847_60975C.1
ggctcgagatttttttaaaatgtaatgaacacatgagattttaataaattcttaagcattttaatggagcattcatattaattttaattcaataattgaattctcatatttttcatatatacatatacctctttattaactgacaagctaaattcttcttctaaattcttgtaggatggaactagtcttcgggtcacgtctgtgtcaacagggaaatatctatgtgccaagcctggagggggaaatgtcctacttgcgaacggcacaagcgcttcaacggcttgggaaacaattacattgtggaggataaacgaagatactttcagactaag

SEQ ID NO: 99622 - DNA, 402 bp, Glycine max
  unsure (1)..(402): unsure at all n locations
  Clone ID: PAT_MRT3847_60976C.1
atgcggtttcatacctcctttcaaatatgcagaagaggtatatcctctgatttttcttcaattttggctctgtcgaatggacgcttgtgatgcttgaaattcaatanatatggacctggtgatgcaggattttgttagtgactgcatggtgattctgcattttgtaagtgctttgtgatcctggattttactaatatgtgcaatgcaccataatactggatatacttgtattttttagaactcagcactatagcagagtccttgccttctttgtttatttgaaattttcgtttctcaactaaaggttttggggtactattagaacctggcattagatattaacttagctttccacagagacagatcaaatatttgaagttgctttcatgtttctcttntnnt

SEQ ID NO: 99623 - DNA, 278 bp, Glycine max
  Clone ID: PAT_MRT3847_60977C.1
cgctctcgtgtttgggcgcgtgggaccatataatgacaccagtgtgctcgttagaggatcctgaggacacactatatcacccgagggcgctcgtgaacacgagaagatacaaacaaacgcacgagggtctgtatgactatgtctctgatgatgaatgagtcctactgaacagagaaagtctcgattcgctattccgcaatgtggtatgattgaacgacgcagcggcattgcgcctacaccacacgccttgcaggaggtgcatgatatacggagctccg

SEQ ID NO: 99624 - DNA, 161 bp, Glycine max
  Clone ID: PAT_MRT3847_60978C.1
tgtacaggcgaactgtattttgggaaaatgtgaaaaaacaaaaaggatgttgcttgtctctagactatagcaagaatacacttaaaaacgccttattttaccacattttgcatccctgtaaataacttattacatagaaccaaaccccattggaggacctg

SEQ ID NO: 99625 - DNA, 321 bp, Glycine max
  Clone ID: PAT_MRT3847_60979C.1
tcataaaaaaaacaaaaaaaaaaaaaacaaaaaaaaaaaaaaaaaaaaaaaaaaaaaaaaaaaaaaaactgataaacaaaaagatataaggcttccctaaaggtatatacaattgttttaactcttctaaaatgtcacaaaatcttcaattcggtgcccgtcttttaacaccgtggtcatcgttttaaacctggggtcctccaaaataccttcccttttaccacttttacctttttgcagcaggtcctcttattggcgagccccctttttttcgcccgggcctgcatttttaccccttcattgggaaaacccccccttttt

SEQ ID NO: 99626 - DNA, 143 bp, Glycine max
  unsure (1)..(143): unsure at all n locations
  Clone ID: PAT_MRT3847_6097C.1
tggcacaagatgatgaagtcctagttnggnaaatcagtggcagtggtggtatgggagcgctgcattgnntatactcgnaccctcgaaggtatcgnccaccgnagttcagntnnggaanctaacangannngntanggcttcca

SEQ ID NO: 99627 - DNA, 337 bp, Glycine max
  Clone ID: PAT_MRT3847_60980C.1
caaaaccgacgtatcttgtggtcgtatgccttgcactcattgcatatgtttggaacaccgtggtcttctgataaacactgatatcgactccttcttttgtcgctcgactacttgtccatcaatatactctttctgctctatccttcaactatgatgtgatcgttccatttacctcttcacttacacctgtccctcgacctcaaaagtaatctatagatatacatacagcacctttacatccccctaattttcttttgccccaccatttatcgttttggaggatccattgacacggctgcacttcttgattttggtgattcgggtcatgatttgatcg

SEQ ID NO: 99628 - DNA, 219 bp, Glycine max
  Clone ID: PAT_MRT3847_60981C.1
agagaaggaagagttctataaaagcactcaccttttattaacttaggcgtaccttattaaaaacaggtatcaaaggtttaattcgagcttgttcatacaattggtaaacatttaaagggagtccaaagtaataaatgaacgcatggagaaaaacactacttggaaccaataatgcgactagccaaaccaacgtttttataacaaagccgaccccgaatt

SEQ ID NO: 99629 - DNA, 234 bp, Glycine max
  Clone ID: PAT_MRT3847_60982C.1
cttttattttttttttgaaaacaaaaataacttcattcaacaatacaattgtttgaaaaagttaacctttaaagcgattcacacggaaataccccaattattttatgggacctacataatatccccgccccaactactggggtttaaattttatttccactgcaaaacctaaaaagggggcatcctttaaacattgaatttggaaacggccccagtatatatcggcaggggatc

SEQ ID NO: 99630 - DNA, 1115 bp, Glycine max
  Clone ID: PAT_MRT3847_60983C.1
ggaggagagaaggaatgatagtgccattataaattataatctaagataagagtctagttttgaaacatgaatctcagttgctatcaatctatggcctgatcaagaagcttctatttatgctatgacataatgaagaaaaacaaaagccctaaaaaaagagaaacagaaaaacaacaaagagaaggggagactccatcattaatcatgacttagtctgaccaataaggacatccttgtaaggagtgggaagaggtaaagtaactttggtctcttgagggtgatggcttatatttgtttgatgttccatgatcaggggaatctgtgcttttctcgcactcagcagtcgttcatgtgcttcacctcgcagtttctccagcctaattccattcatttgttgcatcttgaacactttgattaagtttgtcaatccaccaataaagaacattaggcttccaaagatgcctagccagatccaagtaccaccaagtaagtgaaggccatggtggatatctctagatttctcgtgataattgagaattgcactaagcatgaatgacaaactccccatcaaaaatggaatatacacacactgctgcaagatttgcacatgaccatccgctctctcataaatttggcacgaattatgaatcgatcctatcacccacaatacaggaccagcaaccagcatgttcagagcatgcttttccaatttgaagtacccatatcctttctcttcctgaataaaaaggaagaagacgcctagaaaggcaagaagcgttccgaacatctgaatgacagggaccgcgaactcgacgaaggcgagttgaaggtcgaaggcgatcaagggcaaccggaaatcgatgccgacgaggtgggcgaagaggtcatggaggttgacgaggaggatgatggccaaggcggcgatgataagcaccaggccggatcgggcttcggaagaaagctgggccgccaggcccgacagaaggacgagggaggcaatgagatagagggcggcgttgatgtactcgtagcggttcttggccaggcccgggccgtaggtgcggaagaccctgcggaagctagcggacgcgtgggtcgacgggaattccggaccg

SEQ ID NO: 99631 - DNA, 361 bp, Glycine max
  Clone ID: PAT_MRT3847_60984C.1
ttgttctcatgagaaacttcttataggggagaatagtggtggcctgatacattcctagataatcatcacaccctagcataggatacgcccttatactgcataaaagctaggtaagagggaaaatgctccgaccattcttactgtcgaacaagaataaagcgcacaaaacgaccgctcagctgagccagcaccctaccggcaatgaagaacgaattgcaagtcgggccttttgcatctgacctaccaatttaaaaatcaaaccctgtaccatttcccctaacccctggctgggaaaattctactttgaaggagcaaccacgaatactgtcgcgcgagctctgcttaatgccaaaggcttcat

SEQ ID NO: 99632 - DNA, 258 bp, Glycine max
  Clone ID: PAT_MRT3847_60985C.1
atgaatctctggagcctttactggaaagcatcttgacccacttgtcagctacccttaggttctatttagataaacttttcaataaatgcttataagaggagaaaaaattaaaattaaaatgaattaaacctttttttataatttgaaattaatttatgcacttcaatttttgaatgagttaaacgagagtataaaaattaaaagtgcataagttggctttaatttatacaaaaaaaagtcaatgcattttatcctttt

SEQ ID NO: 99633 - DNA, 1034 bp, Glycine max
  unsure (1)..(1034): unsure at all n locations
  Clone ID: PAT_MRT3847_60986C.1
ccttatcatttggcaagatctgatttccctcttcacaaggggagaaatagaaaggcatatgatcttcttcaagttgcaatctttttagagagagagggttagaagaacaacatacttgagatctgtcactgtgtttgagttcacgatgccatcgcattttctggtagaaaattaaattgctttgctctgtgaggctctagagatcttcaaagttgtttctttttcttttggtgcataggatcatcacggaatgccaaatggccaaatggggaattagaccacgcttatcgtaaaagtatagtataaatatactaatacatcaaaatttctcctgtggatgacggaatataaaaagctaacttacgcttcctcgcaaaagaattaaaaaatactaaaaaaaagtgtatcaataacaaaacaaaaacacaagagtatgttaatggggggggcacattgaatccatctgaacttgaatcctccgaaggcctaaccaacatcaactgttttcttcattcacaactgtagtagtcatctctccatgtggttgtatcacgcagcaatgctcctcccacattgagcagagtgaaaactcaactccctaagtcctttctcagcttcaccatctctttccaccccagttgccgccacgtccacctcttccgccaccattggagaacctaccattcctgcctcctccacctcttccaccaaaccggtaaccacgaccaccaccatcaccaaatctgccacctctttggtgttgctctttctgttgcaactgtggcaatgttttcactacctctaaacttacattcgaggcattttcctgaccattaagatatatgtctaaatctttagctggtacatcaaaaacaacgccatttccatcagcagtgagtgaaagacctttcacagcctcaaccttctcttcaggcaaaaatctcctcaagattgaatagccataactgcaaacagccaatgaattagcaagtcaaacaagttgaatatgttcacacaagtaacactanaattag

SEQ ID NO: 99634 - DNA, 367 bp, Glycine max
  Clone ID: PAT_MRT3847_60987C.1
cccacgcgtccggtattttctatgtcgatgatgatgaagctggtgctaggtttaattaggaaaagggaggctctgacacctctcctgactcagcggcagatatctatgatggtgaagagaatagctctgtggtggcagctgacaaacaatcaaatttgattagtcatgaaagtcgtcatcattttaaaattgatatttatagccatgacacactagagaaaatggatacatggagcacaagtatcttcacctgaaacaagccagattgacccttcaggatcttcatcttgttgcacagccccttcagggtctccatacagtaatgaatcaattgatgtcagttcagaggctgctgagagcatgaatg

SEQ ID NO: 99635 - DNA, 535 bp, Glycine max
  unsure (1)..(535): unsure at all n locations
  Clone ID: PAT_MRT3847_60988C.1
aggagctagctgtcgatctatcgctacgaatgtaccaagtgccgtgcactgatgcagctcgccgggctaaccataagtctaaatgtatgtacatgtcatcatcatcatcatcattataagcctacgcattgaaaagttttgttcaacaaatttcaggttcgagttatttttacgttgattctctctcctcgtaaacaccagggtgttcactgtattaaagttggggtttcttactgtgcccctcgtcttgttggttgtcttttcttctttcagttttgagtgcaaaagtttcgtcttcagtttaagtttaggtttattcatcaacaacaacaacatcgaaggctaccgagttcaaatcagggtctccacaggacgcgtaacggtaacaatccccagtggtaaaagtgttccgaagaacatccgagttcaaggtattaacagtctggttacgggttggtactggcccagttcacaccatatcagtgtcattcgcgtgtncacggatacaccagcgccngcttggtcttacaactcg

SEQ ID NO: 99636 - DNA, 340 bp, Glycine max
  Clone ID: PAT_MRT3847_60989C.1
acgaaatattttattttatgatcaaggatcagaatcgttggatcgagttgaggtagatggcactagtctctggaggaagttcaacactgaaccctaacgcctctctatacattcctattgtgttccgtcatgtggatgattgttattctgaatggaggcagctggtgacttcacttacattgttctatgactactgtctaaaactgcattacgttgattgattccttttatggctaggatggttttgattgcattgatgtggtagatttgctttctgattcgttttgatttttatgctggttaatatcttttagaagagttaattattttttttgaatac

SEQ ID NO: 99637 - DNA, 345 bp, Glycine max
  Clone ID: PAT_MRT3847_6098C.1
caccgattgggacaacgatttcaattagataagatgagattggagaacaacatggtggtgctaaaagtgtgtctgtggcttcttttacttagctcgactacagctgcacgcatggaactgagcttcatcaaaagtgatcattcatcaagttatgattatgatgattattcaataccatgctagaatctctagttgtgtacactctcaatgcctactcaatgcagctgagaatatattatgcttaattcacgccactcatattatctgaactatatgagcacacactcacagtcaggacattatcgttgacttgacatcgacgacttctactcctaacctttcaag

SEQ ID NO: 99638 - DNA, 165 bp, Glycine max
  unsure (1)..(165): unsure at all n locations
  Clone ID: PAT_MRT3847_60990C.1
aaaacccgggccgaccgacgcgtacgctcacaaataccaatcattctcccaacttattttttctctcaacnctcccaatttaacatagaccctatttttaccaccgcaacaccatcaaccaccttttcctttatacttacacgcctactaaaagcccactccttt

SEQ ID NO: 99639 - DNA, 398 bp, Glycine max
  Clone ID: PAT_MRT3847_60991C.1
attctcgcagcatatatatgttgtgtaatagaaagtgtgtttaaataatgcactattgatcctttcgaaaaagaaaagcaagaaaaataaatccttcttcgacatttcacaaccccaaaaactatgtaacaaccatatgaaaccctgctctagaaggaactattacaaccactaataacttccaaaagcaaaaacctgggcggccgttttaaagatcctaaatttcattactcagactgtgaactgaataacttttttattggttccccctaataaaatacctggaccaccttttaaccgcgtgtcgagaaaaaccttggacgccccaaatttatcgctttggtagtctttcccttttccaccaggagtctaattacaaatagccccacggcaatgtc

SEQ ID NO: 99640 - DNA, 440 bp, Glycine max
  Clone ID: PAT_MRT3847_60992C.1
cccacgcgtccgtgcagtgaagaagattgaagacaacaacactgtggatttgatagtcgacttgcgggctgacaagaagaagatcaaggatgcagtcaagaagatgtatgatattgagaccaagaaagtaaacaccttaatcaggtgagtctttatgtagagatgcttttagaatttgttagatgatatgatattgctaatgacaatggtatgcttgcagcgaatactattactgagacatacatgtggtgtgctttatggtttgtggcatgctggtgtgacaacgggttcatgttgcgcacagggaaactttgaaatgtggcatatgaaactcaatgttgccataacatgcaaatgagacagcaaatttgtatgagatacttgcatcgatacttacaacatatcattacttctgaatgtagattgttctgttgcacgcc

SEQ ID NO: 99641 - DNA, 289 bp, Glycine max
  Clone ID: PAT_MRT3847_60993C.1
cagaaattatgtcgttgtagcataatgacgcttgcttaatttgacaaattaaccccacggcaattgggtagagattagagaagcaaaaacacagttttcttacgcacgatctgatttagacaccgccacttgatcattttttttatatactttttttaagaaaaaatactataacatatgctcatcataagttggtgatagagatagttttgttcccttctaaggtgttaattggatgaagtttaggatgtggtagctattcaatagaccttactcttgatatgaaggg

SEQ ID NO: 99642 - DNA, 3224 bp, Glycine max
  Clone ID: PAT_MRT3847_60994C.1
gaagttgcagtaggctaagctgaatctatagactagagtagagtaggggtccgggaaatgagtgattaacttctcaaactgagagagagagagagaaagagagagagcactgaagtgaagagtgcattgtgatatgaggaagcaacaacgttggcaagttggtatcgtggattgaggtggtcttttgggggaaaccatcaacgacaacgacagcatcaaaaggaagagaaagacccagaaacgggaacggctttcagaaactcacaagcttttcaaaaagagcttcaaagtgaaggaaaaaagtgccctttgattcttggtcaccacaacgccaagacaaacaacaaacaaagcaaaacacacacacacacacaagcaaactagaggagccaccgcaacatgttttctgtaaccgaatgctataattcaagggagttggtggtggtggttgttacagaatagaaagagaaaaaaaagcatttttgtagtttggaattatcattgctactacttcgtctactacacacatttaactgtcatgtctgggtggtgaaaagagctttctgttgtgttggctttgtctttcttgtgtggggtttgtttgctggtgaattcggctcggggttttttaatgatgaaatttgaggggtgtgtgaatgacccttttcccctgtgaggattggggaaattggggtggagtaaagttgttaactttctcagagaccatgcaggggcattgagcttgtgttcttgtttcttctcttctcacttggttttgttttgtggcaggtttgaaggatgatgatctgtatagagagctgtggaagctatgtgcagggccattggtggatgttcctcgtaatggggacagagttttctacttccctcaaggtcacatggaacaattgcaagcatctacggatcaggaattgaaccaggaaattccccatttcaatctcccggccaagattttttgccgtgttgtgaacattcagctgttggcggagcaagacactgatgaggtttatgcttgcatcgctttacgtccagaatcagatcaaactgagcctacaaaccctgatccaaatgtagtttaggccccaaaactatataatatctaagcttgaggtagattaactgcctctgatactagcacacatggaggattttcagttttgcggaagcatgctactgagtgcctgcctgaattggacatgactcaatcaacccctactcaggagttggcagcaaaggatcttcatggatttgagtggaagtttaagcatatatataggggtcaaccaaggaggcatttgcttacaactggttggagtactttcgttgcatctaaaagattggttgctggagatgcttttgtgtttctaaggggagagcatggacaattgagagttggtgtcagacgtttagcgcggcagcagagtcctatgccttcatctgtgatatcaagccagagcatgcatctcggcgtgcttgccactgcttcccatgctgtcatgactcgtacaatgtttttggtttattataagccaaggactagccagtttattgttggtttgaacaaatatctggaggcagtcaacaataaattttcactcagcatgcgattcaagatgcgattcgagggagatgactcacctgagagaagattttccggtactattgttggggttggagacgtgtctgcagggtggtcaaattctcagtggcgctcattgaaggttcaatgggatgaaccagcaacaattccaaggccagatagagtttcttgttgggagatagagccttttgtagcttctactgctttgaatgtcacacaaccagcagttaagggtaaaaggtctaggcctgctgatgttttatcttctgctgcttcaggtttctggtatcatggttcttccaatgagcttagtcaattaggtgctgctgctgaggtccaaagcaaggaaaatcaggttgttccatgctctctgaggcagaaagacattattaatagcaatcctattaatgctaataactctagcatcagtactagagtccgaatggaaggagtatggccttcttcaccacatttgaatgccactccaaaccttttttctgatcccaataacaacaacagcaacaacggcgtttcggcacgatcactgatctctggttatcctaatgttccatctagatcaagtgatggtcccacatgcgacggtgtggaagatgggaaaaagactgagaactcccttgattgctggttatttggagttaatttgactaacaattgtagcaacgttattactactccttcagagagggaacagagaggtccaagctcaagtgttgttcttagtggtcccaaagaatctattcctgcagctgcatgtgaaactgagagggttcagactcccaactattcactgtccaacaaagggcagaagcaaattatttctgaggcatcaccaaatcagtggcagaacaagcaggccactgtactatccatgaggacgcggactaaggtgcaaatgcaaggtgttgctgttggtcgtgcgtttgacttgaccacgttgagtggctatgatgatctcatagatgaacttgagaaattgtttgagatcagaggagagctgcgttcacaagacaaatgggctgttactttcacagatgatgaaaatgatatgatgctcgcgggtgatgatccatggccggagttctgcaacatggtgaagaggattttcatttgttcaagggaggacttgaagaagatgaaatgctgcaagttacctgcttcttcatcagaggttgaagagattctattgagtccagattcacagaatagggatgagactcagcagtctcacatgccttagacaacttggcttttttttttttttttactttttttggggtttgggaagtgaaagatatctgatggcataggttgcttaattttatggaactttcaaagcaactgcagattagtggactaattatataatatgaaagcaataggtagtgcagttggattttaggtacttatatttgtgaatacccttttttttctttttcttttttttatcctagagtgccatcagcttgtaaacaaatatgcttttcccatctctaatggattgtttgtctgtgatgtgtcggtttcttctacatataaaaaaaaatgatgttttgctaaaaaaaaaaaaaaaaaaaaaaaaaccttg

SEQ ID NO: 99643 - DNA, 502 bp, Glycine max
  Clone ID: PAT_MRT3847_60995C.1
ctttagtgcttctttaggtgaagtctcgtgaagctcaaaagccatggccttcttgaattgtttcgacatgttggtccttctgcttttgcttgtcaatatgagcttttatggaaatgttgatgctcagaaaaatggcttaggagcctctttcatctttggggattccttggtggatgcaggaaacaacaactatttgtcaactctttctaaggcaaacatccctcccaatggaattgatttcaaagcctctggaggaaatcccactggtcgctacaccaatggaagaaccattggtgatttagtaggagaggaattgggacaaccaaattatgctgtaccatttttagctccaaatgcaacaggaaaaaccatactcagtggagtgaattatgcttcatgaggaggaggaatactgaatgctaccggaagaatatttgtgaatagaataggaatggatgttcaaatagattacttcagcattacaagaaaacaaattgacaaa

SEQ ID NO: 99644 - DNA, 525 bp, Glycine max
  Clone ID: PAT_MRT3847_60996C.1
ccacgcgtccgtgaggacatgctgaaagttgaggcagggaatgatgatgtggaccacgaattaccacatcgctttatttaaatcttgaattaattcagttttttgtgtttcttaatatttccttatcttaataagatatgaatatcataaatccctgttttcatattgttaatattagtattttttattaggataattgataattgttatggtttattattagggatctctttatttttcattttattaattaggataattgttagatatgatcctactaataagggactatttgttttttatttcatcaattaggggaattgctaattttgatcctattaattagggatatatctgtaagcctttttaaaaggaaaacctgattggaacattatcaatgagaaattatttttagaaaaacttgtgttagtttaggagaagctttgtcaaggatgattctgcttcttgctttctgtatagggtgcaaggagtcttatgtgtctagggacatgactcaatcccatg

SEQ ID NO: 99645 - DNA, 306 bp, Glycine max
  Clone ID: PAT_MRT3847_60997C.1
cgtcaactggaatattcataaggaaaatggtttggacttccgaattaaacatagtctttgcaactttttgtcttcctattggtcctttcagacttgcaagttgcaaatagcaacaaatggcccgagtttgctggttgtgttgctgtccttcacttttgctgaaccaaccgtatcagaagcttgtaaagaggctgttaagtatcaattgattgtcaattctgacttctgaactagagttttcaaggatggtggataaactttaccatgactaagttagtcaagatgtctaactctgatgaacatatg

SEQ ID NO: 99646 - DNA, 541 bp, Glycine max
  Clone ID: PAT_MRT3847_60998C.1
gattatgtttttgttttttttttttttttttttttttttttttttttttgatttttttgtttttggcaagcattttttgatgcttagaaaaaaccgagaaatccgggagggttcctggaagagtacgcccttacctaaaggggggacgcatttagcatgagtgaagcttggttaaaattgggctcaacaaggaaataagattcgcccggaaaaaaacagaaaactgggagcagtagcaaaaaaattaaagcccggaggcactaagggggaaaccaacgtaccttaatggggaggacaaaaaaaataaatttgtagacgggaaaaccccgtttgcaaatggaaaaaataaacggccaacccccttgaaaaaggggcctacccaaggggggaaagggggttttttttttgccccaagggggcgggccttaaaagaaggggcaatggcccccggccctgggaaaaataagaaaggcttctaagggggtttgttcgagaaagacaaaaatttggttgaaggggggaaaaagccggatataaaaag

SEQ ID NO: 99647 - DNA, 310 bp, Glycine max
  Clone ID: PAT_MRT3847_60999C.1
tacggtttttataatactacagattggggtctccattcgggactgtaactatcccgagcgcgaggagcaaccttatgaagaaaaaaatttctcacaagaagttcgagcacccaacgcacggttcactgggatttctttccaagaaacgtgctgctcttcacaagggaaaaaagaaagcattccccaaagatgacccattcaaggcacccaaactcactgcattttttggttacaaagccgggatgactcacattgttagagaagttgagaaaccacgatcaaaactttacaaaaaagaaacttgtgagcc

SEQ ID NO: 99648 - DNA, 333 bp, Glycine max
  Clone ID: PAT_MRT3847_6099C.1
aaaaaaaaaaaaaaaaaaaaaaaaaaaaaaaaaaaaaaaaagggaaaaaaaaaaaaaaaaaaagggaaaaaaaaaaaataaaaaaaaaaaaaaaaaaaaaaaaaaaaaaaaaaaaaaaaaaaaaaaaaaaaaggggcggcccccatttaggggccttttaaccccgggaataaatccgggcccggtccctgtgggggtccaaattttccttatagggggccgttttaaaccttggcaaaacaagggcaaaaactgttccctggggaaaatggttttccgttaaaaattcccaaaaatttccaacccggaaccttaaggtttaaacccgggggg

SEQ ID NO: 99649 - DNA, 317 bp, Glycine max
  Clone ID: PAT_MRT3847_609C.1
caaaaaattcaacaccaccaagagggcgcaacaataatgtctctccagcagcaatagaattttgggagcgtcttttttatcacggttataaagcagatgtttgcattaatactgataacggtggcgttgtttatgctcattctaacattcttgccatgtctactcctgttttcaggggcatgttgaagcaagcaaattgtcatcgtcgatggcgaacaatctcaattactggggttccacatgatgcagttcacagttttattcgattcttatacacttccaggtataagaaagaagaaatggatgaattcgtccta

SEQ ID NO: 99650 - DNA, 952 bp, Glycine max
  Clone ID: PAT_MRT3847_60C.1
tggcgtccgtgacaagaaatcccgtttgatcattctttctcctctgatcatttttttatttttgaataacatttctgcgatagttcgttcgtatgtctgcgtttctttcctatatatacattcgcaaggcttattcagttattctccattcagtttttcatagacaaaaatcttctagtcttctagaggaataaactaaaccccatttattgaccaaacttttataagtctctaacttgttaattttccttttgcggttacgagtaccccaattccctgttatcaacttcgggtgtctctgactctgtcaaacgtggtactcagaacccaggcgcaggtttattggattcccgtaaaacgacagagtttccgcggtggttgtttgttgattcagtagggatcggaaatgttgggagatttcatcattcgatgtcttatactgattctggggtacgcgtatcctggatttgaatgctacaaaactgtggagaaaaacaggggtgacaatggggaacttcgattctggtgtcaatactgggtcattgtagcacttttcacagtactggagaattttaccgatgtaattattggatggtggtttcccttatacggagagttgaagcttgcactctttatctacctgtggtatcccaaaactaaggggacgggatatgtatataatactgtgctgcggccttatgtatcaagccatgaaaatgacattgagaaaaagttccgagagtggcgggctagggcatgggatttggccattttttactggaaaaactgcacagagttggggcaagctacaactttccagattctcgactatttggctgcacagtctaaaaaattctccagcaaatcttactctgagaaaaaagacagctgggtccaactccaagtgccccaccattatcttcacttcgagaaactctctttgagaacaacc

SEQ ID NO: 99651 - DNA, 363 bp, Glycine max
  Clone ID: PAT_MRT3847_61000C.1
caaagggtggaaaaatcaaaactaagattttaccacccccaataaacaaaccccaagggggccctttgggggccccttttttccaagggaaaaaattttagagaaaatcagggacctttcaggaaaaataaaagccttaaaaaaaagaaaaaaagaaaccccttaaattaaacggggtttaattaagcaacccccccttaaaaacttggcccaagtcatgggtggaacaacccccgggctgggggacccccttggccttcctttttaaccccaggaccttttttctaaaatgtttgccctttggtccccccaaaaattttttcccgagctttcccacctccttttttttcgcccggggacaaa

SEQ ID NO: 99652 - DNA, 382 bp, Glycine max
  Clone ID: PAT_MRT3847_61001C.1
cagaccagttatgaaagagcacatgaagtatatcatagaccatgctgaagagattgaaaagctaataaaagtgaaggctcaagtttcagaagttaaaagtattatgttagagaacattgataaggtatgttcatgttttagagtaagacatgggatatttttcagatcttcagtcatttccccaagggcaagccttcgcgcaatgggtaaagttctgcctttgtgactggttggtcataggctgagggagagttttggagcaacaataaggttgtgcctttgtgaccggttggtcatgggctcaaatccagatacagcctctttgcatatgcaagggaaagattgtgtgcaattatcctccttcatactttcacaaagggag

SEQ ID NO: 99653 - DNA, 443 bp, Glycine max
  Clone ID: PAT_MRT3847_61002C.1
agaggacgaaataagtgtggcaaagcccacgcccgaggcgaataaaatgttttaatcgcgaataatgaaagcaaaataatagcagcagagagattattattgttaataataaaataaaatgataagatcagtgagacaattataaatgaaatgttaaatatttaatgaagattaaaaaggaaagaaggaggtgggttccttacgcccaacgcatctttgttggttcgggttcggagctaggttcggttgaagactttgtgcggataagaacgacccaaaccatctcactcatctttctctctctaaaacaccaatctatctaccgcttccaagtcctacaagaacaacccattccctccctcattgcccccactcttctccacttctcaatcctctgtaacttcaaaacatacacctcttctctctgtttctcttcactctct

SEQ ID NO: 99654 - DNA, 354 bp, Glycine max
  Clone ID: PAT_MRT3847_61003C.1
aaaggcaacttaatccaaaggatatggttacccataattgcaagtatatacttttactccctaaggctaactaattattatcatcggcttttggaaatgtccaaagaaaatgatgtcctttcattcggaaaaacaagctaggggaaaggggattcaaatcaaaaaaaaaaggttcttatgggggagaccataaaccaagccccggagggggatcatcttggtaaaaaaaaccaatcaaggggagggggtgcctgccttgatgccataaccctattaattaagctaggatgccccccagggttgccccatgttggcctgatcaacggccatttccattctaaaaagggacttggt

SEQ ID NO: 99655 - DNA, 1456 bp, Glycine max
  Clone ID: PAT_MRT3847_61004C.1
cctagatgtggaaattggaatagccaaagccatagccatacggcagtacccacccttgcagtgttgactatgctgctagctcaacccattttcctctctcgcaactttcccactctcaacaaccgaaactcgagaacttctcttcaacttcacaaccctcctgcactcataagagtttcaccgcaaagaacgccaataatagcctcttctggttgttttggttgcttcgtaaaaccgcttgatgtcagaaccaaaacctcgctgggtgcgttttttaagaaaagaaagggttgtgcacatatttgccatagtttgaaggaagagagcgaggttggtgggaatggcaataatggaagagactggacgacctccattttgctctttctactgtgggctgcgctaatgtactatgttttctttctcaccccaaaccagaccccgtcaagggacacgtatttcttgaaaaagctcctgaatctgaaaggagatgatggtttcagaatgaatgaagtgctagtatcattgtggtatttaatgggcttgtggccattggtatatagcatgctcttgcttccaaccggaagaagctcaaaaaacaatattcctgtatggccattcctgatactttcatgttttggtggtgcatatgttcttcttccatatttcgtactttggaaaccgccagctcctcctgtcgaagaaattcacaggttatcattcaactcaatagtccataaaagtattgagactgcaatgatatcacttgcggcaggggtagccatcataacttatgctggtctagctggacaagatgtgtggaaagaattttaccagtacttcagggaaagcaaatttatccatattacgtccattgattttattatactttccacatttgcaccgttttgggtttacaacgatatgactgctcgaaaacggtttgacaaaggttcttggctccttcccatatcattgataccatttttagggcctggtttataccttctcctgcggccatcattatcaacagtggccatttcacagactcctgttgagccagagtaaaatttcatgtgattactgtcaagtgccaacaatacaaatacacattttctatgcaacaaaattgaatttgatttcaagtttggttcagaaagacaattcacctacaacacggtgagagcagcttgccaccctacttactagtccataaaaatattgagatccatcagcttatgcatcatctggggagatggaaacttcttctgctgtatgtaataatttcatggagagaagtttcacatttacctacatttttactagatgagatccagtttctaagaaacagcaatattgcttctgtgacattatttacccaatcataatctaagtgctcaagtaactctaggaaaaattccattttaaaaaaaaacgaaaagggtatttcactagagga

SEQ ID NO: 99656 - DNA, 758 bp, Glycine max
  Clone ID: PAT_MRT3847_61005C.1
gtggaagctggtttggctcctcttctgttgaagttgttgtcatcgagtgattcgttgactcaagagaatgctgctgcagcccttctcaacctctcaaaatgtgcaaagagtagaagtgtgatggttgagaaatggggtttggaattgatcattgatgtcttaaggaaggggctgaagattgaagctagccagcatgttgctgctgtgttgttttaccttagtgccgagtatggaaacttgataggtgaagagccagaagcaataccatcattgataaggctaatcaaagacggctcttatcgaagcaagaaaaatgggttggttgcaattttcggccttcttaagcacccggaaaaccataggagggtgctagaaggtggagcaatttcttcgctagttgacatcttaaaagggtgtgaaaaggaagaccttatcacagactcgctcgcaattctagcaactctggcagagaggagtgaggggatgttagcaatccttcacggagaggctttgcatgtagctggtgaaatttttgagttgttctacttcaagggtgggaaaggagcactgtgtggctttgttgctttctttgtcactacatgggtggagaagatgtggttgcttatttagtgaagagaacttctctaatgggatctttgtattcccagctcagtgaaggcacatcgagagcaagcaagaaagccactgctctcatcagagtcctccatgatttttatgaaaggaggtcctctggtttc

SEQ ID NO: 99657 - DNA, 828 bp, Glycine max
  Clone ID: PAT_MRT3847_61006C.1
acattaaatacaaaaaaatgccttaaatataattacagtgaccggaagggaggggagggggggggggggggggggggggtaattgcaaaaatacaggaatctgtacaacttgtatacccaaatatctttgtacaacctacaactatgcaaaaaaatcaatcttcttcagtgtcttcatcatcgttatccatggcatcaccctgcttttgatcctcctcatcatggtcactaagctgagtttcttcatcagatattgatccaccctttgcatcagctctgttatcaatgctagtgttgctacaactcttagtatctgagtcagatgaaccaccatggttttctctctcttggtcacaatcatatgcagaaccttcaaattgctccctcaaatcgggagcaacaatgccaatcatctcacttagtactcgtcgttcattctgtctggcaactgcagcatcagaagttgtgttctgactctcagccacagccactacgataattgaatcatgcaatgctcctgaaccttcattattatctttgcttcttggagattcattttctccatgcaagaaaggggctgtactgcaagcccgactaccagccacttccgaagtcaaaagatctgctgttctgattgtgcctccagcttctgtatcctcaatggtcttttgagtgtctgaaggattatttgattgtgaatgatgtaagccttcatgagaaggtttttgagcatgctcctccgtttcttgtacatggtcatcatcatcatcaatttgcattgtgtccccatctaaacacttgttcaaatcaatattctgttcaccctga

SEQ ID NO: 99658 - DNA, 961 bp, Glycine max
  Clone ID: PAT_MRT3847_61007C.1
gggctcgaggctcctgaatctgaaaggagatgatggtttcagaatgaatgaagtgctagtatcattgtggtatttaatgggcttgtggccattggtatatagcatgctcttgcttccaaccggaagaagaagctggtttcatatcttccatttgttgttctacagctcaaaaaacaatattcctgtatggccattcctgatactttcatgttttggtggtgcatatgttcttcttccatatttcgtactttggaaaccgccagctcctcctgtcgaagaaactcagcttaaaacatggcctttgaatttcctggaatcaaaagtaactgcaatgatatcacttgcggcaggggtagccatcataacttatgctggtctagctggacaagatgtgtggaaagaattttaccagtacttcagggaaagcaaatttatccatattacgtccattgattctattatactttccacatttgcaccgatgtgggtttacaacgatatgactgctcgaaaacggtttgacaaaggttcttggctccttcccctatattgataccatttttagggcctggtttataccttctcctacggccatcattatcaacagtggccatttcacaaactcctgttgagccagagtaaagttccatgtgatgactgtcaacaatacaagtatacactttccatgctacaaatttgaatttgatttcaagtttggttcagaaagacaatttcattgtacagagtccacagcatggtgagagcagcttgccaccctactcaatagtccataaaagtattgagatccctcagcttatgcatcatctggggagatggaaagaaatttcacatttaccaagatttttattattagatgagacccagtttctaagaaaagagcattattgcttctgtgacattattagccaatcataatctaagtcctcaagtaactctagga

SEQ ID NO: 99659 - DNA, 217 bp, Glycine max
  Clone ID: PAT_MRT3847_61008C.1
gggtacattaaagggggggacaaataaaactaagggccagcacaaactcattccagacacaaacccgcttgaatctcaaagcccggtagatatctcccaaacaatagcttggatccaatccattgggggaaacgaataaaacaagccgcattaaaaataaaaacaacattagaaagcactaaatattggggcggcgcaagttatgggggcctcggtt

SEQ ID NO: 99660 - DNA, 739 bp, Glycine max
  Clone ID: PAT_MRT3847_61009C.1
ctcccaatacttagggttaacaagcggcgtatttggtctactacagtttcaaacgaaacgcaaccattgtatctgtctcagatttctgtgtttgggtttcaatctaatcgattcgggttctgtgttgggtcttttttgtcacatataagggtctggagtttggctccttggctttataaacccgtgcctttgagatgaatgcagcacccaatatctaaccctatcaaccttttcactagctctcgctaccaagttttttgtattgggtctagcggatctctttggtaaggttgatacatttgtttttggtattgtttttattaccctcctttaatataatgagtcggtgttttttaatagtgaaaattggagatttttaaaatgtaactatagagtggttattcaggcagccttcttgccactgttaaatggcatgaaaggtgttaaactactcgtaaattaaatgcttttgctcttcagactcgctgagattttctgtgaagcttgtctagtaagctcaagcacattattcatttgttttaaggatcctgcaaaatgtttttctacaataataaaggtgtttgttttaatattttttagaatcgttctgtcaagatacttgtttttaacagttttgagtaaagggaaccattctgatttggttctttttaaaatttttgactgggtgatcctggaatctgcctatgattttatcaaatgatccgcctgaagctttttt

SEQ ID NO: 99661 - DNA, 237 bp, Glycine max
  Clone ID: PAT_MRT3847_6100C.1
gggattctttccaaaggctacaagtgcggcgtaccaaggtagctttaactgaggtgcatacgatgtgtcctagctagctgcataagacgatgccataggagatggagcaaacagtatatcaacggttaggggtgcccgctgtccccacggtgactatattagggacgccgaggatgagagataagtctatgctgctcaacataaagcgctgagggtgctagcactaggaaggacatg

SEQ ID NO: 99662 - DNA, 307 bp, Glycine max
  Clone ID: PAT_MRT3847_61010C.1
aaaccaccatgcatcatactgaccaaatgatcactaacaatgcacccaccaaagggtgcatgcgacccacggctcccttaaagtgtaatgttacttagccaaccatggaaacccgagttacagtgggtatgccacgacttatgacatgcgctcggctattacgctcttgcaagaatacgagaagacatggttctgcacgatcctgccctactttgctatgaagatgactgtggcaggacgcagcttggtttaccaaggatatcacgcgcttgctggccatagcatgttaggagaagcctgttccaaa

SEQ ID NO: 99663 - DNA, 731 bp, Glycine max
  unsure (1)..(731): unsure at all n locations
  Clone ID: PAT_MRT3847_61011C.1
ggagatgtcgatcttcatttgattaattacatacatcatacccgcaaagaatttttatcctttaattgcctaatcggctcgtagcatccatctgtgaaagtatgggaaactgctgtaagccggcatcatcaatggagtgggacggtgaagactggagtgatttgacgtccaagaagacgagatcaagcaaggtgtttgaagaagctcatactcatggtcatggtcattggttgaatttagggaaagtgcagaaggaaaagcttatggaagcactaagagtttctcctaatgccaacgggaaggtgaagataaagatttcaaagaaagagttggcagaattgttggagaagcaacaacatgttaataagaagcaagtagggagagcttctgcagaacaagttttacttcgcctaataaacgcaagaaatcatgacgctcgtcacagtgtttcccggcccgggctggggaggcccccgctgcaaggtttgccggtggatgatgatgagatcgatcgactagttgtgctcaagggttgcatacatatatatatatattagtcagtatttgtatacctaagaaatccagcatttcttttccaaccttttcatgtaaaataactggattgaggttggaggatttgtaattgatcagttcattatttctgccagtgaataagtgttcttgtctttgtcttgtgtgtgaaaccagatcaaaaatatagatatnnnnna

SEQ ID NO: 99664 - DNA, 467 bp, Glycine max
  Clone ID: PAT_MRT3847_61012C.1
cctgagctgactgactcatatggtgacgtttcaacccaaggaaggcgtacaaaagcaacagaaagtagtaaaggccagacttcctttgcaaagttggagaatagtcgtaggaagcatgttgaacctgatgtagctgtaagaatggatgagtcatctgctaggctcatctcatctcatcaagttcttgaaaatgctgctgattcaaacagtaatcatgatgaatcaaggtcaggtgtcatgggtgaagagtttgcttctgttgtgggtgcagatggaatgcagatgatgcatcaggaggagcaggaccttttgaatatgatggcatctcccacagctcagggtttcagtggtcagactcatgttccaatgaatattgcgccaggtcacctaccatttcactttccaccttccattcttgcatcgatgggatatgctcagagaaatatgggtaacattccctttattga

SEQ ID NO: 99665 - DNA, 316 bp, Glycine max
  Clone ID: PAT_MRT3847_61013C.1
tgattgaagagcatgtatttgctttggttggccagaagggtaaataatccttcttaccaaccaattacctttaggctacattaactaaggtacgcgacaccatctcaaatttttaacagccgcttttaatatttagatccagctgttactattacaaaactcctgggtctgcataaccttattttggttctcgataacgaacatcatctcttttttatgaccaacattccatcttttgtcaaccctattcttctttttccaaccctctgtatcttcccattaaaagagaaagtgccttcaatactacatattgcgt

SEQ ID NO: 99666 - DNA, 413 bp, Glycine max
  Clone ID: PAT_MRT3847_61014C.1
caaaaaaaggggggctccccccccgcattttacaaagggaacaaaaaaaccctagtttaaatttatgggatcctcccaacatccaaaaagtttttggaaaccaattttgcttggccagaaaggaaaaaacgtaattttttttttttgaaaccaaaaaaaaaaaaatccttgtttcattttttaaaaagaagggcactgaattggcccattatttttgaggcccttgaaagggcatcagccataaaaaaattctcaactcccgccccaaaggggggggggcccaccttttaaaaaaaggttggtctaaaaaaaaatggaaatggggaaggctttttttaatcctttttcacaaggttgggggctacagtactgattcaagcacaaacggccccaattgtatcatagggaaaacc

SEQ ID NO: 99667 - DNA, 513 bp, Glycine max
  Clone ID: PAT_MRT3847_61015C.1
gggtaagcaaattgttaattgcttctgcccatttcttcttatcaagctcatacctattagaaatattcctcaggctttcagcttgtttctctacagtttgatcagttgtgagtaacttaaatgtcactttgtcaagttccatctggactgcctccaattgctcattttttgctgttaatgacatccatgcctcatagcattcttttgccttgagatcgcactgcattgtgagctcttttatcttgctcttgtattttgctgtagactttgcctgcataactttcatctgtgatgaaggaatttcaatctgtgcagcacaggagctacatttaatgtaatcacgtgtcacttgtggaactgacgccttcgttgctcttctaatgcaaatcccactaacaactgggcttccagttatactttcaaatcttatgagaataaccccatcatccttaacagacacccttgaatcaaccatctgtaatggcttattggctccaacaactgcatagatat

SEQ ID NO: 99668 - DNA, 344 bp, Glycine max
  Clone ID: PAT_MRT3847_61016C.1
aatgtactaaaaaaattatcattgtgcatgggaactcactgcattttcatgtccatgagggtatatgtgcaacaagtgcctatgctactagtaattacccgtcgacgatcagcactatatgtgcgaatcacagaaaacgctctatttacgattcgctatacattattggacacaataaaacacgtttcgccaattactactttttacaggtctggcctctggaaatcactgtgatcacacgggggtgatctccacaggatccttgaacgtcgggtccttggggtccatagccccgtgcggcattttaacttgctcgtagccgtggccgatccacttgaacttcc

SEQ ID NO: 99669 - DNA, 268 bp, Glycine max
  Clone ID: PAT_MRT3847_61017C.1
acgcgtacgcttccgcttgagtgctgatcgacgtttagtattatagattggtcagtctttatcgcgaacggtcaatttactcagacatgccgactatcaaatactgaacacattatatattcagaataatcatccacagagatccaccatcgaacgcttggctctttaactcggactaacttatcaccagattaccatatctttcggcattactcttccatgcttccctctttcatcataaatggaatccaattcttgtttctatgct

SEQ ID NO: 99670 - DNA, 290 bp, Glycine max
  Clone ID: PAT_MRT3847_61018C.1
ggggggagttccttcttggatcttaccctcttggcggcgtaatattctcattctccggtctatgctacattctccttctcaactaagagatggggctgacttttacctaactttataccccgctctttcctaagaaagaaacgctttttctacattgaagatcttcatgctactattgagactaccatcttttacaatctcaaactaggctaaattgtcacaaccattcgcactattggattcaatgtggagactgaatgatataagaatattatctttactttatcgta

SEQ ID NO: 99671 - DNA, 249 bp, Glycine max
  Clone ID: PAT_MRT3847_61019C.1
ggaagaacaacaccaaattgttcttaatagctgaatttttattacagataaaaaatatctaatgtttaattaaaaattttgtcctctacttacaaggaaaaattaactgggggatctttccaaaaaaaaaaaagacccaaagacaaatggggttaataaaatgcctcggttaacccaagaataaaaaaattaattaaaaatttagagagatagaattaaaagtcttttttggggtcacctaaattttca

SEQ ID NO: 99672 - DNA, 1008 bp, Glycine max
  Clone ID: PAT_MRT3847_6101C.1
tacggctgcgagaagacgacagaaggggaagacatatatgatagccaaataggtattcagacaaggcaaaatgagcttggggtattgcaccataaggtctacgccacgcaagtttgggatctcattcactgtgccagaccgtgtcactgcagagatcaatgacaagaagagagtcatagggaagcaccctttgaggatcactagaattccctcaggaggaccaagtgagtttcataggatcatgcaagaggttgagaaagggccatcatccactttgactctgaagaagagaaaaaattatgatgatgatgacacaaaggaggagtatttggttagtcacaaaagggcctaccatagaagccgcttcaatgattggtatgtccgagtgttttattttgagaattgtggtcagaaccaaccctcagaacctaacacatgagggagggctcttttcactcacttggttcaactttgaagttgctcgccttgccttctttcaattctgtaagtaaatgttatgttataggtgctaccggattaattagtattattattatccttgtaaagcttttgcattttagtttttttttatattttttttaatctttacgaatcagaaaccagggacaagggatctataataattcatgcattctgcgtaaccatcttctagacacctttgtagcttttgcattttggttacctttttcttttactttggtttagtagttcttgttttagtgtttatgtgaagttttggatgttttgatgtcttaaatggtcattgccttatgaaatgtaaatttttactactaaaatcgtgagtatgttatcatcaagtgtgactttagagttttgacaaccaaacactagttggttacagtggagtagattgcaatcccaagtaaattattcttgtaattttagaagttcaaacttcaaatcttaactgccacagttatacccgtggagtttagttatagagaagaaaagaacagttattcaact

SEQ ID NO: 99673 - DNA, 554 bp, Glycine max
  Clone ID: PAT_MRT3847_61020C.1
atgcaaaaagtacgttctgatataatgactcatcgtggttctcactatgatttaggagtaaagactgctctttggttacaaaccactcctttattaaaaaatcgaaataaagaatggcgaaagagaattccacgttttgatattgatgtcaaggaaacctatgatatatttcaaatctattcgccacagatttgggaagaaataattggtatgcaagatgtattgaatctacctacaaaacaaatgattttaaattttggccattatcgatttactcctttaaagcccacgtggttgcacagtatataaaggtcgtgattttttagtccgaaactccccttatcataaagcaacatatgatggtagatacttattatttcaacctaatgacgggggattatctcaaataggaccgacttcaagagtgactggtagaatggatggtatgaacgagtatggtttagttatggcatataattttatgcatcgtaacacgcctgcaaatggatttgtatgttacatggttggtcggctaactacttgaaaatttgaag

SEQ ID NO: 99674 - DNA, 590 bp, Glycine max
  unsure (1)..(590): unsure at all n locations
  Clone ID: PAT_MRT3847_61021C.1
ggctcgagcgaacctcaacaaacacaaataccgtctcccatcattccttacagtttcaaacacttgtttttcttctctcttctccttttttttctgtgtggatctacacccactaagatgttacccctattctgaaaatggaaaacaatcatagtgcagctggaacacaagatagttctatgatgaagtctgttgatcaaagagtacgttcaaaagcgcgtaatgacataatgactcgacgtctgaagaatcgagagagacaacgaagatatagggcacgtaagcgtctagaagccgaaacaaagaagtcatttgttgtagaagagacaccagctgtgcaagtagaactacaaccaaacaggaaccacaacaacaacaacaacttcgtcacccgtatctattgtaaacgagattggaaaaaggatgcaagacgagcccatgtttttaagcatcaacaaatgaatggatctattgatcctcccaccataattagtgtacctgaggtgacatgcttagccattgnaaacaagccagaaacagttccagagagggaaattaagtctggatcttctggtgttgtagtactgata

SEQ ID NO: 99675 - DNA, 392 bp, Glycine max
  Clone ID: PAT_MRT3847_61022C.1
tttttttttttttctttcatttacttcttacacccatttttttgggagtgttcaacaatcattttttccatcaaatgcttgatataaaaagcatgtttttctttccgggtttgcttttcatcttgatccaggataccaaccttagcattcttgtttgagggaaacattctatcctttctatgtacacgcgccctatataaattttttagacttcggtaactatctaatgacccttttaaaaggttatccattttctaagataaaaataggggatcaatgaacaattgattatattggaagcccaactgtttgttaattaatgatgaacggcgcaaagtaaggaatcttttcctaccgaaaggggtggccactaaaaatgcttttatttcttt

SEQ ID NO: 99676 - DNA, 199 bp, Glycine max
  unsure (1)..(199): unsure at all n locations
  Clone ID: PAT_MRT3847_61023C.1
ctcgagccgcaccttggatggttacttgtgtctccaatcctactgcaaatcctatacgccaatggctccagcggacaacctttntttgctttcccacatcacatacctcatctctcatgaagacaccttcatcaggcccctcgctgtctacctcctgcaagaagatgcctttaagctcgacttcatgctccaccgctcc

SEQ ID NO: 99677 - DNA, 287 bp, Glycine max
  Clone ID: PAT_MRT3847_61024C.1
aagacgacagaaggggaatatattgagaaaccatgtgggggaaaaccggatggacccatttgcataacttgagctctaagattgtctaaaacaattatggtgatagttgaatcatgatagttgggtgcttcctcacttggctctttttcattttattttatttttctaaaatacggtgtttattttttccccctaaagggaggtgacgtagagtaatgtatcagatgaatatgtttctaccaatagttgaactccacttaatgaataataatggctttcacttatct

SEQ ID NO: 99678 - DNA, 446 bp, Glycine max
  Clone ID: PAT_MRT3847_61025C.1
cccacgcgtccggtgttggattcatccaatgggattttagacaaagctggcagatggcacgtggaggttgagttcagtccacattctgcatcgcaagatcatgttaacccacaaccaagtccagaaagtgaatcaaatgacattggaactgggtttgccatgttcagtcaaaattttggggagtttagttcagggtcagggccaaatcaaaatttggaagtactgaagaaggctgacatttatcccactaatatggaattactgaaatttgaaggtgcaactccccatggtactattgattcatctctcacatcagaatctaatcaacctgatggatggaactttggatttaatttcaattctagttctgtgggtgaagacaatcatagttcagattcatatttcaaaaccaaaaacaatcaggatgataacaacagaaacaatgc

SEQ ID NO: 99679 - DNA, 709 bp, Glycine max
  Clone ID: PAT_MRT3847_61026C.1
cggtccggaattcccttgtcgacccccacgacccgcgacggcggtggtgtacgaagagagcgagagcaggaggtgagcggcactctctccgactacagatatcttcaccacaacagataaaatgaggtacatgaagcccttgccattgtttcatgatttgaagaatacaactcctcagcgcggaaggttgcttggtttggatgtcggggataaatatgttggccttgctctttctgactttgataacaatattgcttcacctttcaacgttctcgtcaggaagaagacaaatattagtttaatggcttctgatttagagagtctgattgctaaatattccttgaagggctttgttattggcatcccttttgacaaacatcaagtgtcttctgatgctatgcaagtgaaggtcttcattgataacctctgtagaacaaaaatgcttgaaggtgtaaagtatacatactggaatgagagcttcacgtcaaagaatgtggaattgctgttaaagcctttgaacttgaatcatccagttctctccaagactatgctagacaagtttgctgcagtaggaatacttcaggggtacctggattttgtcaacaggaaaatgaagctgaagcaacggagtaaggaactcttaataatattatttttcaagcccgctaatgtgaaggcatgcatcagaaatcacaactagatacctctg

SEQ ID NO: 99680 - DNA, 419 bp, Glycine max
  Clone ID: PAT_MRT3847_61027C.1
gggaaaacaaagggcaatatttcccataaaggaaaatcaatttacaaacaactggaaattggctaaaaatcccaccacctatgaaattttttcaagattcccggatttaactaaaccagaacctaaatagcggaggcggcaacaaaaattgggggagcccctcttttcacaagtggggtgccaggggggggaaattgcaacaattttatcaggggatccccccttttcccttggtgggggacagagcccaaaaaaaaggggggaaaaggaaccccctaacaatggggaaccccaaaaaaagggcccctggagttaccccttccaatccaccatttttttttttttcccacaaataggcgggccccgaacaaaaaaatgggcctcatttttatgcccccaaccctccaaaaccaaaccct

SEQ ID NO: 99681 - DNA, 1288 bp, Glycine max
  Clone ID: PAT_MRT3847_61028C.1
gcgacccacgcgtctccaaccttacttttccgtctcttgttttttctttccttccttctctcatcttcccagccgccgcttcatactgtcttcactccgttgcctgtgtttttctttcttcctttatttctattcaacggatcggaacggtgcactgtgaaagggtttttgttttgtgagtgtattaaaaaatgctgcgtagaaacatccgtttgaggagagagtatttgtaccgaaagagcttagaaggcaaagaacgcttgctctacgaaaagaagcgcaaaatcagagaagctcttcaagaagggaaacccatacccactgaactcagaaacgaggaagctgctcttcgccgcgaaatcgacctcgaagatgaaaacaccgctgttccgagaacgcacattgacgatgagtatgcttatgctgcggaaaaggatcctaaaattttgctgactacttccagggatccgagtgctcctcttcaacagtttgttaaggagttgagttttgtgtttcccaatgcacagaggatgaatcgcggtggtcaggttatctcagagattatagaatcttgtcgtgcacatgactatacagatgttgttttggtccatgaacatcgtggtgtaccagacggtttaattgtttgccatctaccatttggtccaactgcatattttggattactcaacgtggttaccaggcatgaaattaaagacaagaaagccattggaacaatgcctgaggcttatccacatctgattctcgataatttctcaactaagttaggtgacagaaccgcaaacattctgaagcatctttttccagtgccaaaaccagacacaaaacgtattgtcaccttttccaaccagtctgactatatctcattcaggcatcatatttatgaaaagcatgggggccctaaatctatagaactgaaggaaattggtccccggtttgagttacggctttatcagataaagttgggaacggtggatcaagctgaagctcaaatagaatgggtcatcagaccttacatgaacaccaccaaaaagcggaaatttctcagtaattgatgcaagcatagtgtttgtgcagctaaaccatatgattatacattttgagctcgcatttcactgactgtactttaaggatgtattaagttgattaggttgataaacaagctttttttttttttttttttaatgaaaacactgtcttttgacagagcaaagttttgagcaaatgaaaatgaaaatgtacttgcttttggatgaaaattattttttgg

SEQ ID NO: 99682 - DNA, 244 bp, Glycine max
  Clone ID: PAT_MRT3847_61029C.1
ctcgagtcgcttcggctcgatgtaaagactagaactattgcaatctcgtggatatcagacgacaccatgaccatgaccggattcatggtcttgtgtttcacggtcgcatgtattgcacagaccacgtcaggtggatctggttctaccgaggctggcgatcacattacaaaagtttctgattcgctatcaggatgtccggagtatggcagcactgacttagtatgaattgcagctaacgctgccg

SEQ ID NO: 99683 - DNA, 235 bp, Glycine max
  Clone ID: PAT_MRT3847_6102C.1
atgctcctgtcacatctccaaacactgatggcactggcaccatggagatactgtccaagatgttgaaaattgccgaagtgaaaccctatgtggtgggccagtttcacaatgactcattcacgggcgatgttcgagaacgtgtgatggatcattgcaaaggtcgggcatttgcctcttgcgtgcatcactgcatcagtccatgggctacctggtggctcagaacggcttgcagctg

SEQ ID NO: 99684 - DNA, 397 bp, Glycine max
  Clone ID: PAT_MRT3847_61030C.1
ggagaatgacgcatttagggggtacaccgggcggccacgactctctgatcctgcagggttctcaagcctgaactatgccagtatcagtggtgcggagatataccgaggatagggcattatatgctgtcgtagtgatagtcacgttcgcttgtactggactgacgtgcgatatgttccacacatatcgctgaggcctgaactggtcacctggagtgcactcgggagattgcacgcccgtgcggacagtcgctctgaagctgggagggcgaggagacattgctggcattagccttattttaaggacattgctggagcgaccttggcagattccataaaagagagctgggaagcctatgcaggagatgctacttgggcagctgatcttctagaaagtcat

SEQ ID NO: 99685 - DNA, 377 bp, Glycine max
  Clone ID: PAT_MRT3847_61031C.1
acgggccactccccaaaagaaggaaactggggcataccctaaaaaaaataaaacaacttgggtggttttaacgggtccctatcacctttaaaaggggggtgtgggaccaactagtttgggggggaacacaagcggttacaattttattaaccgcccataggggggggaaaaaaagaagggggggaacgccccacttaaaactgaagggaaattacaagattgttcctggcttcctgcttgaaaaaacatccgccaaaaaaggggaacttttgttaaaagaaaaatttcaataagactctttaatacatttttttaaacacaccttttttttggttaaaaattattgaaaaatacaaatttttttctcactttttttt

SEQ ID NO: 99686 - DNA, 193 bp, Glycine max
  Clone ID: PAT_MRT3847_61032C.1
ccgagcaagccattggattctccgtcaaagtggtctagctttggtaaacactcgaatgttgcttatttaacatagctgccacctgtttttctgcttcttttccaatctcgctagacgccatgcttgtcagcaaagggtgcacgttatttggatgtgtctgctgctgtgcctgctttttcatatttccaatgac

SEQ ID NO: 99687 - DNA, 1544 bp, Glycine max
  Clone ID: PAT_MRT3847_61033C.1
gagaaacaccatcatcttgggtggtgtcatctttgttgttggtggtgcccttaatggaggtgctgaaaatattggtatgctcattttgggtcgtgtgctacttggttttggggtcggtttcactaatcaagctgcaccgttgtatctctctgaaatcgcaccaccgaaatggcgaggagcattcaacacaggcttccaattcttcttaggagttggagcgcttatcgctggctgcataaacttcgcaaccgcgaaacacacgtggggatggcgagtctctcttggccttgcagtggtgcctgcatcagttatgacaattggtgcattgctcataactgacacccccagcagcttggttgaacgtggcaaaatagagcaagccagaaaagccctacgcaaagcaagaggatcctccattgatgtggaacctgaattggaagaactcattaagtggtcacaaattgctaaatctatgaagcaggaacccttcaagaccatatttgagaggcagtatcgaccccacttggccatggcaattgctatcccattttttcagcagatgacagggattaacatcgttgcattctattcacctaacctctttcagtctgtgggtttgggacacgatgccgctttactttctgccgttatacttggagcagtcaaccttgtctctcctcgtggcattctaccgcttttctgtcgctttggtcgaaggtttttgttcgtaaccggtggcatatgcatgtttgtttgccagattgcggtgtcaattctgctagcagtggtgactggtgttcatggtacaaaggacgtgtcgaagggcagtgcaattgtggtgttggtgctactctgttgctactcggcaggttttggttggtcgtgggggcctctgacgtggctaattccgagtgaaattttccccttaaaaatcagaaccactggacaaagcattgctgttggtgtgcagttcataatcatatttatattatcccagacattcttgtctatgctatgccactttaagtttgcctctttcgtgttctacgcgggttggattatagtgatgacaatctttgttatattcttcgtgccagagactaaaggaattcctttggagtcaatgtacaccatatggggcaaacactggttttggcgtcggtatgtgaaagatgttgagcaagaaaatcttccatgaactataaatatcactttgtttgtaagaaaccactaaaaattattgactttcccttcctacagatatataaggtgctgagtatatgtagaaaatctctaccataataaactcttctagttataactatttgtatggcactcctataagggaagtttaatgtatgtcagttgtgcctctatttttctttaatgcgagtctgcaacaactttgtagggttatgagcatttcatcgtttcacacctgatgcatatgtttcgcgtcaatcgaatttttctaaatttaggtagagttgtaagtcaaaagacaagatgcatttaaatgcaaagtaaaatattacatattacta

SEQ ID NO: 99688 - DNA, 367 bp, Glycine max
  Clone ID: PAT_MRT3847_61034C.1
ggaaaaggaaggagactttcctttttttttttatgggatttttgtttaaaaaatgaattggaaggggttgtcccttagtgccccccccggaaacctgaaaaatgaacttgagctcttttattacccccttgtccaaatctaaggagggaaccattttggacctccccccgggggggcccttgtgataatcccacaaaaaaaatttcttaactggagtagggggggggcttaggcatatccttgaccaatccccaaaccagctgggtctttggggggttgtccttcttcctaaaggccctgttgggaaaaaaaccctccgtcaatggttgccccaggtaacgattttttgccatttccccccctaatt

SEQ ID NO: 99689 - DNA, 390 bp, Glycine max
  Clone ID: PAT_MRT3847_61035C.1
agaggcggggactatatttttaggggggatctcataatgtatgagccatttacacaacacattagacatacatgcttccgtgcccacacatgaactatcacgggaggaccttaaaggagaatggcttaacatcacactgaaacttgattaagaatctactcttcaccaaggaataaaacatgtgattttttggtctcaaaaatcccaacaatgatttacaacatgcttgtcacctaaaccattgtgggcctaaactgaggcctagatggcttacaccacattgccgggtttagcatccaattaactatctcaaaatgttgctctctatcatcaaactccctaatttagccatgcaaaatttaatccactgtgaagtactaaaacatttta

SEQ ID NO: 99690 - DNA, 1786 bp, Glycine max
  Clone ID: PAT_MRT3847_61036C.1
tacggctgcgagaagacgacagaaggggggtgctggcgatggaaactatgctcacaacaagtgacagagacagagtagaaccaaaagattcataataactaacattagaaactaggtgaaagtaactgcacagacacacaacacatcttccttaatttctccgtccatttccctcccataaataaatctttcatttccatctttcttgggtgatccaatggcgagcgacccttttccagggattgggagttgtgaacccatcattggcttcttcaaactccaacaagttccatcttccttctcgttccctctcagagaggaaagatggcatttttgtggtcagatctgatgcaacaagggtaagcagcaaggttctgaaggctggagctcgtaagcatgaattgttagttactaatgcagttgcaacaaaggaaggcccgttctgcggcttctacatcaaaatctgggcatgaacttctcctttttgaggccctacgtgaaggtttggaagaagaaatggagagggatccttggtatgtgtcatgggtacaaccttgccatcatccaaagtttggggaccttagagtcgctttccgcgaccatttgaagaaccctgttgcatgtcaattgagaacaccattggttcagctccagcaacgcatagccggactcattattcttgttgcttgcacaaacattggagagctctttgatcgaactttgaacttcggagacacgaacattctgtagttgctccactccgcgacatgtagaggatttctaagattacaatctttctttgttcgcgccaataaggaccatagggtgcaaacccaaacatggcttggttgtagcacatgagttcaatggcaagaagcttggggcgagacgaaacgacgatgtcgtttttggtgaagcattccttagcaatttcccagttgctgattaccaaaacctttttgacaccattgttgatggtgaatatgggtccatacttatcagccaaagcacccaaaaccctatgaggtgtctctgaaccactcaatagtggtaggtgaccaagtattggccatgcacctgcaactttgggagcctcttttttacctaatgcaaatttgaagggattatacaaaaacaaaaagaagagggttatagaaagaactccaatggcagtggcatttaggtaatttagaacaaactccattttagatagagaagattgtattgtttattgcatggcatgcttctagacactggtgaacaacggggtaagaccctgaaagtaaattcaatatcagagtctttgaaaccattcgatcttcacacaattgggaagttcggtgaagaagacacaccgtgtaactaattgtggaagagtgtaggcatgccaggtggaaattggtgctagtttgacagctgcaattactgaaaatttccatgactatttggatgcccctatagtatgtttatcctctcaggatgtgccaactccttatgctggaacattggaggaatggacagtagttcaacctgctcagattgtgactgcagttgagcaactctgccagtgattgctacaaaacactagcaattgtgcttgttaaattaagctagaattttcatcatggctttctcttttccttttatttctgaagtctatagcccataactttaaattgttatttaacttctgttaatctttgcaattttttttaaaagaagaatatttagaacctatggaattgcactgctgctaaatattcacctgcacaagacaaaccagctg

SEQ ID NO: 99691 - DNA, 772 bp, Glycine max
  Clone ID: PAT_MRT3847_61037C.1
gatctatcttaggattttcaaacagtgggtttccactgtcctagagttatggcaacttactacacaagttcgagtaatgaaagggatgcagtgcctatgttgtgtcttagggaacctttgcctgattcatatcccgagacaccaattttgccgagcaatatgtctctgaatatgatccagagttcatatacagaagcattgtccggcaattctcagccgcaaaacaattgctttgtgattccatcaccatcagtaggtgcatcacattccactcctgaacaacaagaaatcttggccaatattggtgggttccaaaccggggttcatgatttcagtgcatggagggagggtagaagtgagatgctagtcagacaaactatggatggacagaacttacaaggtcagggattatctctcagccttggaacccacataccctcaggaattcaaatgccttctatccatgataggaatcacaggccaagttttgattcatttttgggtactaatccatcaagttcgggcaacgaggctgcctaccaaaagggttcatctagagatgagggtatgagacattctgaaaatcttccacctggcttacctgaagctaatcaagatttggacaaagcggatttttcaattcatagaatgtctagtgttggaagaacagttcctagcttcaaatacctcaaggcagtgcaactactacttgatgaagttgttgacatccgaaaagctattaaaagacctgttgtgagaagttatagcacac

SEQ ID NO: 99692 - DNA, 2007 bp, Glycine max
  Clone ID: PAT_MRT3847_61038C.1
cggacgcgtgggcggacgcgtgggtttttgttcgtccctgtatgttcaagatttctcacatctcggcctcattatttgtttagatccggattagagaatccgtaagtgtttgtgtttattccggactgtgcgttccgtaacatggaggtgcatgtcgaaattggtgaggtgcaggaagcaacgaccccactataaacggggttaagtccaatcagagaaggcaaaggcatcatcggtgatggaaactatgctcacaagtgacagagtagaagcaaaagattttaattttagtaataactaacataataaactaggtgaacgtaactgcacagacacaactactacataaatcttaccttaatttctccgcccacttccctcctataaataaatcttccattctctctcttcatttcatctccatctttcttgggtgatccaatggcgacccttttccagggattgggagttgtgaacccatcattgtcttcttccaactccaacaacttcctgctttcttctcgtacatccctctctgagagaaaagatggcatatttgtagtcagatctgatgcaagggtaagcagcaaggttctgaaggccggagctcgcaagcatgaattgttagttactaatgcagtcgcaacaaaggaaggcagtcctgcggcttctacatcaaaatctgggcatgaacttctcctttttgaggccctacgtgaaggtttggaagaagaaatggagagggatccttgtgtatgtgtcatgggcgaagatgtaggtcactatggaggatcctacaaggtgactaaaggtcttgccacaaagtttggggaccttagagttttggacacccctattgctgagaactccttcacgggcatgggcattggggctgccatgactggtctgaggccagttgttgagggcatgaacatgggattcctacttctggcatttaaccagatctctaacaattgtggcatgctccattacacatctggaggccagttcaagataccaatcgtcattcgtggacctggtggagttgggcggcaacttggagcagaacactcgcagcgattggagtcgtattttcagtcaatccctggaatccagatggtggcttgctcaaccccttacaatgccaagggcttgatgaaagctgcaatccggagtgagaaccctgtgattcttttcgagcatgttttgctttataacctcaaggagagaattccagatgaagagtatgtattgtcacttgaagaagctgagatggttaggcctggggagcatgttacaatattaacgtactccaggatgaggtatcatgtcatgcaagctgctaagacactggtgaacaaggggtatgaccctgaagtaattgatatcaggtctttgaaaccattcgatcttcacacaattgggaattcggtgaagaagacacatcgtgtgctaattgtggaagagtgtatgcgaacgggtggaattggtgctagtttgacagctgctattactgaaaatttccatgactatttggatgcccctatagtatgtttatcctctcaggatgtgccaactccttatgctggaacattggaggaatggacagtggttcaacctgctcaaattgtgactgcagtcgagcagctctgcaagtgatttctacaaaacactagcaattaggatatggtttttggtaaagctattgtgcttgttaaattaagcttgaattttcattataattttctcttttcctattatttctgaagtctaaagcccataactttaaattgttgtttaatttctgatattctttgcgtttttttttttataaaaagagtatttagaactgccaacccaatctaaatctttctcagcttgttcatctgcataatttatgtggtgtgtgtgtaagagttaggccaagccttataactagggagatatttgtagtcagtgctgaactgctgaagcaagcaaatatctgttataaaccttgtttattct

SEQ ID NO: 99693 - DNA, 490 bp, Glycine max
  Clone ID: PAT_MRT3847_61039C.1
tcgtccgtttcattgttttgttttaactgtttcgaatccctgcgcttgcttaggtgcttcgtcaatgcttcttatcgcttttcttcttcaattactcttcatgcttctttctgatctttgattttggcacaaaaacttaccttgcttcattgcttggtgccttaatttcgtgttcatctaatgcatttttaattgttctacacaaataaatgttttggagttcatttttggttgatttgattgctttgtgttagcaattcagggaggaactgttgaagtggattgaccctgcactgctctcaatttgctgctgaaggaaagggttgggatgggttgtggcttttccaagtacacagtgtgctgcacgggttctgagcaagatggtccggctgctgaggctcaggttgatggtggaaagtaagagaatgtgcctatatttctgttgaggctgctctgagacttgccgtggtttcatgaattcacaattgat

SEQ ID NO: 99694 - DNA, 674 bp, Glycine max
  Clone ID: PAT_MRT3847_6103C.1
atgcgccgcgacgcgaagagctggatttctatagagggcgcgctcttttttttttttttttaactatcaattctagaagctttattctgctattctgtgaacaagctagtgaagcagaaacaagctctcagctcttggaaaagacccgaagagggaagcaataatatatattattctttatgtacaaggagaaaacaaggctgagagaaagaaacatggaattttttttttataatgaattatgtatatataatactatatcataaccagcatttttttttttgtaaaagtgggggaatctgaatgaaagatccccaattgtgtctctctcaagctgcattggctgaaaaccaacactgttgacaccaccacctgcatcaaacccttcatggggcaatgactgtatttggctctcattagaatggggtgccaattgaacttcttgtgataatggcaatggcaacactgaaggagataatgaactcaatcttgtactttctaaacttgaagccaatgttctatcccaaaggaagacatgaaggagaataggaactttgctgtgtctatgcaaggacagtttctggctcaatgaaacagcgccataacacctaatggctgctgttgaacagaccatccatggcaggactctgtgatttgaaagcctagatactacc

SEQ ID NO: 99695 - DNA, 823 bp, Glycine max
  Clone ID: PAT_MRT3847_61040C.1
gaggatgcttccgcctcttacctcatgtcaaaaaagaatgtctccacctccttgtgttaattatttctgtccaatgcatctttctgatcgtggacatccaagcttgcacttaactcatgttacattcagtcctgatggacacgaggttctcctcagctatagtggagagcacgtttacttgatgaatgtaaatcatgctggagtgaatgagatgcaatatacttcaggagatgattcaaagctgatgacatactctccaacaattaatgggtcagagatgcagccttgtgtatctaatgtcttcccaaatggatttcctattaaaaagaacattgctgcaaagcttgacaagtgcaggaaacaaataaaatatgctaagaaatcattggacaatgggataccctattatggaattgatgcatgtaatgaggttttgaatggctatagccatattattgggcctgcactgaaacatgaatgcttgtgtactcgtgctgcactattggtcaagaggaagtggaaaaacgatgctcatatcgctataagagactgctatgctgctagggtaattgataattcctcttacaaagcactatactatatgtcagaggcattgtcacagttgggtagacatgaagatgctttggagtttgctgttgcttcccattctttggccccatccaaatctgaagttgcagaaagagtagcgaatgtgaacaagggacattgctttggctgaagctgaaaaaagtagtcagaccaatgatggggcatcaaggtttgatagtaggggtggaagaatattatcattaagcgacatact

SEQ ID NO: 99696 - DNA, 209 bp, Glycine max
  Clone ID: PAT_MRT3847_61041C.1
tctctttttttctcctccccttttcttcttctctttttagccctaccaataccccttttattgctttctagtccatggttacaactgccaagttttttaacaccttgctagcggctggtcgcgctggtttcgcccactcgggccagcaccaccacgtttgctcccccacctggccgccaacattacacgacttttccggcggcccgtca

SEQ ID NO: 99697 - DNA, 880 bp, Glycine max
  Clone ID: PAT_MRT3847_61042C.1
aagacaagaacgagagaaaggaggttcaagattcaccggaaaaggagggagaagggtgcaatcggacgcgtgggtatattatttgttctgttaatgatgactgctctctttttgtgattaaatggtgtatggacttttatttcgtaacttatgaatgatcccacatattttatgtttttattttggttttaactataatgattttttttatcagtgcaggaaagaaaagaaaaagaagcccttgctgcagaaggggggtggacagttgttgtgcaccataagggtagaaagaaaactactgattctgagagtggaattgcagtgggctctgttgctcaagctgctgtagagaataaaatgaccaaaaagaaacataaagaagttggtcaagatttctatcgctttcaaagaagagaagcacagagaaatgaaatcatgacactgcagagcaaatttgaggaggataaaaaacgtctgcagcagatgagagctgccaggaaatttagaccttattagacaatgtttttggcgtacaaggttcacagtagtttttttggtggatttggcgtacaaggtacttatgtagtcttgaacttgagttatgccattgctcttaaattcaaaacgaaagttcatttatcattccaattttgtcgaaagtatttgtacaattagcgtaggtagtagttattgagttgtagtatgactttgcagggttgacaatgctcataagcccctttcgatctgtctgttattgtgactgcattttggtccttttgatattgttttaaacttgacaatatcgctaattgttagatacttatttactccaaaaaaaaaaaaaaaaaaaaaaaaaaaaaaaaaaaaaaaaaaaaaaaaa

SEQ ID NO: 99698 - DNA, 284 bp, Glycine max
  unsure (1)..(284): unsure at all n locations
  Clone ID: PAT_MRT3847_61043C.1
gccacgcgaccgggggacccgacgcnggccataaanagagcacgaaacccagcccccgcacacacaccaaagcgccnnacaagcaccacgagagaaagagaaggaaaaagaaaaagaaagacgcncacgcaancaccaagaccangaaagaccccagagcacaaaanacagcgangggaagaggacaccnnggancaanggnggaaccaggnaaacncagacgaagccaccacccngcactgaccaacaccaagcagagcctaaccccacccggcaaccaagac

SEQ ID NO: 99699 - DNA, 163 bp, Glycine max
  Clone ID: PAT_MRT3847_61044C.1
acccacgcgttcgatgaaattgaaaagtgaagtttagagatggaagaagaaaaagcagcggcgtactacgacgagctggcccgtaagggctagggagctgcgaggcttaagctaggtcttggcttttccttttcatcaccaaacgacttcgttcctaaactct

SEQ ID NO: 99700 - DNA, 453 bp, Glycine max
  Clone ID: PAT_MRT3847_61045C.1
ggctcgagcttaattatttttccccttatttttaggatttttcttatttacttttctcaaaaaatttaacagttatttgtgtttcattacccaaaagcttatcatcatgactagagtagacattgttacctagattttttttttatgtttatattttatctcaatggactagcaaatggtttagttgaagatagaaaccaatggtgtcttttgatttatgcagctagcctcacctagtgaaaaatacttgatggctgcttcattataaaagatacaagctttagatacacaactcaactcttaaaacaaaaagaagagaacttcccttctatcaatgttaatgtagttcatgtcatctctagaccattattatcctcagaatgtccttattcttgatcacttaaaatttgtattttgggtttatatctatcataggggaaatgaggcatcact

SEQ ID NO: 99701 - DNA, 220 bp, Glycine max
  Clone ID: PAT_MRT3847_61046C.1
ctttgagcagagcaaggctgatccatctcactgggcaaaaatctcccccggtggactcaagggtatcatgaggcatacacatggccaatttactcggacaggctcttgacactcactggtgtgtatcgcttctggaagcacgtgaccaatcttgaacgccgtgcgagcaaacgttacctcgagatgttctatgctctccagtaacgcaaattggctgagt

SEQ ID NO: 99702 - DNA, 122 bp, Glycine max
  Clone ID: PAT_MRT3847_61047C.1
ccgcaaatgatcgacgagaggaatagtgagcggttgcctgcggtgcgtgtcttgactcgaaaatccatgatcccgacgctgaacaacctggctaactttaggtttatggctccattatctcc

SEQ ID NO: 99703 - DNA, 419 bp, Glycine max
  Clone ID: PAT_MRT3847_61048C.1
ccacgcgtccgaattcgagcggccgctttttttttttttttttttttttttttttaagatgacattagggataattttcaatagatttttgcaaaggaaattgcttgccacaataactaataagtgaacctttttcatccagaacgcactacttgcaattgttacttaaaaggatattgagaagggatgagatactactagttattattacatactagaaaggcaaaagtaactattttatgcttgcattgttttgtaaatgcctccttgtagtctccgtgatgtcctgctgttttcttctcaataaatcttctatttcatcctggtattgttgttcaatcatctctaactctattctcaactcatccccaggttcaaagaaggaggaagtactaacgggatgacaagagaaattcatc

SEQ ID NO: 99704 - DNA, 214 bp, Glycine max
  Clone ID: PAT_MRT3847_61049C.1
gggctcgagctacaaaaatcaaatctggtgtggggagtgttgaaaacggaaatggggactggaacatgggttttgggggttattatgggcgcatttttatgcccttactctcttgctctcactcaagatggtgtggcggtagtggaaatcaaaaggacggtgaatgatgctaagattgttctgagcaactggcaagagtttgatgaatcttctt

SEQ ID NO: 99705 - DNA, 403 bp, Glycine max
  unsure (1)..(403): unsure at all n locations
  Clone ID: PAT_MRT3847_6104C.1
gcgtaacgggggaagaatgatggttactttcaagaatccgaatgagggacccaaacgaatgtgggattgaanaagggtgtaacgtgctggtttgcgcgtgcaccaaaaancctcgtcatgagaggtgaactgatatnggatngactgacgctgctcgtttcaattctgaatgcannaatatattatnntaccttaccaattattattctgtatcgggtgattgtgaattgaaaaaatctagaactatngatgttgccctgttagtctgaacactctcttgttttaaaggggaacacattctaaattattgattaccgatggttcaaaagatgttaaagcttttcgttgtgttatctggtaacaaaaagagatactgcttagtctatcaaaaaaaaaagaaaaa

SEQ ID NO: 99706 - DNA, 525 bp, Glycine max
  unsure (1)..(525): unsure at all n locations
  Clone ID: PAT_MRT3847_61050C.1
taccagagtcctgtcactaaaaacggtgcggtgggggtttatttaaggtacggggtgtaaagcctgtcgatcaactaaatcctgtctaacgttattcctcctaacctcttatcgaactactgccttattaacctcctgtcgaacgtgctgttcctgattcctcctcgcaacaacttctatacaggttcgttcccaattcgactctgttctcacagttccaacgattacaacactatccaatggtgcagttccaactgtttcggttactcaggccgttcgcacagtctctaccatggtaacattcattggtcagggtacactgttcttcgtgttctttgttaccaacttcttcaccttgatggccggccgtgtggtcaacatattaagtgtgctctgaggtatcttaactcgcgtatgagtagctttaaccagaggtaatgtctgacctcgnaggaccctcactctctggaaagtgaaggaggcaggtgtgcgagacatcagggtaagggtaactcggtggacgga

SEQ ID NO: 99707 - DNA, 286 bp, Glycine max
  Clone ID: PAT_MRT3847_61051C.1
ctgaaatccagaggaacccctggtgattggagccatatcattaagcaaattgggatgtttactttcactgggctgaatagcgaacaagtcgcattcatgaggcaggaataccacatttatatgacatctgatgggaggatcagcatggccggtttgagcatgaggactgtgccccatcttgcagatgccatacacgctgcagttactcaactgaaatgaggatagtatcgcagctttcgtgaataaaacctgaatcacccacaacaatgttctaagtactcagcca

SEQ ID NO: 99708 - DNA, 546 bp, Glycine max
  Clone ID: PAT_MRT3847_61052C.1
aaaaaaacaattagcttagagattaatcaaactttaatgtgcatttgttgataacaacaagaatagaactgatctacattttacaaccccctctttattttttcttttgacgaagggccacaggaatcaaccaacatattaggtaaacaacagaggcgacaagtatcactacaattggaaaaacaatatcttcacaatttgcaaaacaatctcttgtgcctgtgcaatgtccctgtcacaatggagactccttccacggtaatcaattaaggccttcaacaatagcccttctgaattcaccatggggcagaaagaagagacatgcccacctgtgacccatctcacctcagaacctggccaggctttctgaagttcaaggaccgagtgtttcgggatgtatccatcatcagtggcagaaacaaaaataacagcattggggattttgggaattggaaaacatgtcacttctgttagagataatacatttcgtagccgctctctcacttcctcaagagtcatttcagccttctgagttgcaagatcccc

SEQ ID NO: 99709 - DNA, 323 bp, Glycine max
  Clone ID: PAT_MRT3847_61053C.1
atgcggaccttctcagaataggaacgctttgtcatttgccagccccaagagaaaaaattatagtatgggacctgcaagactctattggtgtgccagaaaggcaggtacgcaaccaataccgttggaaaggggacctgttccctgccaaattactagaatccagtcaggaaaagtcgatcgggagaaaataaatctagagctgggacaggcccgcttcggggaaaaacaaaggtataaggggctgaagtttcccctcagtcatgaacatgcaaaggttctttgcaaaagctgcactttaggatttgaaccgttgattaacctgc

SEQ ID NO: 99710 - DNA, 1038 bp, Glycine max
  Clone ID: PAT_MRT3847_61054C.1
gtccgaacgaacgcgcggtgagtagttcaatgaatgaatgaataatcaagaccgattttgataataaaaaaaaaaaagtcgctcacgtagcgtgttgtggttaactaactccgttccgttccgttctgttctgttccgttacaatggcggaaacctctgctgcactatgcttctccacattcagattctctttcgctccgtcccgttctccttccaagaccttcttcaacaacagctccttccatttccctcctccttctagttctcacacgtgtcttctccatttcgctcccaaagcctccccctccggcaacttctccggcgacgattctttcggttttttcccttggtccgattccgacaacaacgaaattcaatggattcctgaggagagaattacgttgttcactgctgatggattgatccagattggaggctccatggttcctcgccgtgtcagctcttcagataagaagcacgggaaatccaaaactgctaaaaaatttcaacggtttcaggagagtaattacatgaatcccaatcaaggcctttgtctgggtgcactctttgatattgctgctactaatggacttgatatgggcaggagactttgtatttttggtttctgccgttcaattgagatgcttagtgatgtggtggaagacactgttttagagcacggtggggagaaccaatcttatatgtcagatcattgccgcggagaaggcaagcaaaggtgatttacatgaaaagctaaccatgactgttgcagtgccattgttatggggggttcctccagcttttgagacgcttcacctggctgttaaaagtggtggagggattgtagaaaaggttttttggcaatgggcctttctgtaaatacatattttaggtctcccctcccctaaccattctttttgccctctgtacataaaattgtatctctctgtatatgcccataaaaaaattaatgtccttgtatctctatacttgtacaataaactaatgtcatgactgtatccaattgtccgttcattg

SEQ ID NO: 99711 - DNA, 216 bp, Glycine max
  Clone ID: PAT_MRT3847_61055C.1
cttgatagttagtctctttggagcatagatctaaggtctgccaaatcatgaagggtgttaagatcatagtgtgtgttttgcaacaatggctaagttcgttactgctatgatcttcagcatctatgccatgtccatacttcaaacagtggtaatggctactattgatcaaggaagccacttgtatgacaacaagagtcaatatcgaagtggaagtgt

SEQ ID NO: 99712 - DNA, 277 bp, Glycine max
  unsure (1)..(277): unsure at all n locations
  Clone ID: PAT_MRT3847_61056C.1
aggacacacacaaataggcttaagcngcctttattactcacattttttctcatcattacactagaacacaatgtgagagtttaagaccctcatacaaatctcccaacaataaccagatgactctaactgacttccctacattacaaaacatccttctccttcctaacaatattgccgtcatgttttattacccacttgattcctatcttacctatattccccacttaccaattatagatgctaatcaagacatcacacacacattatccaataacct

SEQ ID NO: 99713 - DNA, 353 bp, Glycine max
  Clone ID: PAT_MRT3847_61057C.1
actgctcgtctttgaagtttctaagatgacttcgtgcctacatttaaatcgtacacgccctcatttcttccatagcactatggaacatttggcttgatgacaccattcactattgatggctattccccacaagctggtgcatttttggagagattcaggaaaatttgaattgaaattttcacaagaggaatttcttacagtttggtcaactcaggtgcgtactgcaacaactttgctggctgatgaggagtccatattacgaatgctaacggtgcatgatacgtaccagtgctcttacaatactcatgttgatttttgtcactggtgcttaatgttgacaacccataatacaa

SEQ ID NO: 99714 - DNA, 1683 bp, Glycine max
  Clone ID: PAT_MRT3847_61058C.1
acgaggcctgttcggctcgaggtttcacttgacaatttggagatactgagagttatttatggaatatttcccacatatcgccagaggtattaatttgtattagaagatgtatgtaaaaatcagttgataagttctacaataggcttcccattactgtcttatcacacacacacacaatttgttttctcttgctgaaagttcttgcttcacttaagattgacacctgaaagcaatacagccagtcagccagtagtttgaccttgaagattttaatactagaagttaaaacacatcattcatttaattcctttgtcattcatggttcctgtaagaatttgaaccatgtattgtgcatggcaactcactgtggaagctactaaataagttgaacttccttatgcctgttccataatgtctcacttggaaattttcaaatgtttctttggctaacctgtcacttccagatggcactactccattaaatggaaataaatgaaccatccaacttttaattgaacatcagaaaattatctttcaacttgatgtgttctctgtctctaactaacatctgctatttcccaagttcgttttaaatttatttcgtttcctcttactgatatctttacctgtcatttgttttaatatgacactgtacaatgtttgatgatgtggagcacctagcagtccgctaccagctgcttttagtagagttttacagtttggtgatgctagtggcatacaatcacctgtttcatttggtggatttggaagtttgaccaggcacctggggagactgtcagctggaatacatgaagcaatcaatggtgattatcttgactcatacagcttgtcactgctgaacccttacatgcccaacttgagtgcttcatggttgttccaaagagcaatgtcagcaaagaaacagtccaatgttcccgcagattttattaatgaacttctatataccaattttagttgtatgcagaggcttggtgatccagtgctccgaccatttctacaggatgttgtacagtttggtccactttccaagacattgggcctagttatgttaacaaatcctaaaatactcccatccatattcaaacaggttggtattcccgtacttcttgattggtccagacattttctggggcttggctactacacctttttatcgacctttgctgatcctattgtgaggccatttttaaatacattaccatccaagacgagtttccagtggaagcggcatctcgaggcttggaaatatggagctggtcttgattacaagttatagtaactacttttacatatgattcaaaccaacctacaaaatagagatgatgtggtggcataattggttttttcctcacatccaatttcttgtggttcttctcaagatttactcttcatctcattccttcttgatcttcaatggaaacgggaagttttgattcatttttaccacttcaacatcaagtgaggtgacataaatgaaaactatttttaagtccgagatatatcatctaaattgtccatagggtgttccaaaacgaagcatgtaaagagagcaataaatcaaatcactaatatgttaggcttgtaagaaacgtcatatctatactttctaacttatcatttgctccaatgtgttttccgtccccaataaaatgacatgtttat

SEQ ID NO: 99715 - DNA, 123 bp, Glycine max
  Clone ID: PAT_MRT3847_61059C.1
cacgcaaccgtgatgccgcgacgccaccggatggggagactcgcgagtcagcaacactgcgcgctggcctctaattctgacgtgcttgtgcgcctctcacgccattttttatacactctttgt

SEQ ID NO: 99716 - DNA, 355 bp, Glycine max
  Clone ID: PAT_MRT3847_6105C.1
gcgacgatcgcggaattttctcgagcgaaacaaacactcaaccctaacgcacgttcacctttccatttcttatcattatacaactatccgtggcctgtgactctatctaactgggccacgcaatctcacaaatcgtcgacaactgtatatacagaaatgcagaggtgtaaataacggtataaccaaccttctagtccttaccttttttaaccggaccttcactgtcgacttcttacccgacttaccggagccatacaacgagatgcttgacctaaccaaatagttgatactttaagacttaacctgacaccacatacatctgataaaaatattttaaaaaagatttacccttcac

SEQ ID NO: 99717 - DNA, 709 bp, Glycine max
  Clone ID: PAT_MRT3847_61060C.1
tgcacgcgccgtaagctcggaattcggctcgagctccacctgctcagaaggaggccattgaagcgctgcctaccgtcataatcaatgagaattcgcagtgttctgtgtgtctggatgattttgaagttggttctgaagccaaagagatgccttgtaaacataggtttcatagtgggtgtatccttccctggctggagcttcatagttcttgtccagtttgcaggcttcagttgccattggatgagtctaagcaagactctgatctgtcaagggatagcagaagccaaagggaggatgaaagtattgaacatgacaatgatgaagaaagagatggcgaagggagaaatgcaagtgggggtagaagattctcatttccatggcctttcaatggattattttcttcatcaaactcttcatcctcttaaagttccaatgccaacggaaatgataatcaatcagatgaaaactgagtatttttgcatatctgttgtgctattcatgtgctgccttgcttatgtacagttttcgaccaatgaaagaatccaatgttgatagaacaatttgtgatttttcttgtggctttgtttttgctaaattttgtgcttctagaattcagttgctatttttcttcaacttttacccttaacttggcatttgtataattctcgtggtggttttatttccccatcttatcctgtactactttggt

SEQ ID NO: 99718 - DNA, 251 bp, Glycine max
  Clone ID: PAT_MRT3847_61061C.1
ttttgtttaataaagtttttaatactacttgctccatatctcatagcccgagggcttggtctacaccttgtagctcgacgaacgagccgccctctcttactacggttcaatccttggtgccgcttgcgaatgagcactttgctgaacgcagaagagtgggcaaatttgagtgagaggattggagtgcacataactgaattaagccttgaagcttgtgcctgatgtcggctgtgatcatctatgaatggggc

SEQ ID NO: 99719 - DNA, 247 bp, Glycine max
  Clone ID: PAT_MRT3847_61062C.1
acggctgcgagaagacgacagaaggggacggctgccataagacgacagagggatgcggctgcgagaagacgacagaagggtacgcgatgctgacaagacgacagaaggatacggctgccagaagacgacagaagggtactgctgcgagaagacgactgatggatacggctgttagagacgacagaaggggtgtattacacatgctcaatgtttatgatgctctcagtcattatagataatattgcta

SEQ ID NO: 99720 - DNA, 265 bp, Glycine max
  Clone ID: PAT_MRT3847_61063C.1
caagagcctaatcccatatgcatcactgttagttatttaaggcacaaagttcacaaaaagtatcgctctaaattttgtgcatccgcccacacttcatagcatatgaaatactgcaaattttccctcatctgtaacgctaattaaaaatctacctatattcattatattgttgaatatattgtacatatcccttccactctgtctaaaacacatatacctaaattttaaatacattatgcccatcacatgttaaatctcaattttt

SEQ ID NO: 99721 - DNA, 927 bp, Glycine max
  Clone ID: PAT_MRT3847_61064C.1
cttaactttgatgttgctgaagacagatttggttaaaagtgtttcttaagttccttttcatttatcatagtgtgattgtgatatatagaactaggattttattttcttggctgcatattcactgaatttcatgcagttccaggatctggaataaccttttccttcaatgctactgcattactaaaaagttctgttaacttctctaattattgtttaatcaagaaatgctgaaaattaggcctggtattgtataaggataaattgcagtttctgagtattgattttttttttcatgaaggtccaagcttctgtccaagagacactgaaaaagcacgagcttactagacctcttgctactaaagagttggaatggtttgcggcctctgcccttttggctttacctattattttagtggctagagtgttttcagctgttttctgtagcaaaaaagtgagtaaacctgctcgaaatggaaacaatcaccatgcacgacgtaaacctaagcgagggcatctagacaagcacacaacatgaagttggttcctgctttattttttttcttggaaagaaattagataatttttcctgttcgcatgagcttattgaggggatatatctttcctgtcgtgtggggtttcgaatattttacttctctttttttgggtgaggtaactttaggatgtttcactgtagaaaagggcacacagtatgtttagatgttcatgtattatcactgttatattttcttaaattccttgcactcccttttcctgttggttttattttcttaaattcttgacatagtagaaatgtttccacttaatgtatgtttatcagaatcagaactagttctgtctattgcggttgtctgtggaacttgaaatttattactaaaagaaattaattcatgagttattcttctttgg

SEQ ID NO: 99722 - DNA, 690 bp, Glycine max
  Clone ID: PAT_MRT3847_61065C.1
gattctgataaacatacattaagtggaaacatttctactatgtcaagaatttaagaaaataaaaccaacaggaaaagggagtgcaaggaatttaagaaaatataacagtgataatacatgaacatctaaacatactgtgtgcccttttctacagtgaaacatcctaaagttacctcacccaaaaaaagagaagtaaaatattcgaaaccccacacgacaggaaagatatatcccctcaataagctcatgcgaacaggaaaaattatctaatttctttccaagaaaaaaaataaagcaggaaccaacttcatgttgtgtgcttgtctagatgccctcgcttaggtttacgtcgtgcatggtgagtgtttccatttcgagcaggtttactcacttttttgctacagaaaacagctgaaaacactctagccattaaaacaataggtaaagccagaagggcagaggccgcaaaccattccaactctttagtagcaagaggtctagtaagctcatgctttttcagtgtctcttggacagaagcttggacctggcgatgatatgtagtagctgattccaaaaacttcccataaacacgaacaacctcctttggtgtagggcttcaaaacctcttgtactttatcaaacatgaggtttagctgcaatagcaaatctgatcaatgtatgggcttgctg

SEQ ID NO: 99723 - DNA, 592 bp, Glycine max
  Clone ID: PAT_MRT3847_61066C.1
tcgttccaggaaggtttcccgtcatcactgtatgacgtcctccttctttggggggggggggggggggggggggggggaaccacaggcaaagcctgtcagtgaggggtaggccaagttaaacctaaaagaccaagagtgaaaagttaaatggcatgacataataacaagtacgacccctgatggatatgccggcgtggggcgtactcgggagattagattatcgtgcaatggcaaggtgtgtgggtagttaaggaggcaggcgttcgagtcgtcacataggataacgcagacgcgttagggttatatcgcgcataaaaaatttagagccggcggcgtcctgtgataaaggggccgtgtaataatggtatgcgttgatgaagtggcgtggggggtttttaatactaattggtggtcaataataaggggggtggggttgaaacccagtacgcaagtcaagagttgtagctgatgggctgtgggtaagatagccaggttctaggtcgtttatcataccggatagataagtgtcgagccggttaggtatgtgggcagagggtggtagtgaaaggagtgggtagggcaacataaaaag

SEQ ID NO: 99724 - DNA, 717 bp, Glycine max
  unsure (1)..(717): unsure at all n locations
  Clone ID: PAT_MRT3847_61067C.1
gaacaacctcctttgtgtagggcttcaaaactacctgtactttatcaacatgaggttgttcgcacttatgggaagtttttggaatcagctactacatatcatcgccaggtccaagcttctgtccaagaagacactgaaaaaagcatcgagcccttactagacccnntcttgttaacctaaagaagttagagaaatggtnnttgcggcncttcntagcctctttttanggcttttacctctatttaaattttagtaggcntagaagtgggttttcaagcnnntgttttcttgnntagcataaaaagtgaaataaaactctgcttcgtaaatggaaaaccaatcacccatgccaccgaacgtanaacattaagcgaagggcattctaagaccaagccacccaacaatgaagttggttcctgctttattttttccctggaaagtttaaaataatttttccttgttcgcaccgggcttattgagggggatgtatctttcctgtcgtgtggggttttgaatattttacttctctttttttgggtgaagtaactttaggatgtttcactgtagaaaagggcacacaatatgtttaggtgtttatgtattatcagtttatcactttgttatatttgttattagaccttgcactcccttttcctgctggttntattttcttaaattcttgacatagtaaaaatgtttcctcataatgtatgttta

SEQ ID NO: 99725 - DNA, 578 bp, Glycine max
  unsure (1)..(578): unsure at all n locations
  Clone ID: PAT_MRT3847_61068C.1
ggctcgagctgatgctcagaagagcatgttagatgatagattcaagtggaaggtccgggagatggaaaagaagaaggaaggaaagcctggtgaagcaagggccaatttaaggcgctcagtcagggaaaatgggtctgatgtcgcagaacaaagtggagaaatggctagatctcttactggtccaatgttgaggaaaaattatgctcaacctgatagtaacattgatagacagttgatgccccatcctatgactgttgctagtggccccacagattggaatgaagcactcgatattatttcttttggttctcctgagcagtctgttgatggaatgaaagttgtttgtcatgagttagctcaggccactagtgatcctgaaggaagtgctatggatgaacttgtgaaagatgcagataggctagtttcatgccttgcaataaggttgcaagaacttttgacttcagtttgactgggtggtgcctcaatcacgatcttgtanatatgtgctgaacactctcatgcagacttttcagaataaaagattagcgcatgcagtaaaggagagcacacttgacagt

SEQ ID NO: 99726 - DNA, 2200 bp, Glycine max
  unsure (1)..(2200): unsure at all n locations
  Clone ID: PAT_MRT3847_61069C.1
cttaactttgatgttgctgaagacagatttggttaaaagtgtttcttaaggtgcttttcatttatcatagtgtgattgtgatatatacaactaggattttattttcttggctgcatattcactgaatttcatgcagttccaggatctggaataaccttttccttcaatgctactgcattactaaaaagttctgttaacttctctaattattgtttaatcaacaaatgctgaaaattangcctggtattgtataaggaataaattgcagtttctgagtattgattttttttttcaggacaatagaaaccttcccgacgacggggcgataaatatcagtacagcaaagacacgggtttcccccccgcctccgaagctttgttggcggcaaagcaaatctgcatagcgatggcgcctccgaagctcttcgtatttgcgctttcagtaaccctaatttttgccatcgttggggccgaagccgatgtttccgtcgaaggagacactccagagcctgatacctccgccatcaagatccaattagatcaactcaattccaagatccaaattctcgagtctcaaatcagggaaaagttggaagaagtgaagaagaaggaccaaattatagcagaaaaagaaaattccattgaagataaatcaattaccatacaatccttcagaaggaatgagattgcagaaaaaagggtcactggatgctgaggagcaggttggaaaggctcatgcacgtgctggtgaactacagaagcaggtggacaaacttaaaagggaactagaaacacaaaacaaggagaaagtgaactgggaaactcgagtacctgagttagagaataagattcatgacttgaactcaaaattagaagatcttcaaaagataaatgaggaacagaagacaaaaattcaaaaaagtgaacgcgctcttaaagttgctgaggaagaaatgttaaaggcaaagtttgaggctactgccataaaaaaagagctgagggaggctcatggtgcttggcttcccccttggcttgctgttcactatattcatagtaagtcttttgttgatagtcattggaacaaacatgggaaacctgctttggaaatggttactcaaaaggccctagagaaaaaggcacaagctggaaagtgggctgaacctcatgtggaaaccattaaaactaaatgggtcccagctgtaaaagaacagtggtctgtggtgaagacaaatgctgaacctcatgtgcaattattgaccacgaaaactgttgaagtttacgaggcatcaaagaatgcaatttctccccacttaagcaaggcaaaagaatttgtagatccttattatcaggaagctagaaagttcagcaagccatacattgatcagattgctattgcagctaaacctcatgttgataaagtacaggtagttttgaagccctacacaaaggaggttgttcgcacttatgggaagtttttggaatcagctactacatatcatcgccaggtccaagcttctgtccaagagacactgaaaaagcacgagcttactagacctcttgctactaaagagttggaatggtttgcggcctctgcccttttggctttacctattattttagtggctagagtgttttcagctgttttctgtagcaaaaaagtgaataaacctgctcgaaatggaaacaatcaccatgcacgacgtaaacataagcgagggcatctagacaagcacacaacatgaagttggttcctgctttatttttttccctggaaagtttagataatttttcctgttcgcacgggcttattgagggggatgtatctttcctgtcgtgtggggttttgaatattttacttctctttttttgggtgaggtaactttaggatgtttcactgtagaaaagggcacacaatatgtttaggtgtttatgtattatcagtttatcactttgttatatttgttattagaccttgcactcccttttcctgctggttttattttcttaaattcttgacatagtaaaaatgtttcctcataatgtatgtttattagaatcagaactagttcctgtctattgcggttgtctgtggaacttgaaatttattactaaaagaaactaattcatgagttgctcttcattgggaaaaaaaaaaaaaaaaaaaaaaaaaaaaaaaaaaaaaaaaaaaaaaaaaaaaaaaa

SEQ ID NO: 99727 - DNA, 221 bp, Glycine max
  Clone ID: PAT_MRT3847_6106C.1
ccttggcgccgctttttttttttttttttttttttggcacacctaatttgacaattaattcagggaattatgtcgatagaacgaacaagacgtggtgtgaaatcaagaaccatattagatgaaattaagagggcggcggaagatatagatgatatagctagcctgggtaagtgcacattcatggtcaccattaattagcttgctggcctttttctttatta

SEQ ID NO: 99728 - DNA, 750 bp, Glycine max
  Clone ID: PAT_MRT3847_61070C.1
gcggcgttggcggcaaagcaaatctgcatagcgatggcgcctccgaagctcttcgtatttgcgctttcagtaaccctgatttttgccatcgttggggccgaagccgatgtttccgtcgaaggagccactccagagcctgatacctccgccatcaagatccaattagatcaactcaattccaagatccaaattctcgagtctcaaatcagtgaaaagttggaagaagtgaagaagaaggacaaaattatagcagaaaaagaaaattccattgaagataaatcaattaccatacaatccttgcagaatgagattgcttctctccagaaaaaagggtcactggatgctgaggagcaggttggaaaggctcatgcacgtgctggtgaactacagaagcaggtggacaaacttaaaagggaactagaaacacaaaacaaggagaaagtgaactgggaaactcgagtacctgagttagagaataagattcatgacttgaactcaaaattagaagatcttcaaaagataaatgaggaacagaagacaaaaattcaaaaaagtgaacgcgctcttaaagttgctgaggaagaaatgttaaaggcaaagtttgaggctactgccatagaaaaagagctgagggaggctcatggtgcttggcttcccccttggcttggctgttcactatattcatagtaagtcttttgttgatagtcattggaacaaacatgggaacctgctttgggaatggttactcaa

SEQ ID NO: 99729 - DNA, 261 bp, Glycine max
  Clone ID: PAT_MRT3847_61071C.1
ggcgtacactactaaaaggaataggagtttccctattgacaatcccgaacagtcgacgagttgggatgaacgcttggcaatctctaaagatgttgacatcgatggtaatactctaaagcctgctttatgtgtaccacaggctacggcgagatcttatgtctacgcgtgatcctctgcatgatctgggatttgggttttttttcgcttgttcgtctgtttaattccaaaaaatgtaaatttgcacgaccctccttgttgagg

SEQ ID NO: 99730 - DNA, 385 bp, Glycine max
  unsure (1)..(385): unsure at all n locations
  Clone ID: PAT_MRT3847_61072C.1
gnggttgttccatttttcttacctgattgtggggagtgtttcgattgcaaatcaagcaagatctacctttgttcaaaggaaccattggaggggcccccctgtatgcctaaaaatgccacttctagattcacagatttaaaaagagaaatcattcctcctctcttgccaagaaaaaaaaatagccactactctgtggttgacattgcccatccaaaagagattgatcccgctgtaccacccaacagggcatgccttttttgctgtccgaatatcccaagggaaaacgtgctgcttgaaaaaaaaaaagaaaagatccatgggctaccctaaccctttttggggtggggaaaaatggattaacaattgcttccggagccaaaatttg

SEQ ID NO: 99731 - DNA, 361 bp, Glycine max
  Clone ID: PAT_MRT3847_61073C.1
ggcccttcatcggtgctccgtcgtctcggggaacttctggagcgtcgcggccccttcactacggcctccggctgcccgcaagtccaacgtcttctttggcgcccgttatgggttgggattgagattaggttatggatgggttcttggggaatttatttataggtcattggctttaaatactattcatgtgcttttgccacatttttagtttttcatatctattaacccttttgtagataaaggaaaactttttttttttttgtcaggttaaattgtagtgattgaattgaagttaagcttaattattctttattgtatggttaaagtctttagagagaaaagactcaaaaggaagggagcg

SEQ ID NO: 99732 - DNA, 243 bp, Glycine max
  unsure (1)..(243): unsure at all n locations
  Clone ID: PAT_MRT3847_61074C.1
gtggaaagtaatagcaataaaggagagagactcaacatctgtaatagggccanccgtagtcgtcgtttatgcctttaacatccactattttcgaaaatacaaccactatatcatagaacctgcccatattgatcgtccatatcatttcattgatcttctaagaatcttttggcttccaattccaattcctcctgaaagtctaaaatcaggttttatggataaacttataccaagtgcaagccc

SEQ ID NO: 99733 - DNA, 377 bp, Glycine max
  Clone ID: PAT_MRT3847_61075C.1
gggaataataaaaaattgaagaaaacaaatagacatgctaagaaaggaaagaaaagaactgagcagaagaggctagtgggttggcctaaaaggctgccggagtactgagggttggtcagaaacacataagagagctgtgggttatacagtttgtgttgaataaaagagctgtggggaaattgcggaattatctcaaaaagattggatgaacaacagacaatcaggtggcaaagaaggttctttaacccccttgttaccaatcaaggtcactaatactatagctgctaattggtatgatttggggtatgaggtgctccacaaaatcacaacgtgatgtctttcgtatagtggacccaagccatgatgcacaatgatgc

SEQ ID NO: 99734 - DNA, 133 bp, Glycine max
  Clone ID: PAT_MRT3847_61076C.1
ttctgatgatgacatccccaccttgtgctgatggttccataactgaccatggaccactagcacacattccaaacgtggacaccatctgttctgccaaactggggatatgctgcctatcaccagctgctccggt

SEQ ID NO: 99735 - DNA, 428 bp, Glycine max
  unsure (1)..(428): unsure at all n locations
  Clone ID: PAT_MRT3847_61077C.1
gcgtacgggataaaccgcggtcactgttagtcgnacatcgaatcctttaccacaagcaatcggtacttgattacaagaatctctcaatatctatctacttatttgagtacgagctcttaagggaaagaaaatcactctctgtgctggccacagacttcgtgaatgatcttcttttccactcttggttgatagggtgaacactctcctatttgatataggacttcgtgtgagacttaaactggttctgtctctttctcaggtgtctgattaatttcaagttgaagctggtgaaatcgcggattagggctaccactctactatctggcataggactgcgcgggtagacttacctattgagatactttctttcactctttgcttctcactgatccgcattgacgagcaaagtggtcttatttgacaaacac

SEQ ID NO: 99736 - DNA, 258 bp, Glycine max
  Clone ID: PAT_MRT3847_61078C.1
ctagatcgccttacaatcaaatgtatgctattagctccaatgctcatccaggtgattagctgcatttgacgcagggacaattaatattacaatcctgtgcctattcactcaaagatgctattgcaggactcttcttccgactccctttactagccgaaatgcaccttcaatctctatcacttcgacctcgtcatcaccaacaagctcatctgcttctaactcttactctcaataaacaagcggctcattgtaaacatc

SEQ ID NO: 99737 - DNA, 401 bp, Glycine max
  Clone ID: PAT_MRT3847_61079C.1
aattaattggcgcaaatttcatgataaagtacagtggtcctgttttctaggcatgttctgtagttccgttggggatcataatcgtattcaataaataaataaagagtgcatttgaataaaagaaaagaaaatagttttattaaaaaatataagagaacatgtttaaaaattataaaataatatatttttacacattttaataaaacactgttgttttgactcccttgataccagttaatatttatctaaaataaataaaaatatttgttaactaatatccttagaatacttattaaaaactgaaagattttttttattaaaaatcatttgtgtttgcttaaaaattataacgagtatatttatacatatttcaatagaaaaattatatttttactttctta

SEQ ID NO: 99738 - DNA, 542 bp, Glycine max
  Clone ID: PAT_MRT3847_6107C.1
gggggaaaaaaaaaaaactatcattatttattggtaaatcagtgatacatagcagataaaaatccaacatcaattagcttctacctaccaatcaagaatatcaataatttttggtttcccatctgaggtaacctgtaatccagcagcagccgggtctaccccagaatctgaaaacatgcagctcttatgattaaactcatttatcatatgaaccagtacagcagtcccaattacaatgtaacattagtgaatgaaactttttttaaagaaacaaattagaccagcactatgccaatgaaagaactacatggtgaaaatagcatccatgaaaaaattatactccccctcggctgtaaacacaagaaaagacagggctgagactaaggaaacaatgaatacaaacaaggacatatagggaatattttttgcttatattaattactctaccatcgccgcaaccattttctgggaatagcgcctcaatcattatatatatcatgaaacgcaacccatccaaaccaaatgaaagatctccacttgga

SEQ ID NO: 99739 - DNA, 237 bp, Glycine max
  unsure (1)..(237): unsure at all n locations
  Clone ID: PAT_MRT3847_61080C.1
tatattcctgatcctgaggntnngnaaccagangggtctgntgtcatcccaaaagngctcccnanaccccgangccaancaagcctgaaggttgggatgntgaggnanctggtgagtgnncaccccctaccnttgccaaccctgagtacagnggcccatggnangcgtgnaaatcnagaaccccaactataaaggaaatggtaggcaccttgatngatnccccagntttcaggatga

SEQ ID NO: 99740 - DNA, 433 bp, Glycine max
  Clone ID: PAT_MRT3847_61081C.1
aacaccctcacaaccctgtcatgaatccaccaagaggcgttgaactgactaacttcaaacacccttcaactgcttgcccacgcaaggacggaaaatggaaggtgcaattggtgctcaaaacggagatgaatggaacacacttctctaccaaagtgacgactttgtttattggaaagcgtatcctaatgccttctacgccttagataatactgaagcttgtgagttgactgacttgtttcctagctacataaatggcagcctaaatggggaggatacatctgcgcaaaatccaagcgttctacatgtgctgaagataaactatctaagaacgcagcatgattactattttcttggcaaatatgtatctgatcacgaacacgttattcctgatgttatgtttacaagaactaactcacacttacagttgactatg

SEQ ID NO: 99741 - DNA, 139 bp, Glycine max
  unsure (1)..(139): unsure at all n locations
  Clone ID: PAT_MRT3847_61082C.1
gtaatttaaagtgttttgctattngtaaataactttgcntgtacagtnnttaatgggctttgtgnaaactggaatacaactnactagggcnctttttnggngtttgcnacactggtgtgntntatgtatgnntnacccc

SEQ ID NO: 99742 - DNA, 1261 bp, Glycine max
  Clone ID: PAT_MRT3847_61083C.1
ttgcatgaccccaaaatgaaagttggtagtaatagcagtaagggtgcaagaagacgacagaaggggatacgcagcataatataagcacgcacgttgccgaagaaaataccactactcctcctaagtctttgaagtcataaagacaaaagaaaagacttagtcatagcagcaaacaaggaaaggcacgtacacgaccaccgtttacctgttttttgaacgttgaaattaattgacctgcgcctgcgcgtgtcactgtttgagagcacacaaacaatgtcctcccaatctgacgccgttggctgtaacttgaaggagacggagctcaccttaggccttcccggcaccaaaactaatggcacaaaacgtggcttctccgacacccttaacacttctcataataaaatgttgcgccccacctccaaggaacaagtggtggggtggccgccggtgagggcaagcaggaaaaatgctatgaagatgagttgcaagttggtgaaggtggcggtggatggagctccttatctaagaaaagtggatcttgaaatgtacgagacttatgagcatttgatgagggaattagagaccatgttttgtggcttagccattcgtaatcatttgatgaatgagaggaaactgatggagtctggaaatgggattgaatacatgcccacctatgaggacaaagatggtgactggatgttggtcggggatgtaccctggaagatgtttgttgaatcatgcaagaggataagacttatgattagctcagaggccgttggtttaggtccgaggtctacttcttcaaaatgtacgggttccacctagctagctagaagaataattaattagtgcgtaataatgataagctgatagctgataattaagcattccttggacaccttcaacgtttacaagctccggttagaagaagagtgaatttggtacagggaaatatccatgcatggtgcttgatgtacatgtccctttagcacctctggttaattagttacttttgttttgactttaaatgaagaactagaacaaatactggtctctatattagctagtgatctaaaaaacaaataaggggaggctggcatgtaatcaatattaggatcatcgttatatcatgagtatgcatgtaatgtatgacttggctttgtgctagctagttattctacccccagttttctagttgttagtaaaaaaattcacctgatcattttatgccccactccagacttcttctctcttctatcct

SEQ ID NO: 99743 - DNA, 936 bp, Glycine max
  Clone ID: PAT_MRT3847_61084C.1
gacaaaagaaaagagttagtcatagcagcaaacagggaggaaaaggcacgtacacgaccaccgtttagctgtgtttgaagttcgaacgttgaaattaattgagctgcgcctgcgcgtgtcactgtttgagagcacacaaacaatgtcctccgaatcacacgccgttgattgtaacttgaaggagacggagctcaccttaggccttcccggcaccaaaactactgccacaaaacgtggcttctctgatacccttcctccttctcaaaataaaatcttgcgccccacctccaaattcccaacacccaacagggaacaactggtggggtggccgccggtgagggcaagcaggaagaatgctatgaagagctgttgcaagttggtgaaggtggcggtggatggagctccttatctaagaaaagtggatcttgacatgtacgatagttatgagcatttgatgagggaattagagacaatgttttgtggcttagccattcgtaatcatttgatgaatgagaggaaactgatggatcctggaaatgggattgaatacatgcccacctatgaggacaaagatggtgactggatgttggtcggggatgtaccctggaaaatgtttgttgaatcatgcaagaggataagacttatgattagctcagaggccgttggtttaggtccgaggtctacttcttcaaaatgtacgggttccacttagctagctagaagtgtgtaataatcataataagctgatagataagcattccgtggataccatcaacatgtaaaagctccggttagaacttagaagagtgaatttagtttaaggaaatatccatggtgcttgatgtacatgtccctttagcacctctggttaagtagttactttaaatgaagaactagaacaaagactggtctctatattaactagtgatctaaaaa

SEQ ID NO: 99744 - DNA, 710 bp, Glycine max
  unsure (1)..(710): unsure at all n locations
  Clone ID: PAT_MRT3847_61085C.1
ccacgcgtccgccacgcgttcctgagacagcaagcctaaaggcaataaggaataatatttggagaacatcaaaataacatggagacagcaagcctaaaggaaataaggaataatatttctatctaaatggtgaaccgcatctcaaactatgttcctctcttcatcattttgattgttttggtaacagggcaaaaacaagtggaaggatataaatgtttgacagatatgggtttatgtgatgaacgtatcacctcgagtgagtgtgatcttagatgtaaatcccattataatgatggagaggggcactgtgataacatgaacatctgtaattgtattcaccattgtgtctctcctcagccaaataaagacaccgagcctataaggaagtgcacaagtggccttggactttgcagtattgatcactgctatgatgattgttgcaattcaaaatgtgctaaacaattcaaagagggtataggacattgtgaaattgtgggttcgatgggtaccatcttatgtacctgtgattatgtctgctgagtttataaaaaattatggcatattttatatctacaggttgagtatcgatctatttactatttacctctgggataaatatgtcatgaactgaaaacaaaataaataaatgcacaatttcttcccaaaaaaaaaaaaaaaaaaaaaaaaaaaaaagcggccgctntagagga

SEQ ID NO: 99745 - DNA, 402 bp, Glycine max
  Clone ID: PAT_MRT3847_61086C.1
tttttcatcaacataagcctaccatacttatttcacaatgccaccggcctcggaagtttatgattatctttcatactcctcaatttacatcattaaaattaaaagatcctccattcaacctcaaacaatagaatgtaatggaattttacattacttttgcaattcaagctacaagatttcaaaattcgaactaataactaacaaagaaaacagataaacctacttaaaacttgaaaactagagattgcaaggcaaaaatggaggacagatcatctccatttctcttgtagatctttcctctgggataatacccaagtgacaaatattgcagcgacaagtgcaacaattgtaagaagaagtagagcatagctgaaatcttcagttagtgaatcgtaagtccta

SEQ ID NO: 99746 - DNA, 595 bp, Glycine max
  Clone ID: PAT_MRT3847_61087C.1
ccggggaacatcaaaatcacattgagacagcaagcctaaaggaaataaggaataatatttctatctaaatggtgaaccgcatctcaaactatgttcctctcttcatcattttgattgttttggtaacagtgcaaaaacaagtggaaggattgacatgttcgagatatttcggtttatgttccgacacgagaaattgtgatcttaggtgtaaagcccgcaataagcatgcagaggggcactgtgatgatgacttcaactgtacttgtatttacccttgtgactctcctcagccaaataaagacaccgagcctataaggaagtgcactagtggccttggactttgcagtgttgatcactgctatgatgattgttgcaattcaaaatgtgctaaacaattcaaagagggtataggacattgtgaaatagtgggttcgatgggtaccatcttgtgtacctgtgattatgtctgctgagtttataaaaaattatggcatattttatatctctaggttgagtatcgatctatttactatttacctctgggataaatatgtcatgaactgaaaacaaataaataaatccacattttttttag

SEQ ID NO: 99747 - DNA, 127 bp, Glycine max
  Clone ID: PAT_MRT3847_61088C.1
agtataacaagtccccacattgcgccaaatggccgccttccaaacacgtagctcacccccaaaattccaaaccactacctgcaagcctaccaaatttccctatactgactcgtataaaagcttcaca

SEQ ID NO: 99748 - DNA, 155 bp, Glycine max
  Clone ID: PAT_MRT3847_61089C.1
accaagcgtacgcatattgttcgagcgcggaacgatcaaggagaaaagaagagcacgcgcgagaacacagccgagacgtcactatgaataggggcacggcaagaaaataggacacgtgcgcgggggggggccgctttaagggggtccaggctccc

SEQ ID NO: 99749 - DNA, 546 bp, Glycine max
  Clone ID: PAT_MRT3847_6108C.1
ggagaacaacagccgggtttccaacaccgaccacgcgcccgccctcgcgtccgtccccacgcgcgacaaaattgagtaatcacattgcccaccacggttgctgtctccgtacctcaaaatcaaaacactaaccatggagtcgaatcccccaagaagaacaaaattcaggtttctaacaccaagaaaccccttttcttttacgtcaatcttgccaagaggtacatacaacagcgcaatgaggttgtgctttctgctcttggaatgggtataaccacagttgttacaattgcggagattttgaagaacaatggacttgctattgagaagaaagtttcgacatcttcagttacaatgaaggatgagaccaaaggtcgcctggttcaaaaggctaagattgaaattgttctggagaaaactgagaagtttgacagtctgacggctgctgcaaacactgaagccgatgtagttgaatgacacgatgatattgatgagaagaaatgatctaaatggagtcagggtgatgttaacatcccatgcatactcagt

SEQ ID NO: 99750 - DNA, 524 bp, Glycine max
  Clone ID: PAT_MRT3847_61090C.1
ggaataaaacgggtttcttttaaacttaagtttttttcatacccaacccggtttttaaaacttgggtctacttttacaggcctaggaccctaaccctaaaacccagacgggaacgaaggctcccgaaaatttaaaaaaaaaaaaaaaagacccaggttttttttcttccaacaccattttttgggtggaccacctcatcccacccttaaaaaaaacccgggaaaacccattggctggaacggttaaaaactccttttggaagataaaccaaacccttggccttgggccccttcccccagcctaaaccccccccaaactttgcaaagatcgactttcaaaaaaaaacacgggccctggaaatttctttgggcaaacaaggggggctttttttttcaaagggtccaaagattaacacctaaaaaaactgggttttcaggggccccaggggggatcttactcaagaccttagcttcaaacacaaaatatgggtttttaatcccaaaaacggccttctttgggggggg

SEQ ID NO: 99751 - DNA, 381 bp, Glycine max
  Clone ID: PAT_MRT3847_61091C.1
gagacaacgtttgttcgattcttaacacaacttcagctactcactctcttcttccaggtccagccatgctcttcgctacagtcatgggcacagtcaagatcggaatcaacggatttggaacacttggccgtatggttgccaaagtcgctcttcatcgagacgatgtgtacctcgtttccgtgaatgatgctttcattaacaccgactatatgacatacatgtttcaatacgacatgtgttcacggacactggaagcatcacgatgtcaacgtttatgactagaagacccttctcttcagtgacaagccagtcactgattctggacacatgaaccttgatcagatcgcatgatggtcaaccagagctgatagcattgttgac

SEQ ID NO: 99752 - DNA, 478 bp, Glycine max
  Clone ID: PAT_MRT3847_61092C.1
aattcggctcgaggaagacgacagaagggggtgccacgacagacctaagatgtatatcaatcatatggaggattttctccgacaatggtttcttcattttggcaatgtgtttggtgagttgggaagcatggaagacatgatcgcaaaggatcctctctctaacaatgaacgtcttggtggagatcttaatcgtctctaacgaactcttgattttcagttcgagaacttccattgactttgctaatgttgatatttttttttggctcttttaaaaacaaatattgatatttagctttaaaacacatgcattgcctttgttttgttgttgtaaaagagtgaggtgactctggatatgcagaggaacatagttccaagaatggaaagatggatatttaaaaaaataaaagaaagtgaaaaatgaggtatataattaaaaaatgaagagatatgttaagcaaattcctaatcttatttacat

SEQ ID NO: 99753 - DNA, 430 bp, Glycine max
  Clone ID: PAT_MRT3847_61093C.1
ggaacctatcattattgtaaaaagttgttggggttctagaatggacggaaaaggtgtcaatactaagtacattgtcaaaaggaacgcgatgggcagatctgaatccactgttcccatatttaatatggaagacatatacgacggtgatgaaggttatgatgatgaaaggacactacttatgtctcaaaacatcttggataatcgtttctgtcaatgtgcattttttattgctgccactttcatggagcatggtggcaatgcaccttgaacagacactgctactcttcttaatgagtcgatatatcgttatgacatgcggctacgaagaccagagcaagtgggaaatgatatggtatggatctattgttgctgtgcagataatctattgcctgcgtgtcatatagctgatcttcaatggattcatatcttt

SEQ ID NO: 99754 - DNA, 271 bp, Glycine max
  Clone ID: PAT_MRT3847_61094C.1
agggattggattgggaacacagctgtcaggtgcgcggcagataacggaaggaaggttgcgagcagcagcagaaggccctgctacaaacatgacagatgaggatgaccaaaagggaatcatgaacccatccatagactgtacacgagatggaacagcagaggaaggggctgccgcagcacacgcttttgttgcagaaaagcaggccgaaggacatggcgatgtatggttccacgagctagcagacaggggaaaagaagaaaccggggagtat

SEQ ID NO: 99755 - DNA, 466 bp, Glycine max
  Clone ID: PAT_MRT3847_61095C.1
ccgggacaataagggagggccttcaaaagcttccgccgataatgtggttgcagcagttactctggctgctatttctgatgtgtatcatattggagtcccttcacaaaggccttcttccatggctattcagaggccaggacagagagcacatcagaagtggaaaggtccagataaaatcagtaggatatatggtgattggatcgaagacattgaatagagttataatctcccattcatggaaacgactgatgaggagggcttatgtaccatcaaaacgcaagaattttcattcacacgctattttattcggtaatttatcttaagatccttaacttccaacgggaatagcactttagatcgtttcatgtataactgttttttacgtttatgtttggtggtgtattcaccttctccttaatacggtggttctctggcgtctgaatgtagcgacagcttcttcccctgt

SEQ ID NO: 99756 - DNA, 2990 bp, Glycine max
  Clone ID: PAT_MRT3847_61096C.1
ctataacgatctttgaagtaagaagagtgtgttgtgttgaagtatcaaagatgttgattggttctctcttaaacaggcgtcctaagatcaaggggactgtggtgttgatgaccaagaatgtgttcgacgtcaacgacttcatggcgactactaggggcggaccagccgctgttgccggcggcatcttcggtgccgcccaggacattgttggtggaatagttgatggtgctacggccatcttcagccgtaacattgccatacagttgatcagtgccaccaagtctgagaatgcacttggacatgggaaagttggaaagctaacctatttggagaaacatcttccttcattaccaaacttgggagataggcaggatgcattcgatgtttattttgaatgggatgagagttttggaattccgggagcattttacatcaaaaactatatgcaatctgagtttttccttgtgagtttcaagcttgaagacgttccaaatcatggaaccattctctttgcttgcaactcatgggtttacaacgcaaaattgtacaaaaaagatcgcattttctttgctaataagacatatcttccaaatgacactccaactccactagtaaagtacagaaaagaagaattggaaaatctaagaggagatggaagaggggagcgcaaggaacttgataggatctatgattatgatgtctataatgatttgggcaacccagacgagaatgacgatctagctcgtcctattcttggcgggtctagtaagcatccataccctcgcaggggaagaactggtagaaaaccaacaaagaaagaccccagatgtgagagaccaaccagcgacacttacatcccgagagacgaaaattttggtcacttgaagtcatcagacttccttacatatgcaataaaatccttaactcaaaacgttttacctcaattcaacactgcatttggtttcaataatgagtttgatagcttcgaggacgtgcgttgtctctttgatggcggagtttatctccctacagatgtactcagcaaaattagccccataccggtgctcaaagaaatcttccgcactgatggtgagcaagccctcaagtttccaccacctcatgtcatcaaagttcgtgagtctgaatggatgactgatgaagaatttggaagagagatgcttgctggtgttaatcctggcatgattcaacgccttcaagagttccctccaaagagcaagctagatcccacagagtttggagatcaaactagtacaataaccaaagaacacttggagatcaaccttggtggactcaccgtagaacaggcactgaaaggtaacaaattgttcatattagatcaccatgatgcattcataccgtttatgaatttgatcaatggcctgcccactgcaaagtcttatgccacaaggaccatccttttcttgcaagacgatggcacattgaagccattagccattgagttaagtttgccacatcctaggggacatgagtttggagccgatagtagagtagtcttgcccccagccgcagtcaacagcgctgaaggcacaatttggttaattgccaaggcttatgttgctgtcaatgacactggctatcaccaactcataagccactggttaaatactcatgccacaattgagccatttgtcatagcaacaaacaggcatcttagtgtgctccaccctattcataagcttctcttgcctcactaccgtgacacaatgaatatcaatgcacttgcacgacaatcgctcatcaacgcagatggcgttatcgagcgatcatttttgcccggcaaatactctctggagatgtcttcggcagtttacaagagttgggttttcactgatcaagcccttcctgcagatcttatcaagagaggaatggcaattgaggatccctgtgccccccacggccttcgccttgtgatagaggactacccttatgctgttgatggactagaaatatgggatgctattcagacatgggttaagaactatgtctccttgtattacccaacagatgatgcaattaagaaagactctgagctccaagcttggtggaaggaagctgttgagacgggtcacggtgacttgaaagacaagccatggtggcctaagttgaacactcctcaagatttggttcacatttgctccattatcatatggatagcttcagctctccatgcagcagtgaattttggacaatacccttatggaggtttgatcctaaaccgtccaactttaaccagaagatttctccctgaaccaggaagcaaagaatatgaggagctttcaaccaattatcaaaaggcttacctgagaacaattacaagaaagattgaggcccttgtggacctttcagtgatagagatattgtcaagacatgcttctgatgagatctaccttgggaagagggacagtgacgattggactgatgaccaaaaggcaattcaagcctttgaaaagtttggaaccaagctgaaggaaattgaggccaaaatcaattcgaggaacaaagattcaagccttagaaaccgtaatggaccggttcagatgccttatactgtgcttcttcctaccagtgaggaaggccttactttcagaggaattcccaacagcatctctatctaaggccagagtgcgtttatgtgtggttctctttccaaacctacgttacctttctcgttgacgaataaatatgcaagcttatgcatgcatataataattgtcttatgcattcttaagtgttgtatgtggacgttatctagttttcgtatttaataagaatggtatcaccattactttgtttttactatcatgttcacccgtagtatgtaagattgatatcccaaactatgattatgaaatcaaatttctctatggcaccagttgggattttcacatggacctattacatatcttgactttgaattggccgggtatccgaattcctctttttatggc

SEQ ID NO: 99757 - DNA, 375 bp, Glycine max
  Clone ID: PAT_MRT3847_61097C.1
ggcccggcccggaatcctttcgcgccccacgcggctgtatgcgtccgcccacgcggcggtttatttttctctctcctacctttatccgacatatcccatggccactgtcaaagaaaggtgtaagtttagacattcatcaaacgtgtatagccagatcatgtcttgtacaaagatgcactactcgaagagggactcaccctgcatccacgctgtgctgtagagcagaagcaatcagtggagagtcataaacagctgggggctcaacttgaatgggtgctcctaaacaaagatggactgcggaagaagcagcggggctgaaagctggagccctcaaacatggggcgcgaaaatggcgcaccatacttacagaccctg

SEQ ID NO: 99758 - DNA, 303 bp, Glycine max
  Clone ID: PAT_MRT3847_61098C.1
agaagggggatggaatttgctggcaaaagaggacatacgggggggggatggaaaaagaaaagtgagatcttaatcaatgaagcattacactttgataactgggttttctagtgtaaagggtatactgtgggaacgtaaacccagggatgcaagttgctggcatttaagttataaatcagaccttgtctgatacaaagaaattagggatgaagggtgaactaaaaaagttagtatgcgtgagagtgttggaagtttttatgcaccaaaatgaagagggcagaatgggattttcaggctttttga

SEQ ID NO: 99759 - DNA, 306 bp, Glycine max
  Clone ID: PAT_MRT3847_61099C.1
gggttaataaaccatggactgccacatccatggttgttatattaactaagacaggaacttggaatgatacagactgaatgactacacatacctgaggttggataaccgcacacacatttattcatacaaaaattacattatttggatatttggattgacaaacacatggcacttacattttcatacatattacttaacggccacacgtgcagtccgagcaaatgcagttagagccacactttcactatcaatcatgcttagttgatgaaacatgcatgacaacaggatggatgtaactttagtcag

SEQ ID NO: 99760 - DNA, 445 bp, Glycine max
  Clone ID: PAT_MRT3847_6109C.1
gcctgctcactgactcttaactaacgccttgtaaatgctagttctgggctcagctgtgctcagctctttcctcatgtgcgggcaccttgcctcactggggcctctgtcctgggcttggttaactgcctgttctgtgaacttcttccctgcccctgctaggctattcatttgtgtcaccagatgcctgttcccagggagttgtccttcttccttgtcccaaataccctttgattttcctggctggttggctgggactgttctcaccccgtcccctcgttgccttccagttcttcggcttcctcttggtgatattcgccattgaaatagctgcggccatctggggatattcccacaaggatgaggtaggtttttcccatgagatctcttgggtttgggagttgggggatgggggacagtgaaacaaggggcaagtcctggctgggca

SEQ ID NO: 99761 - DNA, 385 bp, Glycine max
  Clone ID: PAT_MRT3847_610C.1
gtgataatatatttgttctaattggtgcatttccctctgatgtctaaatggcattagtaattaaaattagaacgaccctaaaccttggtttccaccccctcacagtcacttttgccttcatagcaatcagcccactgttaacttttgcacatttttgtaaggaatatcgaacgggcaacaaacacaaacaagaacaaattcaccgtggctatggctgccaatagccaatagaatttgtccaatcgactactattcaagtccttaccaaaccaacttttcccactcttcttagtgatgtgatcaacaactgttatcagcatactacttaggaaactcgctgcaccaattacactaaggtaaaatgctatgcctaggcttctcattg

SEQ ID NO: 99762 - DNA, 611 bp, Glycine max
  Clone ID: PAT_MRT3847_61100C.1
accagaacacggccaacgtcatccgttacttccccacccaggccctgaactttgcgttcaaggactacttcaagtcgctctttggcttgaagaagaatgacggctactggaagtggtttgccggcaacattgcgtccggtggtgccgccggtgcgacctcgctcctcttcgtctactctctcgactacgcccgtacccgtgtcgccaacgacaacaagtctgcctccaagggcggctctcgccagttcaacggtctcgtcgacgtctaccgcaagaccctcgcctctgacggtatcgccggtctctaccgtggctttgtcccctctgtcgtcggcatcatcgtctaccgtggtctctactttggtctctacgactcgatcaagcccgttgtccttgtcggccccctcgagggcaacttcctcgcttcgttcgctctcggctggggtgtcaccaccggtgccggtctcgcttcgtaccccctcgacacgatccgtcgtcgcatgatgatgacctctggtggctcgggccctcactacaagtcgatgatggacgctggttcgcagattgtcgcccaagagggcgtcaagtcgctcttcaagggtgcggcgcca

SEQ ID NO: 99763 - DNA, 215 bp, Glycine max
  unsure (1)..(215): unsure at all n locations
  Clone ID: PAT_MRT3847_61101C.1
tgtaagtgctaggtaccagcttgttacgtactagtattatggatatgtttggatataggtattggtgtttttgagagcttctatgtgtggaaaaacagagagaagctctcaaaaactgatcttttaatcttgtatccaaacacgttctacttaaaagttttttttttattacttacncattgattggggggggggtctttttgtgggcaagcctc

SEQ ID NO: 99764 - DNA, 360 bp, Glycine max
  Clone ID: PAT_MRT3847_61102C.1
tcgcgatctagtgacatttcagctatggaggattctcctgaaagaaacaaaactcgattaaagtgggccataggtacgcatgaaatgataaagaaaagtatatttatcttgtgtcttatttttataacaggaaaagtctatcatttgtttttgtccctccatattattatgaagatcatcatttgttagtagttattgtccaatatttttcaaaaagaaactaatactaaatgaataaaattgtataagaactaaaataaaaaatagatatattagaaggattaaaagaaaataataatatgacaaattaaaaaaaatattagagaccaaaaaataaaactcattaatttattatagaac

SEQ ID NO: 99765 - DNA, 287 bp, Glycine max
  Clone ID: PAT_MRT3847_61103C.1
gattagcttctttttattatggactataagcataattttccgtgttgtgaccgccaaagaacaagaagaacactgttaatcatccctcaaagaatctcccgcggttgaaaaaaaaaacaccgctccttacgaaaacggtgacgcccgaaagactgatacccgcgcacaaaaagctgaacgtggaaggagggggaacactacaggtatctttcttctacgaagaaaaaacagatgaatttttttttagatcccccggagaccgcaaagggaatgagccccttttcaaa

SEQ ID NO: 99766 - DNA, 322 bp, Glycine max
  unsure (1)..(322): unsure at all n locations
  Clone ID: PAT_MRT3847_61104C.1
ccctttttattttttccttccactgcccttcacatgaaaagttttctttataaaaaacccttccaataccatantntntnttttncaacaatttctcaattctttgctcctattatcttgncactcttntccatttccatacttcaaacacttgtaatttcttctaatgatacaacaccccacttatattacatcaatatcaaacttcataatcctattttcaacatttaccaattcccatcacaattctctacgaaattttaccaaacccaataccacaaacccttcatttttttcttccataaatacttacttacattcc

SEQ ID NO: 99767 - DNA, 639 bp, Glycine max
  Clone ID: PAT_MRT3847_61105C.1
acgagctggcagcaatataaatattttgttgtttttctcttaaatcattgctcacttattgtttataattatttaagagaaaaacaacaaaatatttataaacaataagtgagcaatggttttaatttctgaattttttttttattatttcctaacccgtttattttcatgttattcgattatatgactatcagttatttcttgtccttgattgtgttttcttgtattttttcatattcacttttgctggaactttcctgctgtagttcaatccaaaacattattctcaaattactctgcacctttgtacttctattagcaaacagagtggtccttctttaaaatccaagcctagtacaacgtaatttggcataaacttattaaactactatcatccaattgcaagcttgttaggagtccagctttcatgcaaaatacaaaacctttcacattttaggccaaagtacccgcaaattcaaatctacccatattttgtatccatttacaacttcagtaggcttaatgattggaatttttctaagcattactattctttagtttttttatagtgatgtattgtgtgttggttcaaatcttcatagtgcttatttgtgtgtgacttaaaacagagttacctcc

SEQ ID NO: 99768 - DNA, 231 bp, Glycine max
  Clone ID: PAT_MRT3847_61106C.1
gttttcttatgacaacatcttaaacatcgggaacccgttaaaaatgtcacttgtctgattatcaatcagccttgtctctcgggatacctgcagacgctagctatgttgagaaagtggtactggtaacagctcaagtaatataaattgtactacaatccttcttgaaataaaataaaagcgtaaatgtcttgttcaaaaaaaaaaaaaaaaaaaaaaaaaaaaaggggggcc

SEQ ID NO: 99769 - DNA, 316 bp, Glycine max
  Clone ID: PAT_MRT3847_61107C.1
cccgagaatgtaatatgcataggctgtttattatgctattgtttacatggggacacatcaagttatataattaactttaccaaaaaaattttttctagttatatacaaaaccggttacttatttttagcaacaataaaaaaaaaactagtaatatttaccactctttaatttaaaaattttatatactggccaagtgctacagtgtaaaattgtttaacaatgaatttatttatttgcaatgaaacttaaaacttatgctataccttttggacgtggttgttcaaatcaaactgtccaattgataaaggaagccaa

SEQ ID NO: 99770 - DNA, 951 bp, Glycine max
  Clone ID: PAT_MRT3847_61108C.1
gagtctcagactaattctatttcaaactatgcatccaaaattcccaacagtaacttcaatcaacagaaaattacttatattcgaaaccatttgcaagcaaagcacgctacagatataatgagcaaaactatatcaagtatcaatgaaaatgggaccagaatttcggtgccggtggggcttgttaactctcacttttcaactttcaaaataaaaaatgcaagggtaaaccaaaagaaaaaagtattaatttatggaaaataaaatgtggcagaaagaacacataatcatgtactctgcctgatatgtatgcctatgaatgcttttggcttttaccatttctgtgtatgttttccttaataatgttacctagctgtcattcatttctaacagtttttttcttgagattggttgcaattgtacttgtccatgagctgcgtcagttcattctctaactccttctcaagttcaacctgctcttgccactgcttcttcttcagagccaactttttctcttcatgaatttttttaattttctctctctctgcctcgaattgcttcatctccttgtcttgaggcttcaggaaactagagatattttccaccttgtcctctttctcagaagattctttgcaggactctttcactttttcttgcattgcctgcagctgtaatttcacaaacttatcctcctttgcagctatggcttgttgaatgtcttggatttggctctggaaatttttttctagtgcatccatctccttgtcctgttggtcaacacggtttttttcagttgtcatgcttaacttctcacttgatttacataaagagtctgcaccgacttgtgatttgatttgttctttggctaccatgctcttataatagtcaagcttccgactatcatcattaatatgttttatctttctctcaaccatctcttgatatgatctcatt

SEQ ID NO: 99771 - DNA, 334 bp, Glycine max
  unsure (1)..(334): unsure at all n locations
  Clone ID: PAT_MRT3847_61109C.1
tatttacaatntnttcactctcaatantntcatctcncaaatcttttaaaacgcctttatccaacctaccttctgngaaatttattccaatttctgtaaacaacaaacacctctgttacctcatctcagtcaagacaattaaaagataactttcaagacattatttttaaacaactgccaccaataattttacactctctaaagatatcaagaataacctaataacgctgattaaagtcacgtcaacctctctaattatcaaatacaatagaaaccaaccaatccaaaaaaacttatttttttcaatatcatatttatttcacaactatataat

SEQ ID NO: 99772 - DNA, 493 bp, Glycine max
  Clone ID: PAT_MRT3847_6110C.1
ggtgactccgggtctatcttaacgaaccgggggcgggcatgtatagttggatcgtaacattcactgcttcgggcgaagacatctcccatacgcacgacagaagcaccacacgcaagaaggacttccacggggctgcgaagtaaaagtcaaggttcagtgcctctcgggcgggcgggaggagggttagcgaatgaaagttacgatgcagagctttcgtccataagaacgagagtcactgtggtgcgcggcggcattgacagtcccataaagtacgggcgttggatgtgcttgagatcaaaagcttctgagtcgcatgcttgcggtggcggatgcgagagttcgtttggctccgtgcgttagtttggccggaccaagcgctacgtgggatggtgaccccacatgctcgcccaattgcttgagagggtggggcaaactcgtaggggccattcttatcgccggggggtgggggacgatgtggaagattgtcaagggg

SEQ ID NO: 99773 - DNA, 259 bp, Glycine max
  unsure (1)..(259): unsure at all n locations
  Clone ID: PAT_MRT3847_61110C.1
gtcttttgctcttccatacaaganctagcagggtcgaccccataggtccctttctttttagatagatggggttagagagagacagacaggcacagtactaactacaatacacaaacacactgaaattgagagaaagagagagtctataaaatcgtagagcgtttggacccaactaaggactaacactgtgagattgtgggtatactgactgttgtaagatagttgcccggcttttaaaatatgctttggcttatttttg

SEQ ID NO: 99774 - DNA, 1022 bp, Glycine max
  Clone ID: PAT_MRT3847_61111C.1
ttttacggctgcgagaagacaacagaagggggttaagaacagaacgaagccacgcatgataataacaatacccttcttcgtttcttccctctccactcggcactcacaattctcaacccaaccaccccctattaaccctcaccgcaatctctgattcgatcttcttcaatttcggggtttcccatataccacaaggcataggcctgtgtgaatttgcgatatgctgggtaattgtcgccaagacccaatctcttgggtactcctttaccaacccccaccgccgcattaattgtttttctattggaatcggacaaaggttccactgcgactgaaactttcaaaggccaaaaaatgctcgattcggtccttctggcgcttttcttgccgtgccttggcatgagcggggtttttatcgtctacatgtgccttctttggtacgccaccacccggcaccaccagcaaccccccatcgacgggcaaccggtgaagcccgtcgctgataagggtctatccgctttggagttggagaagcttccaaaaatcaccggcaaagaactcgtcttgggcaccgaatgcgccgtctgcctcgacgagatcgagagcgagcaaccggctagagtggtccccggttgcaaccatggatttcatgtccaatgcgctgacacctggctctctaagcaccctatttgccccgtttgtaggaccaagctggacccgcaaatcttcacttcccaaagcccctgctgaacaatgaagcattcattattcaaggaatgaataagggaagccaaattttcaattagtaatttcataattatctttattgttttctttgtcagttctttatagtttcttgaacttccgttactaattattattattattattatgtgtcgtgtagtggttcagtggttgtggtgtgttatggcctggatgaatttagcagtagtacccgaaaattcagaagccatgtttaatttatgtgtttattgtttaaattttaaaataagggggttggaggg

SEQ ID NO: 99775 - DNA, 225 bp, Glycine max
  Clone ID: PAT_MRT3847_61112C.1
aaaaaaaaacatattgcaagcacactttaacaagatttttgaaaataaacaacagggcggtcaacatggaaggaataaatgccaaaaaatttcccacggacgtaattgctgcgcggcacgaacgctctaggacggttgcttggaagtatgctgatcgaatcctacatttgttgaaccaacgtgtgatcgccaatatcgtgcatagcgggtcttgccctgtgtttc

SEQ ID NO: 99776 - DNA, 1222 bp, Glycine max
  unsure (1)..(1222): unsure at all n locations
  Clone ID: PAT_MRT3847_61113C.1
gaagtgcgttagaacagaaaagaagtgcaaacaaggcgcacataataatagtacccttcttcttcgtttcttagctctccactcgcctattaaccctcaccggaatctctgattcgatcttggttttcccatatagcacaagacatagagccgtgtgaatttgcgatatgctgggtaattgtcgccaatacccaatctcttgggtactcctttaccaacccccaccgccgcattaattatttttctcttggaatcggacaaaggttccactgagactgaaactttttaaggccaaaaaaatgctcgattcggttcttctggcgcttttcttgccgtgccttggcatgagcggggtttttatcgtctacatgtgccttctatggtacgccactacccgccgcaaccaaccccccattgacggtcaaccggtgaagcccgtaactgataagggtctatccgctttggagttggagaagcttccaaaaatcaccggcaaagaactcgtcttgggcaccgaatgcgccgtctgcctcgacgagatcgagagcgagcaaccggctagactggtccccggttgcaaccatggttttcatgtccattgcgctgacacctggctctccaagcaccctctttgccccgtttgcaggaccaagctggaccctcaaatcttcacttcccaaagcccttgctgaacaatgaaacattcgttattcaaggaatgaatgagggaggccaaattcttaattatctttattgttttctttcttagcgttctttctagttttctagaactcccgttacttatttttaatttattattattatatttatatttatgtgtcgtgtattgtggttaagtggttgttgtgtgttatggcctagatgaatttagctttagtacacgaaaaatcagaagccatggtttaatttatatattatgtggtttggactttggagatgtaattgtgaagcttatttgaatttttcgctttgtttcgtaaagtattgcttgttgcacgtaaagaaggtacgaatggaggagaagacaaaggagtggggaattgacgctatcacgtaaatcccagacacgtangtgagggatggttgaagcaagtgcgggtcgtgaactgaacgttggttacgtttgctttttccatggggagtcacagagtgcgcatggtgattttgattttgatcttatcaccccaaaacactatacagc

SEQ ID NO: 99777 - DNA, 666 bp, Glycine max
  unsure (1)..(666): unsure at all n locations
  Clone ID: PAT_MRT3847_61114C.1
tttgggttttttttttttttttttttttttggctaaaattgattatgctagatatccaaacacgcactaactgacattctgcccatgacttgctccccccatctcatcgcgcaatttcctctttagccgtatgattgtcaaattataactgtgggaattaggatcactcaccgacccaatactatagtccaaacagttattacacatcacaatactattttctaagaaattacgtattttctactctgtcgggtcctctttaacttatcttccataaaatatcaaaacaacttcaatatctattttcatcttccagttgtataactctaaatttaaatttgcaataaacctaaatattttcagggaaaaaaagaaagagagagaagccatccatgtctgtttggctcctgacaaaatttaaagatggaaaaccttaaaaaaagacaaatttattaagtgcacgttaaatatttattgaaaaatacaaatttaataataaaaataaatcaacaattattttataactaattganaatatcaataaaatttattcaatcatacttcatgatatttaaaaaaatgagctttcaaaaagaaaaaaaactttataaagagacaaattttaatttatggattacatatatttcctaaaataaaattaaaatc

SEQ ID NO: 99778 - DNA, 385 bp, Glycine max
  Clone ID: PAT_MRT3847_61115C.1
cttaacccctaatcaaatataaaatttcaatttccaaggattaactatatttttagtttctctaaatatacaaatacacacatttagtccctaaaaaaactgctccttaaggttccttatatttgcaaacgtgcatctttaacccaaatcctaatgatatattagttttctataatataaaatcctaatctattcaaaacaaattaaaagtcctaatatgataatctatttcttacaaaaatcattaaataaagataacatttctaaaataaagtaacaatccttaaataacaacaataatcttaactcattctgcatcaacaatcgttcctggaagacaaaaagctcccttgatgtataaaaattcaggccttccctggtccca

SEQ ID NO: 99779 - DNA, 396 bp, Glycine max
  Clone ID: PAT_MRT3847_61116C.1
tcagagaaaataaccaagcttaaacacgcttataagagcaggaggggattatgccaagtacagctggggctttgacaacggacctggtgacaaagaaacactagccaggcgctaaggatatgaatgcgggagcagttctaatactcaatcatacacatgacagcaaggactgctcgacaccaggacactagccaagcttcgatacgcatcacacagctctgatggatgagccaaagaccatatgagtcgttatcttaagaccttgtaagaaggaaacactacttacgcttctaggatcaggttgcggtgatagatcttatactcaatcatacacatgagatcaagttacatctgacaccgaaacactaaccaagggttatcttgcttctaaaagct

SEQ ID NO: 99780 - DNA, 462 bp, Glycine max
  Clone ID: PAT_MRT3847_61117C.1
gcttacagttaatgttgctgctcttgtaataaatgttgtggcagcaataacttctggtgatgttcctttaaatgcagtgcagagaacctcttataacaaatatcatgtggagaaacttgatcgtacaggctgcctatcaaatcgcagttctcctcgtccttaacttttgtggtgaaagtattctaccaaaacaaaataccagagctgatgcctttcaagtgaagaatactttaatattcaacgcgttcgtcctgtgccaaatattcaatgaattcaatgctcggaaacccgatgaaatgaatgttttccgtggagtgaccaagaacaaacttttcgtgggaattgttggagtgacctttatacttcagataatcatcatcgagttccttggaaagttcacctcaacggtgaggcttgattggaagctatggcttgcttctcttggtattggatttgtcagtt

SEQ ID NO: 99781 - DNA, 698 bp, Glycine max
  unsure (1)..(698): unsure at all n locations
  Clone ID: PAT_MRT3847_61118C.1
ctgnntagtcagatatttattagaaacacttccatcgccactagtagtacagagaaaattaaagtacaacgtagacacgtagatattttgtgaatgaaatcctgggacacggtttaatttccagccccagcatatacacaaacaactaacacaagatgctcaaattttctgctagatcttgatttagtattaacaaattagaaaaggtcaagcattctgaaatactaaaacgcccttcagaacgaccaacttccagaacaaagtttttctcgttcagcaaagttgtgtttgaattgtgaagtatgatttcttggattcatgatctttttgggattcatctttgagatgaaagaatggcatcaatggcttgtctcacttgagaaatgtcaggggcttttccaccttggactggccaaaattcatcagctgccaacaccttcacttgcaactgaagaaacttaacataactaattgctttctccaacattgtgaccaaatcaaccttggaaccgttggggaccagttcttgtagtatcttaagccgctcacttattctctctcttctattcttggcagcaacactttgnnnatcctnnnatgggtttgactttgnnnntgctgctttacttgcacttgtgcatggcttcttgnnnanngtaacttgcatgttctctcccataaaannnngcttttnnnng

SEQ ID NO: 99782 - DNA, 1770 bp, Glycine max
  Clone ID: PAT_MRT3847_61119C.1
gaattcaagcaatcaccgcgattcttcatttttcacatcgaaaaaatccgcataaaagaattcatactaaataacaaaatctatatgaaatataaatggctaaaatacgctatgctttccttaatttgtttggggaatcgaaccttgccaatgctaaaaagtcagtttgatagtatttcactatttataaagtggcaaggggcaactctaacaatatctagaaatgttacaatgtacagctgaaccaaaaaatgaaatgatgttaaaagtaaaaggaatcacgtaatgattgctttatgcttaaaccctttgggattaattggataatatacatttcattggaattctagaaggatggttcagcaatatggagcagtaataatatatactatattgtaacctgtgaggcgttagcttaatatgcatgcatggctggttatccacttgaggaagcgatgcctattgcgtagcacgagacctagacctcttcaatcgcctgagtggtttcaagaagtaacgagccaatggtgttttgggaactggaatgaatttgccgactatagcaaggggccagctgacaaggccaataccaagagaagcaagccatagcttccaatcaagtctcactgttgaggtgaactttccaaggaactcgatgatgattatctgaagtataaaggtcactccaacaattcccatgaaaagtttgttattcgtcactccacggaaaacattcatttcatcgggtttccgagcattgaattcattgaatatttggcacaggacgaacgcgttgaatattaaagtattcttcacttgaaaggcatcagctttggtatcttgttttggtagaatactttcaccacaaaagttaagaacgagaagaactgcgatttgatagacagcctgtacgatcaagtttctccacatgatatttgttataagagattctcttcggccaactggtgatctgtgcattaggcggtctgttggcggttcagtagccagtgcaagcgccccaagtgtatccatgataaggttgacccacaaaagctgcactgcatttaaaggaacatcaccagaagttattgctgccacaacatttattacaagagcagcaacattaaccgtgagctgaaactggataaatttctgaatatttgcatatacagagcggccccatcggacaacctttaccactgatgcaaagttatcgtctaggattataatatctgagctttcttttgcaacttcagttccttggatgcccatagaaagaccaatatcagcctcatgtagggcaggagcatcattggtgccgtctcctgtgaccgcaacaacttcccctcctttacgtagagcttgcacaagcaaaagcttgtcattaggagaagacctccccatcacagttattttcttggcaatatcttctctttccttttcagatagttcacggaatttctttccttcaattatatttggctcaacagcatcttcaattgaagccagtatgccacactccaaagctattgcctttgctgtttgaaggttgtctccagtaaccatgcgtaccttaacaccagcatcagtgcatacttttacagcatctttgacaccagggcgacaaggatcctttattccaacaatagcaagcaaaacaagctcatgttctggtaaggaccattggtctaaatcctgctcactagatggaactttgtctaattcataggatctgtatgcaatggctacacaacgcaagctgcgagcagc

SEQ ID NO: 99783 - DNA, 242 bp, Glycine max
  Clone ID: PAT_MRT3847_6111C.1
ggattccgggtcgacccacgcgtccgcggacgcgtgggttaatatatatattgtgtcccccattagcctgatgttcactactctctcttccaagttcatctctctctgtgtatattcaaatccatactatcactattcgcatcggtgacttagtgttttgattgtacgacgcagacacaaatcatattccatacgaagtcccgacactactgtgaataaagacatggagggtcgtaaaggaa

SEQ ID NO: 99784 - DNA, 1431 bp, Glycine max
  Clone ID: PAT_MRT3847_61120C.1
acgagtcgagttttttttttttttttttagtttggggaatcgaaccttgccaatgctagaaaatcagtttgatagtatttctaaagtgacaaggaacaactctaacaatatcttgtaatgttacaatgtacatttgaaccaaaatttttttttaaaatgaaatgatgttaaaagtaaaaggaatcacgtaatgattgctttatgtttaaaccctttgggatttattgaataatatacattacattcgaattctagaaggatagttcggcaatatggagcagtaataatatatactagtatattgtaacctgtaaggcgttagcttaatatgcatggctggttatccacgcgatgcctattgtgtagcacgagacctaaacctcttcaatcgcctgagtggcttcaagaagtaacgagccaatggtgttttgggaactggaataaattttccgactatagcaaggggccaactgacaaatccaataccaagagaagcaagccatagcttccaatcaagcctcaccgttgaggtgaactttccaaggaactcgatgatgattatctgaagtataaaggtcactccaacaattcccacgaaaagtttgttcttggtcactccacggaaaacattcatttcatcgggtttccgagcattgaattcattgaatatttggcacaggacgaacgcgttgaatattaaagtattcttcacttgaaaggcatcagctctggtattttgttttggtagaatactttcaccacaaaagttaaggacgaggagaactgcgatttgataggcagcctgtacgatcaagtttctccacatgatatttgttataagaggttctcttcggccaactggtgatctgtgcattaggcggtctgttggtggttcagtagccagtgcaagcgccccaagtgtatccatgataaggttaacccacaaaagctgcactgcatttaaaggaacatcaccagaagttattgctgccacaacatttattacaagagcagcaacattaactgtaagctggaactggataaatttctgaatatttgcatatacagagcggccccagcggacaacctttaccactgatgcaaagttatcgtctaggattataatatctgagctttcttttgcaacttcagttccttggatgcccatagaaagaccaatatcagcctcatgtagggcaggagcatcattggtgccgtctcctgtgaccgcaacaacttcccctcctttacgtagagcttgcacaagcaaaagcttgtcattaggagaagacctccccatcacagttattttcttggcaatatcttctctttccttttcagatagttcacggaatttctttccttcaattatatttggctcaacagcatattcaattgaagccagtatgccacactccctcgagccgaatt

SEQ ID NO: 99785 - DNA, 233 bp, Glycine max
  Clone ID: PAT_MRT3847_61121C.1
accgtccggaaggatggaagaacttacacggagggtccggatggaggacatgctggatcaacgcgcgaacttccctccgaagaaatgactacgaaaccaacatagggacaagatgcaaccacttagaacaaaccctagactattatacccgcttatgatcaataagcaatatcgcctgtgattctatgaacatagccgattctaatgccaatgctgcaacggctagggttctc

SEQ ID NO: 99786 - DNA, 668 bp, Glycine max
  Clone ID: PAT_MRT3847_61122C.1
tacgaattcgagctctgtacccggggatcctctagagtcgacctgcagcaaagttactttctcgtgcaaaactttctggcttgataatttgttagtggtaaccacaggaacagtttcagccgccggtttctggcttgataatttagtagtggcaaccacaggaacagtttcagctgccggtgacagtcgctccctcactgtgaatttgtcatcacctggggacttacatccaagtgctggctggctaactatatctggttcacttactggactaacttctacatgaacagacttttctccagaacttggaggtgcttgtttgggagacttgatcataggcatttccttggaaatatattgaaaatctttgatttctttaggagacttggttaaaagaatttccttggttatatcttgaaattctttgatttctttggtggctccagcagaggggtctacagatctcttatcacagctagtggtagtagatatagttgtctggtttatgacaagatcacattctgaagcaagtgttaccttggaatcctcaacacggtgatcttgagttaaactggaactcactttctcattactacttatggtattctgaaaattcatggtaacctcacaggtttctttaggcactttttcagccatcttacaatgtg

SEQ ID NO: 99787 - DNA, 267 bp, Glycine max
  Clone ID: PAT_MRT3847_61123C.1
cagggggtctattgtttgactggttgttgttgaaactcgagcgggttctttagatgatctgaggttctgtaaaactattacctcacctacaaatgtcttgttttggaggtaactttagcttcaaaaagattatgaaggagcggccacattttccgccgctgaaatatctatccctaaatgacctacactgagtcgaccaccagcgaaaccctttttatcggagagggtcctgcaaaagctcaaaatgaggatgcttaaaatggcatg

SEQ ID NO: 99788 - DNA, 509 bp, Glycine max
  unsure (1)..(509): unsure at all n locations
  Clone ID: PAT_MRT3847_61124C.1
acgcgtnnacgtaagnnctcggnaatnntcggctcgnaggaaatcgatcccaaaggaaacttcctcatcaatcatccttctgtcgtcaccgatctttccaacccaaccacacctgcttcagcttttggaatcatcatcgaagccttacgattacgaagagacgctggcatcaaacccttcacagtcatgtcttgcgataatctcagacacaacggtgaccaagccaagaaagcctgcatatcatttgctcgtgctctcgatccccaactcgctgattggatctctgagaatgtctgctttcccaatggcatggtcgatcgtatcactcccgccactactcccgatatccgaaccgatttgaattccaaatcaggaatcgaagatttggttcccgtcatttgcgaagactttatccaatgggtcttggaagacaaattcagcaacggccgacctcattaccaagtcgcaggcgttaccatcactgacaatgtcactccatatgaggaagc

SEQ ID NO: 99789 - DNA, 286 bp, Glycine max
  unsure (1)..(286): unsure at all n locations
  Clone ID: PAT_MRT3847_61125C.1
cttgccagtcgcagacaccctggatcctacactttcgnttcgcnnatcaatanctgcaggattccatatttttgatgaggataactgctcagaagcaatcgtctggttctaagaattctaagaagggttctgnatcggnacctccgtccgatgaaaagatcatgagcattggtctcatatatgtgaacgagcactactctggatggaaagagcagtgcttgagggtgctgcagtccaagttcgacagctcaaagccgctccttctcacccgatcaggaaatagcag

SEQ ID NO: 99790 - DNA, 710 bp, Glycine max
  Clone ID: PAT_MRT3847_61126C.1
tctggaatcgcgtccccacacgcgcattccccactctctctctctctcccgagagatcgatcaaaaaacagaaaatcaaagcctatcaccgatgccgccaccaacgcccctgagcagcgcctccgccgcgctccggcggcggctgcagcagtccctgcggacccgcggcggcgcggagtccgggccgagccggtggacgagccccggccacgaggagaggccgaaggggtacctcttcaatcggacccctccgcccccgggccagtcccgcaagtgggaggactgggagctcccctgctacgtcaccagcttcctcactatcgtcatcctcggcgtcggcctcaacgccaagcccgatctcaccatcgaaacctgggcccacgaaaaagccctcgagcgcctcaagatcgaaaactccctcgccgccgccgcaaccaataacaacagcgagtcgtcgtcctacgacgaatcggactgagtcgactcggatccgtccatgttaggttttgttaaaggaaaaacaaaaaaggtttcttcgctgtaataagggtatacaactcttggaatttgaactccttggttactcttatttttcttctgtgttttgaattttgaattgtgatgatgatgatgagattgttgactcgcttgatattgttgttattgactctttcttgaatgtggataaggcgttctgcgttaaaaaaaaa

SEQ ID NO: 99791 - DNA, 434 bp, Glycine max
  Clone ID: PAT_MRT3847_61127C.1
cctcgtgccgaattcgcacgagggatgaacacggatcgacggcggcggcggcggctcgaagttcaaaggagagggttgagctccgggaaggaggaaacaagaggacacgtgtcgggtaacgaagggggacgcggctgttaccttggggaattcctctttcactgatctgatagcgaaacgtgtcggtgacgttagaatctgaatctcaatatctggggtctcaatcacttcatccacgagtggtgctgcttccaccacccttcgatcatatccactctgcagacagaatcttccccctcaccgtctgatccatctacaggaggttcttgcttcttacatctttctcattctcaacactactgtacccaaggtccaagaagaaagaataaatataatataattatgcacacactttctttttcaaaaaaaaaaaa

SEQ ID NO: 99792 - DNA, 426 bp, Glycine max
  unsure (1)..(426): unsure at all n locations
  Clone ID: PAT_MRT3847_61128C.1
cccacgcgtccgcccacgcgtccgcccacgcgtccgggaataacatctttctcactcacttcaaagctggcaaaagataaagaggctgaaaaaaagataaagggggtacatgcatgatggttgagattctctttctcactcacacacatgcaagcaatttttacagtgctttattactgaaaatagagaagttaagagcaattgcaaatttcaaagagcaatttcaaattgtaatatgaaggggatgaactgtggcgtgtgtgtcgctctctatctctcgtggtccaatttttttggggtttaaggaaaatagtaagtgatggcatggcttggtggggtcttggggtgaaatttggctgacagctcgggcttcacgtgcatgcttttgntctgcattttgaatccgtatacgtaggttcttatcac

SEQ ID NO: 99793 - DNA, 124 bp, Glycine max
  Clone ID: PAT_MRT3847_61129C.1
cgcacgcgtccggttatttgataaggtgccatatgttccggctatactgtaggcggagagttaaattgaaaggatgccaaccatatcttggccatggatcccacaagtgcacattccagagaaa

SEQ ID NO: 99794 - DNA, 474 bp, Glycine max
  Clone ID: PAT_MRT3847_6112C.1
gcaaattaaacacaccttccattttcttcttctagtaactctctactctttctccaattccataattaattagcaacacctcagatattccacttcgatcatggctttcaccaccttgccttcaatcagaaactccatttcatgcccaactatgcttgttcctgacatgcctcataataatatttctcttcgaaataaaggcttcatctacaaagggcaacacggtattaatctccgagacttcaccaaggcaaatgttgcaagtccatcattacctgtgattgccccaccaacaccggaggaacggaaagaaaccaccgccgacgaccgccatcaccaccaccaccacgttgcatggactagtatcccgcaggagaggtgggaaggagagttacaagttcaaggaaaaattccattatggctgaaaggaacgtacctaaggaatggtccgggcatgtggcacatagaggacta

SEQ ID NO: 99795 - DNA, 213 bp, Glycine max
  Clone ID: PAT_MRT3847_61130C.1
gcatacaatcaaacaatgggtctaatagcatttaaaaacctggatcgacatttaacacaggatgaatcatctcccaagaaaaaaaaaaaatgtgggacaaaaattaacaacatcaaaaagtttccggcttccttcaaaaggtgaacgggctggccaaaagaggccattgctgattatttcacagccccactcattgatggttgtgcatggaca

SEQ ID NO: 99796 - DNA, 249 bp, Glycine max
  Clone ID: PAT_MRT3847_61131C.1
acggctgcgagaagacgacagaagggggggtttgtgaggactgtggacaatgcttccgtttttgcttttgcggttgagtttcgttgtgcaaaagtcaaacagttttaagggcaagataaaaagtctctcaagccttccattccaatccaaaccaccctccaccctcagatccttctatgttttttttattattattattattaacatagcaatataatattaatcaagaaattaagcatgcttcgagca

SEQ ID NO: 99797 - DNA, 193 bp, Glycine max
  Clone ID: PAT_MRT3847_61132C.1
gagatatagagggacatttaggcccttagatagaaggtggtgcaaaactaaaagatggtgcaggctagcgtgcccctctgcctcacctcgcggaagatcacgtcggcacttactgctcatagcacagtcccaaatctctcaaatccggcgtcgacgttttttttcacctgggggggaacccgcacaaaggaac

SEQ ID NO: 99798 - DNA, 186 bp, Glycine max
  Clone ID: PAT_MRT3847_61133C.1
aaactggttactctattctagtacaacgaccatcttgacaggatagggtcatggcaatggaaacatgtgatgaccttctgtttcgatggggacagggttttagagcaaccttaacgtaacgagtgccatatgcaaaaactcaaagccgtcaaactggattaccgtatagagtctgaaggaaggctt

SEQ ID NO: 99799 - DNA, 1642 bp, Glycine max
  Clone ID: PAT_MRT3847_61134C.1
acggctgcgagaagacgacagaaggggaaaatgatagtgacggctcgagccatgcctaagagagtggaaggagttgttgccatgaagcagcactttgtgcttgtacatggcataggtggaggaagttggtgctggtacaaaatccggtgccttatggagaattcaggctgcaaggtctcatgcatagacctcaaaagtgctggaattgatcaatctgatgctgattccgtgctatcttttgatgattacaataaaccacttatggatttcatgtctgatttgcctgagaacgaacaggttatattggtggggcacagcgctggagggttgagcattactcaggcctgtcacaagtttgcaaacaagattcgtttagctgtttatgtggcagcaactatgctcaagttcggattcctgaccgatcaagatcttaaagatggggtgcctgatttatccgagtatggggatgtgtatgagctgggatttggattgggacatgataagcctccaaccagtgctttggtgaagaaagaatttcaacacaaaatcatctatcctttgagccctcacgagcaaagtaattcatcaggattcgacattggccgcgatgctgttgaggccagggccattgctggcattgacgagtgctcaattcagagaagatggtgatggtgatggtgaagtggagaaggtttgccgcgtgtacataaggacaaggcatgacaaggtggtgaagccagagcaacaggaagccatgataaagaggtggccaccatccacttcatatgaactcgacagcgaccatagccccttcttctccaccccattccttctctttggcttgcttcttaaagctgctgctgccttggacgcaattaactagttcaggattgggcttccatgcatgccttttcttcgttgctctccaaaagtttcatgtgggtaattaatttcataaatatatctagttttatacattggttgtaattatcactaataatatatgaatcactattctatgtagttgtaccaggatttgtattgcattaaaaatggaagtttcaattactccgccttagatttggttggcggacaggatgagcctccatccagtgctgtggtgaagaaagagttccaacgcaaaatcatctatcctttaagcccacatgaggattcaaccttagctgccatgctgctgaggccagggccaattctagcattgacaagtgcaatgttcgtagaggatggtgaagtggagaaggtgccgagggtgtacataaggacaatgcaggacaatgtgttgaagccagagcaacaagaagccatgataaagaggtggccactattgtatgtgtatgaactagacagtgatcatagcccctttttctccacccctttcctcctctttggtttgcttgtaaaagctgcagcttttgacgttggatgcaactttcagactaggccaccctcctagcttctttttttttctctacttttgcttgtctccaatatccaaaccatgtgctgtgaagaatcaatttggtaaatagttttccaattgtgtttccattaatcccaatgaatgatttatattgtattataataatcccatatatataatagtgtgtttgttggggctgag

SEQ ID NO: 99800 - DNA, 592 bp, Glycine max
  Clone ID: PAT_MRT3847_61135C.1
aagtaatagcttgatgagatttcaagctccaatcatttatacatttttgaaaattacacaattaattgattccatacaaattaacaacaaacccaattacagtaagagctatcatgcattggcattgagggccaagggagggataacacactattcattaggctaatttgttaatcttcatgaatgtgttcgagcatccaaggtcagaatggtgctgaggttcattggcttcatatactttgtagagccagacataatttgttctacaacaagtttgtttgccttttcagttggatggaatggatcccaaaatgcatgcaagtctcggttggggcataggttggagacaggcaagcatagccccataccattgtagggtccttgtccacaacaagctacttttgacgtgttaaatccataagcattgggattggtgatgaaatcattgtgcattagtgctgtatttgcagcaatgaaaacgtcgctgccaattttcttgttaagttcaagtagcatttgctctaattgagggttgtacaatgatgcagcacgttgtagatcagcagaacattctccatttttgcctcgcatg

SEQ ID NO: 99801 - DNA, 331 bp, Glycine max
  Clone ID: PAT_MRT3847_61136C.1
gggggaaaagaggatctcattcaagtaaaaccctgaaccttcaacttatttggcccttaattgctatttaatcaccagatgctcgccaaaaaaagatgttttaaacctatttattacacggtcctccggtttgccgttccttggctaacactttcaccatggtgatgggcatcacttcacttttggcgaacttctcacacatgggggggagcaaacttgaaatttgggggcctggccatagcaagtggggcatgaggaattagtgcttttttgcatgatggtgtttgacagggccaacaacctgtcgttcgaggactaacatattcaataa

SEQ ID NO: 99802 - DNA, 2146 bp, Glycine max
  Clone ID: PAT_MRT3847_61137C.1
ggctcgagaaaaaactaatatacccaatggtaaatttatagtttcccactgggggagacctatgtgactctcacattagccttcccctggggacataactaggcagaaaattatatgatgcatttttttaagaattaattgcgtctgctaaataacaaagggcataataaatacgacacaagttcaccctccaaagtccaatccactatcactcactctctcttctcctaccattatttctctctaccttgaacttccacaatacaactctctgcctataaacgctcttgtttaacgtgagaacttgggtgatcttttggagttgtaggagcccttacaccttgcagagtcatctcaacattcccaagggctcctactacgcaataacgccaagctcgatctcaaattaatatatcatttattcctcttaatcaaatattaaataagaaaagatgggagagatgtcaaacttccaattgggtgtgattggtgcactatttctctcggtggcttcttctgtctccattgtcatctgcaacaaagccttgatgagcaatcttggcttccctttcgccacaagcgcttactagttggcatttgatggtcacattttgcacccttcatgcggctcaacgcttgaatctatttgtgtccaaatccgttgacttgaaaacggtcatgctttttggtattctaaatggcaatatcctctccattgctcaacctgaggcttggctttaattccattggattctatcagatgacaaaacttgctatcataccattcactgtattattagaaactattttcctaaagaagcagttcagctcgaaaataaaattcgctttattcctattacttgtgggagttggcattgcttctatcacagaccttcagctcaattttgtgggaaccattctttcccttctagcaatcataacgacatgtgttggccaaattctgaccaacacaatacagaagaagcttaacgtctcttccacacagctactctaccagtctgctccattccaagcagcaattctttttgtttcaggccctgttgtggatcagatgctcaccaagcaaaatgtcttcgcctacaaatattctcctgtggtcttggcattcatcatcttgtcttgcttgatagctgtttctgtgaacttcagcacatttctggtcataggcaaaacatctcctgtaacatatcaagtgctaggccacctcaagacatgccttgttctaggatttggctacacattactgcatgaccctttcaccggaaggaacattcttggaatactaattgccgtttttgggatgggtttgtactcttatttctgcactgaggacaacaaaaagaaacagttagctggtgatctcccattggcctctcaggtcaaagacaaagatagcttaccacttttggccgggaaaaacgtgggtaatcaaaatgaggaaaatcatgagactaataaattaagcaaggattctgttatttgaaaggacaggctcccatttctttttcagatttcatatattttgggtttctttcaatttctaggaaaattgtaatgagtgtaaatcaaatttgtttaataagttttctgtaactttaagtcggtgcatttcattacctaccatatatatattcgttaaactgcaggaggaaattcaaatttcataaaattgtaatcccttttttgtgtcaatgaaaaggtagacatcaattattttgtgattcccggctatgttgttctcaataacaatcatagaaggtgcctgttgcattccattttgttattatcgttttttactaatctgaagactctgatgaaaattcaaatgttgtgtgcgtagtgagcgggctactcattctctggtgtcttagaaccatattattacagatgaaaatgactttcactcaaagaaaagattaccatgtggatgagactcgcacttgagggagagattcttggaatacaagtataaggtgaaatctcacattgagtacaaatgagaatgttgaacatcatataaatacagaaaaaacccataaacctgattttaggttaaaatgtgatgtcaagttcagttatatggttactcatgactcattagtgtaaatctgtatgatatttcccc

SEQ ID NO: 99803 - DNA, 403 bp, Glycine max
  unsure (1)..(403): unsure at all n locations
  Clone ID: PAT_MRT3847_61138C.1
atttttcctaaaatctattcccagcagcangggggnggatattggaaacaaaacctggaagtttactaagtgatactttgaaaaatattattcaggatccaattgcaaggtatgggacttggagtccaacattggaatatgggattctagtgcggggtttttagggtgttgggctctccaactacaatagctagcttttgtgtgtggttctcccaaggttcttaacatttaactttagtcttttgggttagttagttcataaagggctgttgccatcttgcctgagagggtatgttagagattagagatgtagtttaaaaaccagtctttacctaacagcttaagcttcttgggtaattattcatgacgcagcatgctgaaaaatgtcgatgtgccccatgca

SEQ ID NO: 99804 - DNA, 457 bp, Glycine max
  Clone ID: PAT_MRT3847_61139C.1
atttggcacagtggcaaattaaggaataagttaaacaattaaaaactcaaccaaagaataaatagtagattttgtagcctttgtagacaaccacacctaatgtgtacaatggaccgatggagaaaccgaatttaattgtttaacttattccttaatttggcacagtggcaaatttgtgccttggtgaccagttggtcatagattcgaatctagaaatagtctctttgcatatgcaagggtaaggttgtgaataatgacccttttccataacttcgcatagcgaggagccttcagacattggggtatactaattttatcccttaatttgggacctcattgtcactttttaaccttgcactcctcccctataaaaatccgttgttcttgaggaggactaaattatgtgcaaaggctatataactcaggaaactactgaaggggaaattacttttgcttg

SEQ ID NO: 99805 - DNA, 157 bp, Glycine max
  Clone ID: PAT_MRT3847_6113C.1
ggttttcttttctttattacacaacacactctggggaaaaagggggagttcttattcccttttaaccccttcattggtccgccattttttattccttgccggaccttcccaaccccaaggaagtaaagggggagcccttgtggaaaaagattcctgg

SEQ ID NO: 99806 - DNA, 154 bp, Glycine max
  Clone ID: PAT_MRT3847_61140C.1
ctttaactggataatttcggaagatgagtacgtacagcatgtttgtagagtttctcagcagttacatgctcataggtatcagtatgatgctgtggattacatctggtataggagtctaaatggtgatagtaattctcttggtgtcgatgagatt

SEQ ID NO: 99807 - DNA, 393 bp, Glycine max
  Clone ID: PAT_MRT3847_61141C.1
acattccccaatagacgtttcacctatgtaagttagacacccgctgcatctgtacgattcgcagactcgaagctagactgaaaatgcagtgtcctttaccgtacttgcgagtacatgttatgacttagagactgcttattaaccagtttggactacaagcgacacgagtagacgtcgtccgattgcctaccaggagtgcgccgtctcgtcgccaccgacgaacctgccgaggacgacccgcgcgacgtggaagacctcgacaacaaccgtggcagcgtcattgccctcgaccagatcgcagactcctgcgaagacgacgcaaataggcgacgagggaatcggaagagctacacgacgccttccatctctacgacctagacaaaaacgccttca

SEQ ID NO: 99808 - DNA, 556 bp, Glycine max
  unsure (1)..(556): unsure at all n locations
  Clone ID: PAT_MRT3847_61142C.1
gaaaatatgagcacaagtgtgcttccctctctcctgttcttcctagtcctcatcctcttgctacttgacccttctgaacccgaaaacgtagccatttactggggtcaaaacgccgacgagggaactcttaatgaaacatgtgcaacagggacatactcgcatgtaatcatagccttcctttccacctttgggaatggccagacccctcaactcagcctggctgatcattgtgacccctctactaatgggtgcactaagattgggagagagattaagaattgtcaagagcaagggatcacggtgatgctctctattggaggaggatctggtaattactctataacttccgatgaggatgccaacaatgtgtccaattatttgtgggataatttcttcggtggcttcttctcatcacgcccatttggtgatgcagttttagaaggccttgactttgacatcgcgctgggtgataatacatctttcatggcaaaatttgcacaatatcttcaaatcaaattcagatttcacaggacgattccaacaanaaacaacctac

SEQ ID NO: 99809 - DNA, 428 bp, Glycine max
  Clone ID: PAT_MRT3847_61143C.1
ggctcgagctcgaaccaaatcacttagctaacatggtgtgctttattgccacatggaggagccgggatggggcatttctggggagaataaggaaacccttcacactctttcaccaatgaagaaagcttttgatggaaccttcattgttgctgggggttatgatagagaagaagggaacaaggctgtgaccgcggacaaggcatatcttgttgcttatggcgcgtatgtttttggctaattcggatttgtctaaaaggttggaggtagatgaaccactcaacacgtacaatagggataccttctacactcctgatccagatgtgggtcatactgactacccatttattgaacgtagtgtgcttaaggaccacatgagctagagtctagaagggtggattcactcttatatgttggtcatttatttgatg

SEQ ID NO: 99810 - DNA, 133 bp, Glycine max
  Clone ID: PAT_MRT3847_61144C.1
ggtatccaatactcaccgtttctcagatgttttatttgcaacactgagagcacgagcagttgcgtagtgggttgttcgtcgccgctgcgacagagtgccctagcgacctctcgagcttgccacctacgcgact

SEQ ID NO: 99811 - DNA, 3288 bp, Glycine max
  Clone ID: PAT_MRT3847_61145C.1
cggctcgaggaaagggaaccccccgcaaaggagggaggaatcaaaggcgtaacccgcaacccaacccttccccttccctctaactccatcaccgcatcaccacaccagtcccctgcaccctcaaacaccagatccttccccccaatcccaacgatgaacgatttcgacggcctcttcacctccgatttcggcctcaaaccccagggcaaatccgcgccaatggctcctcaacccaagggatcttccaactccgcatctctcaacttcgatttcggatcgcgatctgcccgcgcctcctccaacttcgacgatctcctcgccggcgccggatccgaacaatcgccgctccgattcccccttcgatttggattccatgtacggcggcccccctgctaggtccgccaactcgccgccgccgccggtttacgacaagccggtgtacgacgacgacattttcgacggcgtcccggggctgaagagcacctccaaggttaaattcgacgatgttttcgcgacgacgacagagagtggtggtggagcccccgcgttcgacgatcttttaggcggctttgggaaggaatcgaagagtttggatgggaagagatcggagaaggatgagaaaggtgtttccgattttgatgatttgcttgctggattcggacacagtaggtcatcatctggtggaaggcacactcctgatatcggtttatcctcagaaccaactgccagtgcatctaaaacaatccccactgcagcagaagaccctttcaaagtatttgaatcagcttcagccccagtggattcatctgcaggccactttatgaacccgttggaagaaattagtaaatttagtagttctggaagcacaaaaaatgatagttcttcaacttcaaatggcaaagtatatgaagatattgatccttttgatggtcttggaaaatctgtaccagctttctcatcagagagaaatagcaggaagggtagcagttccccaaggttgaatacaagcacaagttggactggagataaagaaccagttgataaaatatctgggaggagtcctgagaggcacacacaaaacaagattcctgttgaaaatgatcgagaatttctacatgccccatttcacatgcctacctattcatctgattctgataaaccagttggccaaaggtctacttcccctccatataataatgtcgattttagacaaaccaatattcaggcagatatgtctccgaaatatgaagataacttggaagcaagcgaggatatatggctgacggtatcagagattcctctttttacacaaccaactactgctccaccaccttcaagaccccctcctccacgaccagtacatattcccaagtcaggaacaacttcaccagcttctaccaatgctagaaagaagactaatgaattttcttcttttcctggctctacccgattctctcagggacctaagtctgctcctgctgctggaagggtatccccttcatctcagtttgatgaacttgatgattttgcaatgggcagaagtcgtggtaatgataatgagagtgcaaatggtcttcctgatgaagaattagagatgaactctgctgctgcggctatgaaggaggccatggatagagctgaagccaagtttaggcatgcaaaggaagttagggagagagagtattcaaaggctgctaggagcaaagaagctgtgcaaatggaaaaagatgagagaactgtgctagaggagcaagaaaaccaggaaaggtttgaccgagaacggcagcaaaaggagaaggaaggaaaggagcagaggagacttatgaaagaaagggaggagaaagaaagagaacaacagcgactagagagggaaagggcaagacaggctgtagaaagagctactagagaagcacgtgaaagagcagctgctgaagcacggcaaagagctgagagggctgctgttgagaaagctaatgctgaagctcgaggacgtgctgaaagggctgcagtgcaaagggcacaagctgaagcccgagaaagggctgctgcagaggcgaaggaaagagctgaaaaagctgctgctgaggtgaaggatagggaaacacgggaaagagctacagctgcaagggctgaagtagaagcacgagttaaagcggaacgtgccgctgtagaaagggctgctgctgaggcccgagaaagggcagcagctgctgcaaggatgaaccaacaaaagaatgaaaatgatcttgaatccttctttggcatgggtgcacgagctagcagtgttccaaggcctcctagggctaactcttcagacaatgtttttgaatcccaatttcagtccgatgtaacaaggaaatctacaagtgcatctacaagtatgaagaaagcatcatcttccactaatattgttgatgatctttcctcaatttttggagctgctccaacatctggagagtttcaggaagttgaaggggaaactgaagaaaggcgacgagccaggttggagcgccaccacaggactaaggagcgtgctgctaaagcattggcggagaagaatcagcgggacttacaaactcaaagagaacaagctgagagacataggcttgccgaaacactggattttgaaattaagcgctgggctgcaggaaaagaggggaatttacgagctttgctttccaccttacaatatgtatgtacttagtagacacactttggttaatctcacaattttttctattgatatgattatggtgcctggaagtatgtaagcataaattatatctttatgtcttctctttgaattcttaagttcctatccaaatgtattattgcatatgtggcttataaggtgtttgcactaatctaggaagcctggaataaattcaattctgagcagcttttctagccttttgctgaatttaacaacttcaagttacaattcatcaatggtgaaatactgcttccttgtctggcgtctctaaaatcttcttgggtgtaattgatatccttcgaggggttcgttgggttcttcaaatgtttattaatgtagcatgttttattgatgtaaaatatctttttgtgctatcaatttcattattcattatccctgcctagtgagggctcatgagtcatccttttttttccgggttcaagagaggatccaccctgaagtgggtcctgggtggccctccttttataccttgtggtatgtatagtaggatgtcttgaatacatataaccatggattgacaccaaaagctgcaatttatacatggatcttcgccc

SEQ ID NO: 99812 - DNA, 144 bp, Glycine max
  Clone ID: PAT_MRT3847_61146C.1
ctcgacccgagatcaaataatggaacagctctcatcttcaagtttgacagtttactttacgcccaggaacttttgaaaataccatgaggcgattgtatgttattctccacgtacatacacactgatcaatcaccttggcctaca

SEQ ID NO: 99813 - DNA, 372 bp, Glycine max
  Clone ID: PAT_MRT3847_61147C.1
ctcgtaatgccgctcgagattagactcactaaccctatgacatgaccgggcgtctacctatacagtatttaggtaccctagctagctatcaccctaccctttttaattccttccctttattattattgtacagcatgctcaccgatctcacaagatagatcatctaatcattcagcatctcagtgggttttttaagtggcaatcatttggcagagggatcaagctctacaacataaaactgccatcagagtccacggacacttaaccgctatgagtctcaaaagagaagggaatgctacactcatgatcaggacctgaagaatcaaaagccgacaaatcctctatctcagtgctattgcaaccatgtgtcgg

SEQ ID NO: 99814 - DNA, 310 bp, Glycine max
  Clone ID: PAT_MRT3847_61148C.1
gttttcgttctctttggcttatcatacatatctgtctgtggacaatataaactaagtgctgcttgagcgattaaatacattggtttatcttgaccacttgtacaaacggcatcgctttacttagcagggggatgctcatacattccagtcagattgtgacacgatatatgtaacccctccttcgctgctggggcttgttgatcattacaacaacagaactatatattcacattatgatgctgtatctgatgctattgtgtctaatggtagtgacatcactccgatagctgtgggtggtattattgacgat

SEQ ID NO: 99815 - DNA, 476 bp, Glycine max
  Clone ID: PAT_MRT3847_61149C.1
cttgcacgatgagaaaagaaaggaagtaagaaagttcctaaaaaaatatcaaggaaactttggtattagaatcacaaaagttaaaatgaaaaagggaaaaaaatggatgagaaccaccacatacccacagcttctagttgttggatgaaagccatttgatttctcatatggaaaatatcaagaaatgcattaaagaaaattgaggggaattaaaaaaacaaatattgatctcaaacataaaaagactgcctaattaagaacaataactgctaaagtagtaggtactatagcagtgcaatttgctccaaagatatgtatagtgggaggtttagacataaaaattaaacatgcagtaaaactaacaggatgaaaatactgatcttaaggctgctttcatctgcaatttggatgacaatgttatttcccaaagaagctaactgttgaaaaaaagatacagaccagtacccttaggatcc

SEQ ID NO: 99816 - DNA, 405 bp, Glycine max
  unsure (1)..(405): unsure at all n locations
  Clone ID: PAT_MRT3847_6114C.1
cgccccgcgtgcgccttcttgggggnncgaggtgcgatcggactctgcctgggaggaacancgagagcaccagtgttgatagcagtgctcgtgttctgcagctggcttcgagggccagggcctgcgggaggagaggtggagggtgaggagcgggggagggctgagatgagacaaggaatgtgttggtcttattggcatgggctagttatttacctacatttgtggtgccggtttgctggggaattatgcatgtggtgtggtgtggtgacaccccccacagggntgcttggggtagtgtgctagcggggtgcggtgggtgggtggtgggcaacgaaaggacacctggacctagggggtggtggcggggggggtgagactggctgttactggggggggtggtggtgg

SEQ ID NO: 99817 - DNA, 592 bp, Glycine max
  Clone ID: PAT_MRT3847_61150C.1
cgggggaaggggggatcccctaaaagttgtaaacaacaattgaaaattacgggtccactacaaaaccaatgacaagttaaacccccaaatgacctttaccagtctgaaatccaataaaaaaactcctagattacaattaaacaatccaaatcaaacagaaactcagttttacatgattcaagccatggccattcacgtaaaaattttcacccctttactgttttttgaaccacttttgttttccattttaaggggcaaaggaccaaaaaacaaaacctttttttggggcccttgaagctgttttttcaccacatttttgcccacctttacaaaaagccttttagggttcctttccccataattgttgttatggggcaatcctccattattgaacactaacacttcctaatgatcctaagccccctgaaaaaaatcccccccattattttaaactgcaccactcacattctccgaaacctttccttgctcgtcactaaaaaaaaaacttccttttgaacatgccacattcccactttaaacctcacaaattttcttatttttaaaaaacctcacacttttttttactccaggt

SEQ ID NO: 99818 - DNA, 248 bp, Glycine max
  Clone ID: PAT_MRT3847_61151C.1
ctcaaaggtggttctcatgagctaattgatccggtgaggctgtttgaggatggccttgtttgtgtgtcttctttcaaatggttgcctcctgggagcacagagactgctgttgcagtccgcacctcccataagtttctgattgcttcatcgtctcattccgataatgatccttccaccacgagggatcttctggactctgcgatatttcgcactttgcaggggttgcttgtgaacatgatgttggagag

SEQ ID NO: 99819 - DNA, 292 bp, Glycine max
  Clone ID: PAT_MRT3847_61152C.1
ggctcgagcactctcatacatggggcatacttgttttactatgagggatctagaagagggacctggtgtcgtcaggctaatcgtgatgccacaatgcaaagcctatcactcggggtgtttggcagactacgaccaacgagtcggcactgttatgtagtctgagcttgcctagatccggtaccgctaagacgagctggtatcagcccatagggaagttgggaccaaaaacaccacaaggcttgccaggtagaggggcttgggaatttgtcgctcgaccaacatattggataat

SEQ ID NO: 99820 - DNA, 415 bp, Glycine max
  unsure (1)..(415): unsure at all n locations
  Clone ID: PAT_MRT3847_61153C.1
cgcgtccgaccacgcctnccaaccgttcgaacacacatccgaacggttgcgtctagtgagtgaatgtgggttgcggggaactaaaacaaaacttttgttgttctgtgcatgtgtttgttttttctctcacctgaaaatgtcttgctgcggtggtaactgtggttgctgaagattatgcaaatagattataaggatgcggaggctgcaagatgtacccagacttgaactacactgatttaaccacaaccctacacctatggacattaagattgaacaaaagtatgcaaaaagtgcaggtgctaaaatggtttgttccacgatgaaaacatatgtttaataaatcccacattaaatacgaaaaactcaaaacaacctccaaattaataatataaggattaaaaaaaaggcaatttat

SEQ ID NO: 99821 - DNA, 500 bp, Glycine max
  Clone ID: PAT_MRT3847_61154C.1
tgctgctatagacttagaagaaccaagctctaatacaaaatgataatgacaaggttcaacttcttttggcacacattctcacaagagaaagattggagaaaaagaaggaatagtagcttctttggataaaatgacgaactcttttgatcgaatggtagaaaaaatggatggtgaggtcgatgatgaagatattcaagaagtgttacgagaggcagctttgataccagatcttaatagacaacaatgggctaaagctattaaatggttagctgatgatccaaagcagttatagctattgtgaaagtccttccaattcacgtaaagacagattatgttttaacacatcttgcaaaatgaacttgctgagtaaccttttgtctacattttcaatttcaactttcaaattataaaattgtcttttttatgcctagttgatgtgatgttttcactatagctaatttgcgttcctggtgcgacttatgttattttgcttcttctat

SEQ ID NO: 99822 - DNA, 493 bp, Glycine max
  Clone ID: PAT_MRT3847_61155C.1
caacaacaaatgaatatgttgccttcattttaattactttatgcacacatataaattacatgcctatatttacaaatccgttcaccaacgtttgattacctacaaactataaaacaaatgaattgtagataaaataagtactccatgtacagaatctacaactatgttcctgatatgttcaatggttaaacaaaggccataaccttagggtgcacatctacaatggttgcgggttcgtgcttggcagcgaaggaattgtctagatgcaaatcatgatgaccaacccctaccctattttgttgaactactaacacggatccatcgaaagtagaatctgaagacactaacatgtctgatacagaaccaagttctgggtactcattccactcattaaatccactaaacaatgaagagtcgttttcgtgacatctacccgccaaaatcaaatcaaagcaaccttcgagtgactttatgaaactgaccatttccacac

SEQ ID NO: 99823 - DNA, 288 bp, Glycine max
  Clone ID: PAT_MRT3847_61156C.1
gatagcaacagcatatcatgcattgtggtcaacaacttaaattcactccctgtgtggtgcttacgtccacaaaaccaaacatgtcaaacacatgggacaactgcgactgcgctgacaagactagctgcaccaagggaaacagctctcgtgttaatgtaaacaatgagaacagttacatcgacgactgttgtcatcgatgttcgaccagctgatcatgataggaagtgtcagtgtagcactaactgcacgtgcacagactgcacctgtggacattaatgaatatgtatg

SEQ ID NO: 99824 - DNA, 536 bp, Glycine max
  Clone ID: PAT_MRT3847_61157C.1
ggctcgtggttttctgctgcacagaaaatcgctctcttctctgttcaaatctcaatttcaaaaattagaatttcaattcccaccttgtttctttcttctcacgctcaggcccatcttattcactcactcaccacctagggttttcttttccacttcgtagctatgctcgatctttctctcactccgcgttttcccgatcgaacgacgccgttttggtgagttttagcttcgtttcgtttcccgacgcggactcattgcttgctttcgtttcccacgcgattgttggaggagtcgtgttgcgtttgttgaccgaggaggtgcaattagggtttccacaattcggttttggatttggctttgtgatggggatttaggttcttaggagcggtgttggtggtgttgctggtgtttttggagtggggaatttgcgaagtgaagagggatgttttactctcaatttatttttgccaagacagggccacttgcgactatatggatagctgcgcatttggagaggaagctccgcaggaccaggt

SEQ ID NO: 99825 - DNA, 528 bp, Glycine max
  Clone ID: PAT_MRT3847_61158C.1
gagagaatatccaaggaaatctatctctttgaattactgattacttgattgcggatggagatatgagaacaaataacatttgcgtgattttatcatcttcaccatgttcactaacttgctatgtttcacggtgccaattattgatcatgagatgtaatcgatttttcttctactaacctatttttgtcttaataatatttttaaaattgtgcaatgttacaactttaatccctctgagcgatatagattgcacttgaaatcgcagttggaatgatataattttaaaattgcgattcaagtgtacgcgtgatctatgaagttagtgacctagtttcatattttacccactttcaaagttagcaatgcttgaacctgcttctttattgattgttatcccgcatcgaagaatgcttctgctgcttatcaaagaaccctaactgctgttcttcctctttctgagctagctgtcacccatcattgctgtttgaagtactattctctgcactagccgcccttttttctgttctg

SEQ ID NO: 99826 - DNA, 258 bp, Glycine max
  Clone ID: PAT_MRT3847_61159C.1
tctcgagccgaatcggctcgagatcagtttttcacattttaggtagtgagatactttttattgtcaagttaattattgacataattattattttataagctagaagagagatttagttcagggtggatgtagaatacaataaaaaaaaaaaaaaaaaaaaaaaaaaaaaaaaaggggggccccccaaataggggccccctcacccgggaatttattccgggcggggtccttgggggggaaaaattttccccaaagggg

SEQ ID NO: 99827 - DNA, 330 bp, Glycine max
  Clone ID: PAT_MRT3847_6115C.1
atattaatacggtttgagcacaacttattaatataatcgtggctaaaatggtgataactatatatattatttttatttatacatttaataatagaataatatattgataaaaaataatatatatatatatatatatatatatatatatatatacatatattcataattatgtataaaataatatatacatattaatattctaacaaatagacataatctttacaagttgaatttaattacaaaatattaactatgacaacaaaacttacattcatcacattatttatttttcaagtgctttaatgtacacattaaaaagacaaaaatcta

SEQ ID NO: 99828 - DNA, 134 bp, Glycine max
  Clone ID: PAT_MRT3847_61160C.1
cgctactggagcgacattcaccaccctttttagattctaatccaggcgctattattccagagcacgaaaggtatttcgccaatctaaggtgtcaacgtaaaagccgcttttccttctcgcgcgaaatgtaagct

SEQ ID NO: 99829 - DNA, 459 bp, Glycine max
  Clone ID: PAT_MRT3847_61161C.1
gatacatacacacacatatgtttgatttcgtttatcatcgtggagaacatcctgcttacatataagaggcatgaagaaatctagccatacgacactgaacccctcacaacagatactcactctggtgatgacactaaacaggcaacataccagacgttaggactcatatgatcacatgggcacaaacccattcgaaggcgaaaaaagcatcatgcaatagaatcatgggtactcataagaaccatagatgataatccagaacacgatagaaatcacattatgccattggaacagctaatgcgccctgcctaataggctcaaggaccagcccaagattcctcatttcgaatttctacatgcttgcagaagtaacgaacgaaggcctcagcctccggaacgagctattgcccatgaacggctccaagctcacaggctgcttcaagctcttcatccatgaac

SEQ ID NO: 99830 - DNA, 247 bp, Glycine max
  Clone ID: PAT_MRT3847_61162C.1
attacacttggttttaaactaaaagaaaaagaaggcatcccaccgtgtgaggagaataataaaacccccctaagaaaaatttggataacaaacccccccctacctcaatgaaacaaaggaactcccctcctcaacaaaaaaaacaaggcctcccaaaagctcaagccaatgggtacctttccgatttacaaaaagcaaatgtatggatttccctaaggggacacccggttttagcttctgactatgg

SEQ ID NO: 99831 - DNA, 338 bp, Glycine max
  Clone ID: PAT_MRT3847_61163C.1
gaacaaggaaatcccaaaaaaaaaaaatttaaggcaaccaaggggggcaaacaacccggggtaaaccccctggataggggcggccaaaatttaacaaaaaaaaacttcaaagggggaaaaaagggccccgggttcccaaagcggaaaaagccccccaattccaaacaaaagcctgccaaaggtaaacagccccatggggaaacggggggcccaaaccaaaaagccccagggggggaaagaaaaacatttgggggggccccaaatgggaaaaggggaaccccttttttaggcccaaacctcaaaaatcatatatcaaccaggggattttgcccaagggg

SEQ ID NO: 99832 - DNA, 189 bp, Glycine max
  unsure (1)..(189): unsure at all n locations
  Clone ID: PAT_MRT3847_61164C.1
gtccatgttgtttattcggctgggacaaangcaaggtcagagttaataggaaatctcatgatgagtactatgatattgatcttacattcccaacttatctggtcgacacaacatttgagcaacggnnggagctcaaatgctactataggcaaacnagagatggatncagtgcaaccagtttccacgaat

SEQ ID NO: 99833 - DNA, 368 bp, Glycine max
  Clone ID: PAT_MRT3847_61165C.1
gttcccgggtcgccccgcgtccgctacctctcccttactccataaaggtggcttagcttcagatgccaatcatcaaattaaccaaaccccttcactcatagagatcatcatcaccaaatggggctttgttcagctcaaatttttgggggggttttgcaaaagaccttaattaattaattcccttcttctctctttccttttatgttgaaggtgagtactaagtagcatgctcccaatacctcaaagtaaccaaaccaaaaccatctagatctcatctattaccctttcaattagcttggacttttttttatttttggcttgtgggtgttaattgttcaaggcctcaaaatctaggggtgtgataaatg

SEQ ID NO: 99834 - DNA, 433 bp, Glycine max
  Clone ID: PAT_MRT3847_61166C.1
gcgaaaaaaaaaatttttttttttttaaaagaccctaaaacaattttcccccaatggggtttccatggggttttaagcctccggggttcccccggggttaaaaaatcaccaaacttccgctgctccttggggctaaatgcccccaaggaccgttgggttttttggaggggggggcccaactttttttggacgttgaggcccttttcgcccaggccaaaggctcgattaaaattttttcaaaatgggttttttttttgggggaattcttttaaagggggggggaattttctaacctttcccaaacatgaggcgggtttggaaatttggggggtttaagatcattttgtcctttccaaaagccattaattgaactaattggtgggaaaccaggggggggggggtttttccttaaggttttgcccaagcccttttt

SEQ ID NO: 99835 - DNA, 1095 bp, Glycine max
  Clone ID: PAT_MRT3847_61167C.1
cgtcccaggaatgcggcctcgagccaataggagcgaagtttgccaatgcctgcagcaatgagatcagaaagaccgggtctttggagtgcatccggggccgagcttgtttcgactgatccagcaaagggcatgtatggagcagtacgaaatgcggaaggaatttttacaagtacccccgattcatacaggcctcaacaatttgatagtccttcaaagcctagggttcattatgagacaactggcccggagatatgggaagatactagaggaaagatagatattttagttgcaggaattggaaccggtggaactgtttctggagctggccaattcctaaaacaacaaaatccgaaaatacaggttattggcgtagagcctctggaaagcaacatacttacaggtggaaagccaggacctcacaaaattcagggtattggggctggttttgtgcccaggaatttggatcaaagatgtgcttgatgaagttatagcgatatcaagtgatgaagcagttgaaactgcaaagcaattagcactccaggaaggcttgctggtgggaatttcttcaggagctgctgctgcagctgctttgaaggttggaaagaggcctgagaatgcaggcaagcttattggggttgtcttcccaagctttggtgaaagatatttgtcaactattcttttccagtcaatacgggaagaatgcgagaaaatgcaacctgagccatgaattgactttgcttgttaatgtttcatactcattttccacaagtatctgtatggaatgacagtgtcagatgtccatgttatgcccgtgtttctcatttttgacactcaagaaattagataactgtgtacaggtcattgatttgacttacaacacagattaatgacccttgattgaagaaattttagatgtaataattattggcattgatgacaacgtagcaaatttctgccttatgttcgctattaaaaaataattgatgaaacagtttatctatttctttttgtacactgccttctctttggactctaaccctttgtttggttagagaagaaaagagaggaaatgaaaggaaattttcaaaaaaaaaa

SEQ ID NO: 99836 - DNA, 497 bp, Glycine max
  Clone ID: PAT_MRT3847_61168C.1
ccacgcgtccgcgagtgcggacgctggtatgagaaatcaccggaattgccgtaaatgccgcctatgacaacacgctgcgaatcgacaaatcaaatgcctccgtggaccactcaggtcctctttcccatttccactcttcaattcaattaatatctcacacacacacactctctctctcatacacacacaaagttccctctccaaacatggcggcaattttctcttcttcgctcttcgtttcttcgcctcttcccaaaccactttcttcctcctattcccgaatccataaagctccacaacttttcaggactcgctcctcgctccttcaggataaagaggaaaaagtgatcgtgcaggattcattcccctccaaaacctttactcttcactccgctggtgaatgagctaggtgggaactgggttaacacctgtgggggcgggaaacgggttatgaaggggcggacaatgggggaatgtctttgtgacgggttgcggga

SEQ ID NO: 99837 - DNA, 206 bp, Glycine max
  Clone ID: PAT_MRT3847_61169C.1
aacatagtagcaaaatcttaattttctattgcccgaaggcaacagccaattattttggatactgggctggactgtgcacatcctggaaaaagaatttttaccagggatctatgggttcaaaaccatgttgggtgtcacatgacaaaccaatgtaccgtgaacagtaacctggaatcaccaatattataacgatgcgaacttcactt

SEQ ID NO: 99838 - DNA, 220 bp, Glycine max
  Clone ID: PAT_MRT3847_6116C.1
gatgaacatgatcacaagtcccatacacggtctacccaagatcatcgactcgctcactccagatattttgtctaatacatatggaactactctcaaatcatgggaaagcctataagcttgtttacccttgaactactcaaactatccttgcataatgcagccaaactaccacctcgatctctaccatgatcccaccgacgtgttgtctaacaataccggc

SEQ ID NO: 99839 - DNA, 211 bp, Glycine max
  Clone ID: PAT_MRT3847_61170C.1
ggggcaaggggttcttaaataattattgggttaacaaacattattaatttttaaggtattagaaattggaaaaaaccatgggtattaatttaattttaaccccccgacagggtcccaaaaagaccattaatggttccattattcttttttacaaccgccatggaaccttaacctttttttttaaaaaaaaaaaaaagggttgcccaactta

SEQ ID NO: 99840 - DNA, 218 bp, Glycine max
  Clone ID: PAT_MRT3847_61171C.1
ttggacttgaaccttgctctcaagcccaaggattggagccggcagggggtcgaccgcgggaggtaccgcccctgcgacttccgaccgcacctgcagcgccagactgaacgcggcgacgccgctcagcagccactggctgcccgccccttagggtgccactcggcagggaaccactgtcatcgacgccatcaacgcctaccctaagaaccaccaaggca

SEQ ID NO: 99841 - DNA, 156 bp, Glycine max
  Clone ID: PAT_MRT3847_61172C.1
tagtattacaccgttttaaataatagacgatattctatgatgaggtcgcggttcccatgactgttgcccggagtagttatcctggcattacattctgtctcatatgtcattgcgtatactgaaaatcatatacccgatcacatcaagagcctccta

SEQ ID NO: 99842 - DNA, 670 bp, Glycine max
  Clone ID: PAT_MRT3847_61173C.1
aaaatataataataatatatatatatatatatatatatatatatatatatatgtggttttttccttgtgttgctggttaggactttaagtaattatatatataattatatttttatatatattatatatactctaaagttggaagctttttattcttatgtatgatggcgtccgtgtgtgagttctcaagggaagcaaagtcctatctttcacacctttcagtctcaaccgtgggaagaagaatctagggtttaacagcaccaccccaagtccatcaagaggctaatatggaagaggttgagcaagctaatagagtagctgttgaaagctgtcatagggttctgagtttgttgtctcaaccaagggatcaggttcagcataggaatttaatggtggaaactggggaagctgtggtgaggttcaagaaagttgtttccttgcttcacagtggtatgggtcatgcaagagtgaggaaggttaaaaaccctcaaatccccttttcccaccaaagcatcttcttagacaaccccaattgcagaaccatcaacaaccatcacttcaaaaatctgcagtttccccaaaccagcttccctgacaattcaattcaggaacttggttcaaccatttaggaattcactcttctcttggacaaccctctttggaattgagc

SEQ ID NO: 99843 - DNA, 1079 bp, Glycine max
  Clone ID: PAT_MRT3847_61174C.1
ctctcgcaagagctacaaacaaaatataataatagtattttttttttcttctcttcctgcttaggactttaattaattatataatatgtatatagtctaaagttggaagctttgtattcttgtgtatgatggttgtgttgtgtgagttctcaagggaagcaaagtcctctctttcacacctttcagtctcaaaaccgtgggaagaagaatctagggtttaacagcaccaccccgagtccatcaaggtctgtgctttgatgcttttttcttcttctttttcactgggaaattcggtcgttttttttttctgaaggaggttttgctgcaacttgtgaggcaccctcagtttgttctgattccaaggttgttccttgtttccaaaaaacatgcctttttttcttcatgatttaaaattttgagactttaacctgaaatcctgtttttatggctccttgtctggtgaaaaaatgggatttttttcatctgggtcgtttattctgccacataaggctgaatgtctcatatgtttgtggataagtggggtggtttgttagtattctggtgttccttggtttggtttcttttttcttccctttttttataaattttttagaggctaacatggaggaggttgagcaagctaatagagtagctgttgaaagctgccatagggttctgagtttgttgtcccaaccaagggatcaggttcagcataggaatttaatggtggaaaccggtgaaactgtggtgaggttcaagaaggttgtttccatgcttcacaatggtttgggtcatgcaagagtgaggaaacttaaaaaccctcaaatcccctcttcccaccaaagcatcttcttagacaaccccaattgcaaaaccttaaccaacaacaacaacaaccatcactcaaaaaaaaatctatactttccccaaaccagctaccctgacaattcagttcaggaacatggttcaaccattaagaattctctctctcttggacaaccctctttggaattgagctccaatgggaaaagtcctcttcacctcacacagcagggttcatcaaatcactatcacttctt

SEQ ID NO: 99844 - DNA, 2405 bp, Glycine max
  Clone ID: PAT_MRT3847_61175C.1
gcaagagctacaaaatataataataatatatatatatatatatatatatatatatatatatatgtttttttttccttctcttcctgcttaggactttaagtaattatatatataattatatttttatatatattatatatactctaaagttggaagctttttattcttatgtatgatggttgtgttgtgtgagttctcaagggaagcaaagtcctatctttcacacctttcagtctcaaccgtgggaagaagaatctagggtttaacagcaccaccccaagtccatcaaggtctgtgctttggtgcttctttttttttttttgttttgttttgttttttctttctcactgggaaattgggtcgattttttttttttgtcggaaggaggatatgctgcaacttgtgaggtaccctcagtttgttctgattccaaggttgttccttgttgccaaaaaacattgctttttttcttcatgagttggaattttgagactttaacctgaaattctgtttttgtggctccttgtctggtgaaaaaatgggattttttttcatctgggtcgttttatctgccacatagggctgaatgtctgatatgtttgtggataagtggggtgattttttagtattctggtgttttacttgtttggtttagttctgccccttgtttggggacttagttttttttttattaattttttttagaggctaatatggaagaggttgagcaagctaatagagtagctgttgaaagctgtcatagggttctgagtttgttgtctcaaccaagggatcaggttcagcataggaatttaatggtggaaactggggaagctgtggtgaggttcaagaaagttgtttccttgcttcacagtggtatgggtcatgcaagagtgaggaaggttaaaaaccctcaaatccccttttcccaccaaagcatcttcttagacaaccccaattgcaaaaccatcaacaaccatcacttcaaaaatctgcagtttccccaaaccagcttccctgacaattcaattcaggaacttggttcaaccattaagaattcactctctcttggacaaccctctttggaattgagctccaatgggaaaagtcctcttcacctcacacagcaggcttcatcaaatcactatcacttctttcagcagcagcaacaacagcaacagcaaaggctgttgctgcagcagcagcaacaacaacaacaacaaatgaagcatcaagcagaaatgatgttccgaaggaacaacagtggcataaacctgaattttgacagtactagctgcacaccaacaatgtcatccactaggtcttttatctcttccttgagcatagatggaagtgtggctaacttggatggaagtgccttccatttaatcggagctccacactcttctgatcagaattcccagcagcacaagagaaagtgttctgccagaggtgatgagggaagcttgaaatgtgggagcagtgctagatgccattgctctaagaagaggaaacatagagtgaagagggcaattaaggtgcccgctatcagcaacaaacttgcagatatccctcctgatgattattcgtggaggaagtatgggcagaagccaatcaagggctctcctcaccctaggggatattataagtgcagcagcatgagagggtgtcctgcaaggaagcatgttgagaggtgcttggaagagcctaccatgctaattgttacctatgaaggcgaacataaccaccccaagttaccaacacaatctgcaaatgcatgaactatgtggagagcttaaccagatcaagcccatcattcaatttgtcaaaacctctctgtgattggcttgagatgctgctgtacatattttaagtgatgcaaacaagcagggatgatggatattgttggcgcagattttgtcttttggatagtttggctaaccagccgttttatttagagggtgaggatgaggatcactgattaaatgaacaaagtctgtaaaattagctagtttcaattcgtaagaactatttcatctttcttaagcctgttataaacatctcaaggttttctaaatgaatgaaaatgcctttgaaaaatggtaatattcttcgtaaaaaaaaaaaaaaaagggcaaaaaaaagcgaaaaaaaacataaaaaatcgcgaaaaaaaaaaaaaagaaaaaccctgggggggggccccgtacccaaatcccccttatagggattcaattaacgcccgttaactgccctggattttccaaccctttgactggaaaaaccttggcgttcccaaactaaatccctttgaagcaaattcccttttcaccatttgggtaaaaaccgaaaggccccgccccgttctcctttcccaacaattcccaaccctaattgccaattgg

SEQ ID NO: 99845 - DNA, 951 bp, Glycine max
  Clone ID: PAT_MRT3847_61176C.1
gtcctatcagttctgaagcagaaaggcaaagagtgattcattgtttggaggctgctgttaggagacgaacttctgaggtactactaccacacatgatttggatgctaattcacaattttttaccaaatatttattagtgacactgttattttgtatttgatattgtagggtataaagctagaattatgtggggaagacagggttggccttctgtctgatgtaactcgcatctttagagaaaatggtctttcagtcaaccgtgctgaagttacaaccaggggcagccaagccatgaatgttttctatgtgactgatgtatctggaaatccagttaagagtgaaacaattgaaacagttcgaaaagagattggcttgaccatactgcatgtaaaagatgatgtctgctctaaacctccaccgcaagagagtggaaaattctctctgtctaatctctttcggtcaagctctgagaaatttctctacaacttgggtttgatgaagtcttattcttgaacctagagtatttccataattaggagctatatgtaatgctttaatttgtaaacagtagatcttagtttagcctaggtagtctgctttgaatcccattgcaatgctttacggtagatctttctagatttggtgtaagttgtaattagatgtcagattctagagtttgatctaggcatgtttctaagtgaattgtatattaatatgcctttgttacattcttctcagactctaattagatgtcaagctgtagagtttgatctaggcatgtttcttggtgaattgtatattaatatgcctgtgttacattcttctagtctcaagcattgtggagtagaacaataatacagggtgtatatgttgtcttttcttgaaatgggggatgatttggttcttttgtacaaagaagaaaaaatcatcaaaagctgataatttaattgt

SEQ ID NO: 99846 - DNA, 218 bp, Glycine max
  Clone ID: PAT_MRT3847_61177C.1
cctgtagcgttgatggcgcttctgaagcgacaagcagcaccgactcactcttctcgggccttacggacatggtcctcatcgtacgcggcaagtagaagttcgggagcaagatcgggagtgcgatccttcggtcgaaatctacgtgccgatgcatgttgataccttcgagatcgtcgccgtcatgattccgaattgtactccgtgggtcccaactgttt

SEQ ID NO: 99847 - DNA, 387 bp, Glycine max
  Clone ID: PAT_MRT3847_61178C.1
gacgggatgttagagtactataatcaatggggcacattggtgttcaagacaatcccaacccatttccataggggcattctaacttacccaataaagatgaaagttattaaaatgtttagggaacacattcaacattacacagcggagattaaaaacccccatcagagacggacgacaaagacaagggttgattccttatggatgaagcctggagggaggaatcagtccatcctactaatatttatcgggaaaaattaacttctggttgtccagtgggaaaacttgcttggccagaatcttgaactaaacattgaaaatggggtgagaggtgttcaccttaaggggaacaaggttaccctttatattctccacgaaaatgtgcatacc

SEQ ID NO: 99848 - DNA, 364 bp, Glycine max
  unsure (1)..(364): unsure at all n locations
  Clone ID: PAT_MRT3847_61179C.1
cttggtttgttttttttttagtcagcacgagaaaagacgcgttttattctatgtgcagaacaaacgtgggaagcgtggctcagcagatgaccttatcaatatgtgagttgggggacacaaagggtggggaggctggagcggccgaggttagggggaggattctaatgactggggggggggcgcttgggtgcaagggggtgagccgggtggggcagggagtgccgtgtggggcggggggggggggggggggtggggggtgtgggggtgggggggggggggggggggggcggggggcgggcttgtgggtggggttgtgcgccggggggtgggccgggggggncggggtggtgtggggggggggggg

SEQ ID NO: 99849 - DNA, 324 bp, Glycine max
  Clone ID: PAT_MRT3847_6117C.1
gatcttaaatgaaaaaaattgctttttatatcagtgaccacaatattaataatcattgctttattcactaataaagcaaagcttttctggcatagattcaatcacggaggtgtatagaagttcaatcttggcacctctcaaaaaaggatgcaattaattaattatacttattaaccagtttcctaaagtgattattaatacaattggaaccatctttcttattcgcgcatgaatgtaatcaggttactgatttatatccaccttaattaattaatagtttaacatattttactaatgctaacctgaaaacgcttcttgttacca

SEQ ID NO: 99850 - DNA, 193 bp, Glycine max
  Clone ID: PAT_MRT3847_61180C.1
cttacacacactgttttttggcagcgcgactcgacttgggcgggaccctttggtgatctgtgagacggtcttgatagccccctctctctctgcttgctgcaaatcaaacgatttttcttcacattgaaaccttgtttgctttaaggacccccttttttctaaaagggaatttgaaatttttcggctttttttt

SEQ ID NO: 99851 - DNA, 477 bp, Glycine max
  Clone ID: PAT_MRT3847_61181C.1
gcgatatcttgctttcatatggatcttcttagcgaagctgaagctgcattacgtcctgccgatgagcctggtgcagaggttccaaacggtgcagctggtcattatctattagggctcatttacagatgcactgacagaaggaaaaatgccatacaacatttcaagcaggcactgtcaatggatcctcttatgtgggctgcatatgaggagttgtgtatattaggtgctgctgaagaagcaactgtagtttttggtgaagcagcagctttttgcttacaaaagcaatacctgaattgttcaacctctccaaactcacatatgtcacctgaacatagtaatgaagttgccgcaagaccttgtatgtctgaagaagcgagtccaaggcaactcaaacaaatgcaaagtctcaaggatattgctacatatcatcatggagcatctattttaggaggagctgctggtcaacctattaatagc

SEQ ID NO: 99852 - DNA, 431 bp, Glycine max
  Clone ID: PAT_MRT3847_61182C.1
tccaggaaggtttcccgtcatcactgtatgacgtcctccttctttgggggggggggggggggggggggcagtaggggtaagaaagacagtaagaaaccacaagctagggaaaaccgcgtgtataggggtggcggctaagaaaacgcgtcgggaaaaccctgaggcggaagatagcgcgtggtagtataaaatggaaagcacaaataggcaggtagaattgcttgtaaaaggaacagatgagtttacaaccagacggcataaaatggagaaaaatatgttttgcgaaacgaatgtacgtgaatgaaataagtgttgcacatggcggaaccagtatgtttgtagagggtattgccaattatggtagagtagttgttgggcgcatatccgctgccaggttaatatcccatggctattggtcgtcatcgtttata

SEQ ID NO: 99853 - DNA, 227 bp, Glycine max
  unsure (1)..(227): unsure at all n locations
  Clone ID: PAT_MRT3847_61183C.1
atttaacactgaaggcttgcannattnctttgttgtttgtgatgccattttgtcttaagcagcntggttttgcccctatgattctctcctcctcctccttgcanggatgtttgtaactattttccaggttgntctanttgatgntattttaacatgtnacatttgnctgtttacctaatatgttggccaaaattttcacaaagcttgccattcctggctcaatcaca

SEQ ID NO: 99854 - DNA, 424 bp, Glycine max
  Clone ID: PAT_MRT3847_61184C.1
cctcgtgccgaattcggcacgaggctgtcattcattttcacattcacacatcaaacccaagaactttctattccttaaaacaatggtcgagcctcctgcggcagcagcaacctcagaatcagacacaacaggaaacaccaacactccttcaccgtcttcttcatcctcgtcgtcaagttctaagaagcgagcaagagacaacaacaataatagtaacagcagcagtaacaagcattctgtgtatagaggtgtccgaatgcgcacgtgggggaaatgggtgtcggaaatccgcgagccgcgaaagaagaacagaatctggctccgaaacgtcgcccacacccagatggcggcgcgtgcgcacgacgtgggcgccctgaaaataaaaggctctcccgcattctttaacttcccgaaactgggggca

SEQ ID NO: 99855 - DNA, 456 bp, Glycine max
  Clone ID: PAT_MRT3847_61185C.1
tgtttgtacttaggtagataaatatttgattagtaaaagaagttaaagaaaaattgatttaaaaaaggtatgaaaaaaacagtaatttaagttggtagaaaattaaattaaacaaaagaaaaaattaaacaaaaatttaaattaattatttaaaaacaaaaaggaaaagaaataccaattattatagaagttaaatttagaagatgagaatattggaaacttaacttaccagagctattccttgatgtaatgttaatgatttttttttctatacataattattccaatttactatactctagctttggtcccccgcatgaaagagtcgaatttatctattttgtctcctaaatccctttgcagagctaaaatagtaaattgcattaagaatagagttgtataacagcctaaacaaatatcaacctatccatagtgatgactttatctagataccat

SEQ ID NO: 99856 - DNA, 446 bp, Glycine max
  unsure (1)..(446): unsure at all n locations
  Clone ID: PAT_MRT3847_61186C.1
aggaagacgacangaaggggggggtttcctagagaaataatcatgtcccaggtctcgtcaatatccattctctggtgacgaggacgacacgtgtcttcgcgttgcgagacggccagnagacttatgatgcagtcagaattttcaattctcatattnncattttattcatgttgatttaatttacctatatagtgatatttannaattcgatgaaaagaatactcgtgagtttagaataatttttttanatctgattattataatggatgatcaaaattaaactcttatattgcatacatatttgtgtgttactaatgagatctagttcagttgattgagtagagctataagtctcttagtgtcttatccaattcctacatataaaacaaatatttgtgtgttggtttgcaggggacaaggttttctggtttaaggatgaggagttt

SEQ ID NO: 99857 - DNA, 431 bp, Glycine max
  unsure (1)..(431): unsure at all n locations
  Clone ID: PAT_MRT3847_61187C.1
cgaaaaggacgggggggcacgaagagagccgcngggaaacaacattttatctgaggcgcaaaccaanaactaaggaaagcaacaaacgcaaggggggggggaaacccatctacaccgaggggaagaagaaagaacgcaaaccgctgaaaacccggaacccgcggcgggcgcgtcacatcatgcgaaacccatgctgaaaccccgcacatgagggcctccaaccatgcttcgcatagcatcaaagcgatcatcgaggggggcgtcctctgctactgccctcactgcaaacccacgatgccccacaagacgctcgccaaagccctcgtcatcgggccgaccatgcaccaatggcgggggaagggaggcgcaacatgggcgccccgacgccatcaagatgatcaactacgccttgaggcactggagggaccgaa

SEQ ID NO: 99858 - DNA, 705 bp, Glycine max
  Clone ID: PAT_MRT3847_61188C.1
cacttggcctcttctacgccgcagtataggtacatttggagttgaagacatatacatatattaatatattattattattattatattatatgtatatatggcaacgtggggtgcgcactcaatgttgttatcccatggggaaggcactggcactcccaaagtatgtgtaaaagcaggccttacggttagaggtgatttaaggtttcacaggactagaggttttaaatatgctcctagtgtggtagtgctcaaagtgttggccaccgccagaaagccaacacggttgcgcttgttaagaccttattgcagtgtgagggggcaacacgaccatgggaaaggatatttttctcccactaattcacaaataccacggcaacatatattgaaattcgccgcggatcgaatgcttgcgtttctcaaagattggagtaatttacgcatcacggcagtagctggcatattggtatccgttttaatgatcattccaccagctgatgctgttgacgctctcaaaacttgtgcttgcttgttgaaggattgcaggatagaactggctaagtgtctttcaaacccatcttgtgcggccaatattgcttgtcttcaaacttgcaacaatagacctgatgagaccgaatgccaaattaaatgtggggacctgtttgaaaacagtgtggttgatgaattcaatgaatgtgcagtatcacg

SEQ ID NO: 99859 - DNA, 272 bp, Glycine max
  Clone ID: PAT_MRT3847_61189C.1
cggtcgaaatccggggcgaccaagcctccggccaaacctccgttacggtgcgaaaagaccacaaaaagggaaaatttggaccaactccgggaaaaagagaaaaagagaaaaaaaaattggtgatacaagttggggggaatcattagaccgtgggaaaatgtgaccagcaatgcaaatgcacagttccatgcaccggtgggtccacattcatgtgcacaaatgtccgcaatacaactggacgcgggggttaccttacatgccccctccggaaa

SEQ ID NO: 99860 - DNA, 364 bp, Glycine max
  Clone ID: PAT_MRT3847_6118C.1
aaaaaaggtttttagggaactttaaaacactaaaaaggtaggggggtgggaacaaaaaccggggccccggcccgcggttacttaaagaaaacccaataaaaagaaaacccccaaagaaacccccggggagggggcaaaaaggggtcggacccaaaaatggtcccccgaggaagggggggcggggtgcatatgcccaagcaagggggggggctgccccccaaaggggggaaacctttttttctgttgaacaacccgttgggcgggttttctggcagaggggaacccaaacggcctaaattgttcccctttaggggggattcgggggggaaaaaagacctgtgaacccccttttttggggccaaaa

SEQ ID NO: 99861 - DNA, 270 bp, Glycine max
  Clone ID: PAT_MRT3847_61190C.1
cttctccttttttttttaggggtacttttaaatattagtgcggtttgttcatcaaaaacaaggataaaagccagaattttaaagacacttaaacaatggttccaatcagtaaggggggaaaaaaacattttacacatatacacacggggggactcaataatttgataaagggcttgctcatcaataaaacgaagggaaattaatccataattttttataacaaaacaggtgggatggaaacccactttctattgtgaggttgcaagacaa

SEQ ID NO: 99862 - DNA, 457 bp, Glycine max
  unsure (1)..(457): unsure at all n locations
  Clone ID: PAT_MRT3847_61191C.1
tnttcnnatttntttttttttaaggtttcaagcaaagtcgaacgagtaaaaaagttgagtcaagccttacaaagaaagtctgcattaaaacaggaaaaaaaaaaaagtccccaaactccacacttgttgacactacacaccctcaatgaaagacccaccaatattgcaccaatgctccaccctcagcaaatgtgaggcatcaacacttacctcagataaagtgaacaaaaaaacaaagtatagtgatccaacacttaagcttgtaacagaatataacatctccaagtcagaactgagcataaccatatctagatcagtaaaatacagaacaaaagactaatccttgcaccaaacacgttgcaaaagacaccctaggtagtcaaggcaatttataagcacaatgacgccaaccatattgcagttccaccaccagtctcatcccaagcggacgcgtggg

SEQ ID NO: 99863 - DNA, 310 bp, Glycine max
  Clone ID: PAT_MRT3847_61192C.1
ggcacaagggggagacagagaggggttccacccagttcatgtatgctattgtcattcgttcatcttacccctgcgtcgttcctctcgaactcgatttttcttccaaaagaacatgacgtgggaatgggaagactatgaatacagcatcaccggcacctaacgcgaacgcgactccggctccgattcctacctcaatttcgatttcatcgacgcactctccagagacaacgattactaggaaatactggaagtggatgacgactctacgggtgacgctattcgtgtcaattacgttagccacgcgctgaag

SEQ ID NO: 99864 - DNA, 450 bp, Glycine max
  Clone ID: PAT_MRT3847_61193C.1
tcactgtatgacgtcctccttctttggggggggggggggggggggggggggggggggggggggggggggggagtgtgaaggaagggaaataggaaaatagcgaaattatagtactgtaggggtacgaaaaggataaagttcaaaggggttttactaagaaaaaactaagcgataaaggattaatagatcaaataggttggcagctgacccctaagagctattacgccgctaaaccattgaatgaaccctagaaggtgcgcgtattaggaagttcaataatctagatacagtaaatagctggccttagaaatgtaagaaccagtgcaaattggtccaataaaaagtcgcgagctatataggttcgaacgtacaataggactaggtaccggaaaatttgccgaagatacaacaacacaaaagtcaaaggtctggataaaccaacagggggca

SEQ ID NO: 99865 - DNA, 335 bp, Glycine max
  Clone ID: PAT_MRT3847_61194C.1
gcccttcctccaccactagtactaaccatgttcacccaattccttatcttttcccttttcttcacttccttcattttcaccggaacccatgacacccatggttttgtgcgcaccttaaaacgcaaaatggtgggtttgggccaaaaggcagaaaaggttaaccctttcaaaatctattggccttgacgggggaaggggccccacccctctttaaatggaagtggggcaccaacccttgaaaaactaaacccattccttggaaccggggaacatgatggaaaacccttggcatttaaaaccccattggacctaaaaattgggggggaaggctaagg

SEQ ID NO: 99866 - DNA, 895 bp, Glycine max
  Clone ID: PAT_MRT3847_61195C.1
cccacgcgtccgcccacgcgttcgtacggctgcgagaagacgacagaagggagttcaagaaatatttgcatcttaacagcaaatggagccatatctaatgtgacacttcgacaacctgcctcatctggtggaactgtgacttatgaggggcgatttgagatcctatcacttggaggttctttttttcttgctggaactgaaagagctggggggctgagtgtgtccttgtcagggccagatggccgtgtgttgggcggcggagttgcaggtcttctgatagctgcttcccctgttcagattgttttggcgagctttgtttctgatgttcgcaagcacttgaagcgtgcaaagaagacggagaatgaaaaggtttcgacagcaggaggccaaagcagctcaccatcaagaggcactctcagtgagtcttcaggtggggttgggagtgggagcccactaaaccaaagcacaggagcctgcaacaacaccatgaacaactgtaccaccccaacacaaagctttcaaggcatgccctggaagtagaacttgactcacctcacatgtttgtgtagtaggtttggtgtggtgaaagacacatcaggctctacttgttatgctattactttgtgtcttttatcctttaagcattgaggatgcacacctgttatattagctttatgtaatattagttggaggaacaacatttcagggataaagtacttggtctcgtagcttagtttggttagatattgtgttcacttgggtgattcaagaggttctggcagaaccgggttgtgttctaggagcatgcaggatcattatgatgagatggcggtgactttgtcatccgttagttgtaatttgttggttgtccatgtgccgaaactttctccttgtt

SEQ ID NO: 99867 - DNA, 183 bp, Glycine max
  Clone ID: PAT_MRT3847_61196C.1
atgttctaagttatttagaaacatgaacggaaagcgaacactttcataactcaggaaggcccactataaaaccaagaaaagtacacctacacaaaatatccggagccaatgcaaaaactagacctgattatatcctcatcacgagggttgaaccttacacaacaacatgttgacctgcatgac

SEQ ID NO: 99868 - DNA, 1822 bp, Glycine max
  Clone ID: PAT_MRT3847_61197C.1
gcggcgtggctggtttgctgtttccagtgtttgtcttttttttttttttttttttttgtgagtttcatttatgttgactgatagtagaatttgaaatttgaatttgaattgtagacgtaggattagagtagaaaaaggaaagatgatgattgtattgcggcgtgtagagagaggatttatccaattccaactttgatactcactcataccataataggatcaggctagggtttataataagctgctgattgaaacaaatgttgaaattgcagttgttgaatcatctgcaccagacaccgattcattcgaccaaaacataagcatgtccggatctgacatggcagggagggagcaattcacggttgggatgcacaaaccccaacaacaacaacaacaacaacaacaacctcagcttcatcaaaacatgcgtatggactatgctgctgacggcactgctgttttcgcccctccgaccgttaccgttaacattaacggcggagattcctctccagcggtgcctccgggcctgggcctgccccagccccagcccatgatggttaactcccccgaaccaattaagagaaagaggggaaggcccaggaaatatgggcctgacggtggcatgaccttgggggctttgaagaccaccactcctcccggcggcggcgtgccggttgggcagtccggtggggcatttccagcggggcctctttcggattcggcctcagctggtaccgtgaagcgcaggggcagacctcgtggttctgccaacaaaaataagaagaatgatagctctaactcctctaagtattctgggccacgatcttggtttactccgcatgtcattacggtgaacgctggagaggatttgtcagcaagaattatgacaatttcccagagtagttcaagaaatatttgcatcttaacagcaaatggagccatatctaatgtgacacttcgacaacctgcctcatctggtggaactgtgacttatgaggggcgatttgagatcctatcacttggaggttctttttttcttgctggaactgaaagagctggggggctgagtgtgtccttgtcagggccagatggccgtgtgttgggcggcggagttgcaggtcttctgatagctgcttcccctgttcagattgttttggcgagctttgtttctgatgttcgcaagcacttgaagcgtgcaaagaagacggagaatgaaaaggtttcgacagcaggaggccaaagcagctcaccatcaagaggcactctcagcgagtcctcaggtggggttgggagtgggagcccactaaaccaaagcacaggagcatgcaacaacaccatcgaaaacagtaccaccccaacacaaagctttcaaggcatgccctggaagtagaagtacttgactcctctcacatctttgtgtagtaggtttggtgttgtgacagacacatcagactctacttgttatgctctattacttggtgtcttttatgctttaagcatttaggatgcacacctgttatattagctttgtgtaatattaattggaggaattttagggataaagtatgcggactcgtagcttaatttggttagatgttgtgttcacttgggtgattcaagaggttctggcaggatcgggttagtatgtaggatcttgatgagatgccggtgactttgtcatccgttagttgtaatttattgtcggtccatatgcctaaactttctccttgttacccagttgttcggtggtaataatacttaatctgtttagcttctttaaaaaaaaaaaaaaaaaaaaaaaaaaaaaaaaaaaaaaaaaaaa

SEQ ID NO: 99869 - DNA, 359 bp, Glycine max
  Clone ID: PAT_MRT3847_61198C.1
atgctgtgaaggaattggcatacagaaaatactaggctcttgtctagggcgcttttccacaaaaaaattgtggcggtaatttcaactttcttcagtctgtcaatgttaccgtctgttgctaagcatggaccttgcgagttacctgacatcggaataaaaataggcttaatatgccattacgtcggtataagtatgtcaattttttgtgtgccctttttaaatttttggtttttcttgttatttaaaagtgaccaattttagccccaccagttaacatatatgccacattcttcctgccaagtttttaaaatgataaatatatactctgattataatatatatatatattttaaagatca

SEQ ID NO: 99870 - DNA, 165 bp, Glycine max
  Clone ID: PAT_MRT3847_61199C.1
cccacgcgtccgcccacgctttcgctaaaaccctaatcctgtggcactgaaagtgtgagatggcaagaggcagtgcctcttgagtgcgcacgcctcgcagtgcgcctgttctccaccacgagcacagccaccgtgttcgccggcactttacccaaaccctgatca

SEQ ID NO: 99871 - DNA, 389 bp, Glycine max
  Clone ID: PAT_MRT3847_6119C.1
acgacaaatggttaaatcttcataaatatgtgtacttctattgcttaaagcaaaaagcatcatcttcggtccagttgccatatgttagaggaggcgcagcattcaaaaggatctgtttgttttaatggaacccaactacaataccatttcgacaacttattaaaataaggaattaaaaactccattgttcacattaatgaatgacgatggtgcaacaatgtatatagtcacctttaccataaggataatacgcttaggctcatctaacctaatgaacgatcttcacttttctacgctttttagcacccaccatgaatctaatccatatttctacaatttgaatagattccacgctaagtactctgatcacttatcatttacttatgatc

SEQ ID NO: 99872 - DNA, 219 bp, Glycine max
  Clone ID: PAT_MRT3847_611C.1
gcaccggcccggaacccccggggctgacccacgcgccagataagacacacaaacgcccccaacgacccagggggaggaacaacaagaggaaagcgggacaagccccccggcgaaggaccccctgcggcacaggggcgccgccaagtggctgcgagcccacaactccgaacctacaaacggcaaactgcaacttccccacatggcccccagaacgcacac

SEQ ID NO: 99873 - DNA, 582 bp, Glycine max
  Clone ID: PAT_MRT3847_61200C.1
gagagaactagtctcgagttttttttttttttttttttctcttcaacatcattcaaaatagattgagttaatatgaaatttggctctcaaagtagcaactgaatacatctatttctgtccattaaacaatttacactacggctgttccagaaatttctccatctgagtgccaaattggtaaagtgcctttgtggaggatccatcttctttcaaggcatcagcggcagcatctttgatcttttcaattctttcacgaatctcatttccttcttcaccaaccattagaccctttatcaccttagcaatttcctccctctccgctacaccattctcattaaatttaggccttaacgcaactttgaggccctcagttaacaaaacagcattcattctctgttcagcaaacagtggccaagttaccattggcactcccaacacaatgctttcaagagcagaattccaaccgcaatgagttaaaaacccaccggttgaaacgtgactaagaatttgggtctgtggtgcccaagaagtaacaacaaagccacgtcctttggttctctctaagaacccatctggtaaaaa

SEQ ID NO: 99874 - DNA, 263 bp, Glycine max
  Clone ID: PAT_MRT3847_61201C.1
cccacgcgtccgctagaagcattagcactaggagcagcaacaactagtctcagctggaatgggctcttcagtgatggcatctctggcccttaaacctgcccctttcactgttgagaagtcctcagtgacaggccttccctatctatccaggaactcttcttcattcagagttgtggccagtggcacgaatatcaagactgacagaccttatgcaatcaatggtggcatggctttgacgtatggatctgatgcatctgtcatgt

SEQ ID NO: 99875 - DNA, 578 bp, Glycine max
  Clone ID: PAT_MRT3847_61202C.1
gactaaagtatgatcatcttatagatggatataccacttagcattttcagtcttttctctcaaagtatacaaggtgttttgaaagttttgtatctttacaagaatttacagaaaactttacaagaatgaacaaaagaatgattcacatagataattttcgtatattctttcttcaaagcttctgttatatattatctttatctccaagtattcattgtctctcaatggttggattcttcattctattctttgtctgaagtttcgaatccaatgggacatttaatgctagcattaaatgcacatgccttcttcatgcaaagttcatgttgataggatatcatgtcttgtacttcagcaggaaagtcacttctttcatcataacaggtctacaacaacagagcgcgccttttaatgaggataaacgtctttcagattatgggatttatttattcttcataggactctgatagatcccaagaaaatattttctacaacaaagaatctcaaacataaagttttcaataaaggtcttaaatgtatttcttaaatgttatatcatattgtcttatgagtgcatc

SEQ ID NO: 99876 - DNA, 406 bp, Glycine max
  Clone ID: PAT_MRT3847_61203C.1
caaacacactaattgcattgaacaactttcaaaagagaagatagacatatatatatatatatatatatatttatttttttcttccacttatttttatgcagaattttcatacttagcactatagtaatctaactctccttgtgaagctaactccacatcttgagttgtatcttggaggtcaccacttcccttgtaatgatatctttgagccacaatcagaaaataaaccaagttgaggactccaatccctgctaccagatagtaaaagtaatcaagccttccagcatttatgtcatttgtcaaccaatctggatggctatgtgttctggcgacatgatgaacagtggtgactagtgcactgctaacatagttagccgcagcgtaagagcaaaagaacaatgcattg

SEQ ID NO: 99877 - DNA, 267 bp, Glycine max
  Clone ID: PAT_MRT3847_61204C.1
ttttccttactatttattttatttttactcctaccaaaaatcatactggggggccctgacaaaatcagtttttatttatccaaaatgttcaatttccccaacgggattattacaagtcttccaactggtcaaaggggctttcccaaaacaaaataaccaggatgggagggaatcagaaccaatattatttttttcaaccttactaaactatggtgatgaaaaaaattacacgatactctccctgctacaattgaatctatcagcgtg

SEQ ID NO: 99878 - DNA, 361 bp, Glycine max
  Clone ID: PAT_MRT3847_61205C.1
ttttttttttttttttttttttatctttggggttttgttttttttattctcacctacgttcttccgtttttgtagttgagggttataccctttgaggttggaagggaattccaagcaaaagcaaaaagatgttcttttttggggggaaaaaaaaagaattgttcaagtgtctttttccggcgcgaattttaaaaactagttttttttttttgtaacctggtaaaaaaagagcccgacactcccttattataaaggaatatatgaacccccaaagagggataaaccttaaagggctaggtgggggggagaatatcaaacaacatgtttgaaccttggacaagggaaagggccgggccccttt

SEQ ID NO: 99879 - DNA, 313 bp, Glycine max
  Clone ID: PAT_MRT3847_61206C.1
ctaacgcgtacaatatttcatataacatcacatatgactgcacatatgcagccgcatagcagacccgctaatttgctcacacatatggatgacccactattgtactcactactgtctcttgcgcttgctaacactattcataaccaagtgcctcggcaagggacgcatgcaagtacatactcaagcacatactcactcgctgagtccacagttacaaccacagttacaacccatattaattctgatagtactttgcctgctatgcaccttcataatcactttcatcattgctttgaccaatgttgtcacactt

SEQ ID NO: 99880 - DNA, 358 bp, Glycine max
  unsure (1)..(358): unsure at all n locations
  Clone ID: PAT_MRT3847_61207C.1
cggggagaagggaagaagaagaagagaaacaagaagagcgtggagacatacaagatctacatgttcaagggtctgaagcaggtccaccctgacattggtatctcaagcgaggccatgggaatcatgaacagcttcatcaacgacatcttcgagaagcttgcccaggaatcttctagacttgcccgttacaacaagaagcccaccatcacttcaagggaaagggggaccgcggncaggcttgngctgcccgggcgngggggcggggggggcggcggggggggggggggggggggggggcggnnggccggggggggtggggggggggggggggggggggggggggggggggggggggggg

SEQ ID NO: 99881 - DNA, 308 bp, Glycine max
  unsure (1)..(308): unsure at all n locations
  Clone ID: PAT_MRT3847_61208C.1
ctcacttcctcttggtgaccaagcagagcactgtgattctttgttttcggacggtataatgagttttttttttatccttgagagctttggtatagaagggatatagaaaaagataggagcagggagagggaggaggatagggacaggagacaagaaaaggaaagagataggagctgggatacagtgatggagagggataggagaagggaaaaggaaagagatagaagtagggacagaataagaggtggcaagagagataaagacccagagaatgaaagggatgataagcatcgggcaagagangagnn

SEQ ID NO: 99882 - DNA, 181 bp, Glycine max
  Clone ID: PAT_MRT3847_61209C.1
ggaagaagggaaattccaaaagtttcttaacagcgggacaaataggaattgcttcgaatgaccataaaagctaatttgccacccggagggttattgggaatcctttaaccgggaaaaaaaaaagaaaaaagattttcttttgaaaagaaagaaccaactcctggctgagttctggaaaaat

SEQ ID NO: 99883 - DNA, 732 bp, Glycine max
  unsure (1)..(732): unsure at all n locations
  Clone ID: PAT_MRT3847_6120C.1
gagggggaaaaatctccattcttttaattttcgaaagtaacagaacttacaactattgggaaatattggcttacaacatcccaaccccaaatacaatattctgaatgaaacaagcaaagcagccaattaaacttcatatcaaccatgtctatagcctatagtctatatgctacagtatctgacctgcttactctgacagatggcacttagagcagcttcagattatgccttttgctctttagcctctctagtcatgtctttccatgtgatgtatcaaaatgtcggaaaatctatgaaagttttacagccacaaaattcatgttctctgtaacttgatgtggcttgccgcctctttctcttcaaaattcagagtattggctgcagttaaaagcatgtccattgctccaccactttccaattcccgtgcacgtttattgtgtgtgtttcttttcaagattggcatttggctttgcagcatcttcaccatttcttcttggcttgttaaactcatatgcctttttagcctggtggattgcttgtattccagcatcacattttctgcagaaccagttccctcttggaatagaagtccgcggaggtttcatgcaatagatgtgatatgcatgatcacagccatcacacagaacaatnccgatcatcatcttggatcagttaagcaaacccggcataaacaagaggggcagtaccaacaatgaccatatgacttcaact

SEQ ID NO: 99884 - DNA, 245 bp, Glycine max
  Clone ID: PAT_MRT3847_61210C.1
actatgcttacgatcaagattccctagaatgcttataacccatatctaatgcacagttctgcggagatatgctcaaagcgtaatcttgtgctccagcgaaatactttatcgtactgcgtatagaatgcagactctactaggaaggtctgtatagttgagatcttggctgaccctcttgatagagatctgccgttcacctgcaaaatccttgataatacttctgaaccaattctaagcatggactc

SEQ ID NO: 99885 - DNA, 272 bp, Glycine max
  Clone ID: PAT_MRT3847_61211C.1
ctctgcctgtatgagtgaaaaaaccttctcttttacttctctcaagtctcgagcgatttcatcatggctccagagaaggacaggctccaccaccttgcctccaagaccggcaaatctggcggtggcaagcagaagaagaagaagtcgagcaagggagagcacaaagagaaggtgaatacaatggtgctgtttgatcagggcacctatgataagctccattctgaagctcccagattcaagcatctcaatacttcgcttctttctgatcgttt

SEQ ID NO: 99886 - DNA, 317 bp, Glycine max
  Clone ID: PAT_MRT3847_61212C.1
ggctcgaggtcactatccctaagtctgtgactccccaaacgccgttctctctattacaattgccggggatctaagctgctaccagatcactggattcattgacgcctgcacacttttcgctgatgacggtgttggtcgtgtttccttccatacgaacttgggactgttatgaggttacttggtaaactcctaactgaggcactacttcacgatatgataaactaggtctatgctgccggtaacggtacactatatgagtcatagtatctcaacctgatagatctgaagatgaatgacaccaactggaatgatgatct

SEQ ID NO: 99887 - DNA, 1760 bp, Glycine max
  Clone ID: PAT_MRT3847_61213C.1
gagtggcattggactgagtcactttccaataccatgccagattttgtataaaatcaaaatctggctgaaattcatgaaagctgcattacacggttgatgtgtccttacattaccaataatgttgttctaaagcataacacaagctttatgtgttctgatctgcaccacacactgatccatcacatagcatcatagcttctcaataattcaattgcacgttcctggaaacctgtgatgtgaatctcaaccgcacattccctgctaccttatcaattcgtgcattcaactgaagcaatcaaccacacacgtcatgctacttatcatctttattaaccgttcatttccaagccagtttcactcaccccgctgaactcatcacttactggaagccttgttgtgagtaagagaaaaggcttcctgcaccgagcacaccaacttgatacctctgattctttctttgcttagaattccacagaatatggagactgttcttttcaatcactccccacctttggaattcaaggtgcgtagaaatagtgccaagtatatggttaaatcatcactaaaataatcttaataatgggacttgaaatttaattactgtatccctctctacctgtttatgtaattttgtggagtatgtaccctttattttatttttatttatttgatatcatgttcgacccccactttgatggtttgagaagatatctacaaaccacaatgtcatgagaggaattgacatgttatttattatattatatatctgtcaacattatatattatatattgcaactatttgatagttacccttaatagagagattaaacagactcactatacagctccaaaagatttgtattttgtttaataaacttagtaaagtaccatatgatcagcagttattagtaatttgggttagttattgtgctaatatgcatcttgcattttatggggaaagatagaggtaaggcttaagaatttgatatacctttatatggtgggttttttgtcataggcattggctttcattataatatgcattaattttaaaaaattactagtcattttgatgtttcttgttgaagaaaccacatattttcccgatttctggtggatttagtatagttggtcattggcatattctttctgtttctttaaatttgtgacaatttgcatgcattgttacatacaaaagtcgttttaggttctttacattttagtcagtgtttaattgattaatttcttagcatattattcaaactttgttaattaattagtgatcttaagtttgaatatatgaggtttgttactcttgattctagttttggttttgtggctactggaccggtaccatgccttccccagtttgggttctatacttctctccttaagcagcaatgcatgagagaataaggactctgagaaactgatcttctggaaatggaaaaaattttgaactgtgattgcaatcagtagagggaaccattgagcttacatttgctgattatgtatggtggtgattgcaaaaatttatttcatgtaggggaatatttggtgttaagcattgattttagatgtttagattatgtatttaagagaaggggaaaaccaaacaagtagtattgtgaatgttgacaactgtgtaacgactgctagtgaaatcttcttatttgtgtgatcgatagaattaatttattctatttttaaaataatttattatgaaaaatttgtcgggataatttttataatgaaaaagg

SEQ ID NO: 99888 - DNA, 567 bp, Glycine max
  Clone ID: PAT_MRT3847_61214C.1
gggaacaaagaaattatgcagagttttttgcttttgatatttctggagtgattctggatacatgtatgataatgtaaattaaaaattatttgaaaatataaattaagattacgtaatatgatttatgtaatttaacagaagatgttcatgtttatattatctatttctcggctagctttaataacagaatctgttagctagcgaaaaatccatcccagagggattgatttctatttctaataatgggtttgcttggaaataataatgcctcacaaacccaacataattataattggataaaattcattcccctataaccatatcgcgaataagaaaccaaaagtgcaatactacacatgcaattaacatgtgtgatgcagaggatttctgactaagtctaagggtcaagttaaagtcaaccattcaggggtggagtctcgatttgggggggttgatgaatggctttttcaaatataataattcttgaaaggggaccagggttaaatcttttccaacgcacctttttcatgggttagaaccccgaaaggataaataaattactactac

SEQ ID NO: 99889 - DNA, 250 bp, Glycine max
  Clone ID: PAT_MRT3847_61215C.1
acggctgcgagaagacgacagaaggggtacagtgtttggaatccttttcgatccgagttggctgctgtgatcctaggcggagttgacaacatatggtttggacctggagtcagagtcctgtacctaggctctgcttctggaaccactgtatcgcatgtcacggacgttgtggggcctgctggagttgtctatgctgtacagttgtcccatagcagtggacgtgacctggccagtatggcatagcagcgaa

SEQ ID NO: 99890 - DNA, 273 bp, Glycine max
  Clone ID: PAT_MRT3847_61216C.1
cttttataattcgatgtgtgaattttttttaatgattggtattcacgaagttgaatcaactgcagagaaccctgatcactggggaagattggattactttgaataattgtagttttttagatatgttttggcaagtcacgtaggtatttattgagtaactgtacatcacatgacataacttaaattttgatgagtttcagtcggtcttgttgaaataaggtaacagaacacacttcctgtaacttataagtaatgatttgtataagctcttgc

SEQ ID NO: 99891 - DNA, 741 bp, Glycine max
  unsure (1)..(741): unsure at all n locations
  Clone ID: PAT_MRT3847_61217C.1
ggcattaattaaatattggtaaaaaaaaaagggcctatttaaagaccaaggttctaaaggaggatttttgaagggggtttttaccgcccaatatcccaaaaagaaaaaaaagaaataagaaagccaataccagaagggctaaggatatgccccctctcaaggctcaacaacatattccaaacaatctttcctggaaagggcccggcacaaacaaacataacccgttggatttgcccggaaatggtttaaagtcccgggaattttaagcctnncgaaaaacctttaaactaccaatatccaaaggcccaactaaattggattaaaggactaattggtggtttggggaaataacaataccccaaaaaagatgccttaaggacctatgaattaaaaaaccggaaaccaatattaattctaaaggaaataaaaagaaaggggaaataatggttctaaaaaaataccaagatcaagcctacctgggttaagaccacctaagaaatcataaggggccaaaagaaccagggaatgggataaccctcccttattaaaattatatttaaaaatggacccaggccttgacaggttaaaaaaactcaaaaagggcctggtctggtaannnnnctggcaaacattacanttncnnggtaccgggaaaaaanccttgnnatcaatannntaaaaggggaancgannntacctgggatcnnnnatncatggacnncggggatattaactggttta

SEQ ID NO: 99892 - DNA, 310 bp, Glycine max
  Clone ID: PAT_MRT3847_61218C.1
cgaagatagcataacagcatacagggacatgtattctgtgacaacatctactgcacagccataacgatgtggtgttcagatctttactacagcacttcgatcactcttaggttcatcttcccgacggcttagattcattctttcaaggagtagcagtaatcactgtcgtctccattttagtgatatcatccgtctgtatgctcggaatggtgaatttatcggatctgcgtcatgaatggttcatgctgttagcactcacagtgtactatctgaaaggatagagcagtatagggcggcatcttttctgcga

SEQ ID NO: 99893 - DNA, 595 bp, Glycine max
  Clone ID: PAT_MRT3847_61219C.1
cccacgcgtggcacgaggaattagcatacatttagtgggaagaccaacccttaaccacaacaaacaacatcgtttcatatatagtgagtgagagaatctaccatcaaccatgtctgatattgctatgttggtagcagaagaatatgagaggaggacaatgaattttaagaaggctggcgctgtacaagagaggaacttgaacgtggtttcttgtgcttctttgttggttctgaaggagaagattgaggtgcagaagaaggagcttgtcaagtgggttttggaacccaaaacccaatttgcaattgctgcttctaacagtttcttttctgcttgaacaacttcagcttgctggttgcaatagttggctgttgttggcaccttgttgttttattattttttccttttgtaatctatgtttctctgtgttactgtgcatagttatgttttgaattaaaggcaaatgtgttccccgtttgacatctccggtgcccctttttattttggtactttgacatattaaatcttatgtattttgatttttaaactaaagaaaaaaataagtgggattctagaagggtataaagaaactcatttc

SEQ ID NO: 99894 - DNA, 2018 bp, Glycine max
  Clone ID: PAT_MRT3847_6121C.1
ttgaaaatttccagggaatgaagcctgaaagtgtacttgacttttcccgcgtgaattcaaggatgaaggagcaagcttatgaacaatcaccaacactcttcttgtcagatattcaacaggtttggagaaagcttcaagacgctggtaatgagattgttgctcttgccaagagcctctctaacatgtcaagaacttcctactctgagctggtgggaattccagcacagagcacatttcaagatgagaagcaagtggaatttgactgttgcatgaaaccagaacagacacaagcatgtgctatgtacaaaatttgcagttgcaagtgttgtggagagaaggcagatgacacagactgtttggtttgtgattcatgtgaagagatataccatgtgtcctgtattgagcctgcagtgaaagaaataatacctcacaaaagctggtattgtgccaattgtactgctaatgtgattgaatctctccatgagaattgtgtgctatgtgaaaggttaaatgatgcaaagaccctggatgatgtaattggtgatggaagctttcctacaattgaggaaacacaaaatgaatttgaagagaattcaaattgcacctctgatggaattcaagtttccataggtgaggaaaaaacacccaattgcaagatatgtgaaaatgaagtggatggtggaaaaataaaaatatgtggccatcggttttgctccaataaatactaccatgtaaggtgtttaacaattaatcagttgaagtcatatggtcattgttggtactgcccttcttgtttatgccgggtttgcttaactgatcaagatgatgatcggattgttctgtgtgatggctgtgatcatgcatatcacatctattgcatgaaacctccgcggacttctattccaagagggaactggttctgcagaaaatgtgatgctggaatacaagcaatccaccaggctaaaaaggcatatgagtttaacaagccaagaagaaatggtgaagatgctgcaaagccaatgccaatcttgaaaagaaacacaacaataaacgtgcacgggaattggaaagtggtggagcaatggacatgcttttaactgcagccaatactctgaattttgaagagaaagaggcggcaagccacatcaagttacagagaacatgaattttgtggtgggcttcgttaaccttccagttattgttagtagtgactttaacttcatatttgttgactgttaatacacagtattttgcatttgctgcattttttgaatgactgatattttggtaggctgtaaaactttcatagattttccgacattttgatacatcacatggaaagacatgactagagaggctaaagagcaaaaggcataatctgaagctgctctaagtgccatctgtcagagtaagcaggtcagatactgtagcatatagactataggctatagacatggttgatatgaagtttaattggctgctttgcttgtttcattcagaatattgtatttggggttgggatgttgtaagccaatatttcccaatagttgtaagttctgttactttcgaaaattaaaagaatggagatttttccccctcatggtttagaatttaatattttattaccatttctgtatagagcttattctgcattgatgcacttgatagttgatcaaatatattttgccttttcaagtaccacgtaccagcactcttccagttgttgtttgttttgggagttcagaaggggctagttaaggttggtaacatgatatttgatggtaaatggttgcagcccaaaagtcttggtgttgtttaggttcagttttaaatagcttgaggtaagttctagcttacaaataagcccttgtaaggttataggcttttgtagaaaagttagatgaagaaattgctgaaaatgttgaagaatattagttgattttatattacgagagaagtttgatttcaagagggggggggggggggggggggggggggggggggggggggcgcgccgc

SEQ ID NO: 99895 - DNA, 221 bp, Glycine max
  Clone ID: PAT_MRT3847_61220C.1
agttgacaaccatttacaatatgtgtgcatatgggctcaacgctggttttttaggtgctggtctcatgctcaccattcctgagaccattccacagcaaactgtgtggatttaaaaggccacactgagaacaccattgaattttcattctccctagcaaagcatttgtcagatatttattgaccttctcggcagtgtattataaaagaaaacaaatctttaa

SEQ ID NO: 99896 - DNA, 300 bp, Glycine max
  unsure (1)..(300): unsure at all n locations
  Clone ID: PAT_MRT3847_61221C.1
gaaattggaacaacacacttcaaggtaatcccttatgacaaagacaaattgaaaggatagaatttctcttgagattatctttagatacggcgacacagcctcaacttacttggcttccatgatgcttaaggttatttgcagccagtgatattttttttttccttagaaggacaaaacaaaagttgagaaggaaaagtattagtgacatatatatataggtatcatgagcgatgaaagatcaaagccatggaacatatatcngtcctcaaaccctggcccatcacaaacaggagttgatgg

SEQ ID NO: 99897 - DNA, 501 bp, Glycine max
  Clone ID: PAT_MRT3847_61222C.1
gggagtttagcatttatatgaagataacacatacttcatggaactgttattgtttgataaattctatgggattttagagaaattgcaattgggcatcatgggcataaagcgcttacttttatttgttaagaacatgtatgatcaagttttcttcagaagttttgtatttttccggccttcctattggagatcatgaaccgtgcatgcaccagtgattgttgatttcaatgaaattgcacgattcattgtgtaacaatcattgtggtgtttacacatgattttaaccatagccctttttagttctctacctttgtcttgttctcccctccagaaatcaaagttatcatatgtagtttggccactggcatgcattatgcccatcttttaacgccccattagttgacttctacctcttgcaagaaaggaaatgacaaagatagaaggctttttctactatctataagtctgtgctttaagtccaatgtcatctgccacaaatac

SEQ ID NO: 99898 - DNA, 957 bp, Glycine max
  Clone ID: PAT_MRT3847_61223C.1
ccacgcgtccgggtttggattggggggtttctctattcgggaggcatggattcgttaccacctgcaaaacggcgtcgtgagagcaaagacggcgagactgaagcttcaacgttgtcaccggttgtgatcttcgctcacggtgccggtgctccttcctcttctgattggatgcaaagatggaagaacatgataaaggaggcactgcgcgctgtcgatgttgtcacttttgactatccttacatgtctgcgaaaaagaaggcccctcctaaggcggaaaaactggtggagtttcactcaaattttgtcaaggaaactgcaactaagtaccctggtcatcccctgatacttgcaggcaaatcaatgggttcaagagttggctgcatggtggctagcatgaaagacattaatgtttctgctgtagtatgcttgggctacccattaaagggaagcaatggtgcagttagagatgaaacactgttacagctaacagttcctacaatgtttgtacagggcagcaaggatggtctctgtccacttgagaagttagaaaccactcggaagaagatgaaagcacccaatgagctgcatgtcatcgatggtggtgaccactctttcaagattggtaagaagcacctgcaagcaaacaattccacccaagatgaagttgaagatgttgctgtgctggctattgctgctttcatttccaggtctcttgaaggatgaaaaatgcccctgaattctttagcgtatcaaggtttgtatataagaattgttgtatcttgcatggtgttaatcttggccttgttggcaggcggtaactatacttttggggatttttagtggaatagacatatattaattccttgctgacagaattgattaacatatggcgatgactgttagtttaactaaaaaaaaaaaaaaaaaaaaaaaaaaaaaagcggccgctctagagga

SEQ ID NO: 99899 - DNA, 1908 bp, Glycine max
  unsure (1)..(1908): unsure at all n locations
  Clone ID: PAT_MRT3847_61224C.1
attcccggngtcgacccacgcgtccgcggacgcgtgggcttacagagtggcactacctttcagggagcatattcatatcagcccttgaccttgtctttggagccaagccaaactgagacttcaacaagagtttcttctgatctgaagggtctttttttaatttttattttttggtttttgattttgatgctccaaaaccccactttccatatttgcatcttgtgtggaaagccttgggtttggttgtgagatttgtgtttgagagggtggagaattggttcatatgagggaagaaggtggaggggttttttgggtcaatcttgatttccgtgagtggcattggaagctccttcaaagtgtcattggtaaatgaagctcaggctttctgagatcctgcctcattatttgtctcgtgatatagcataagtgaagggattcccacaccagatgtcaagtactcttgcagcaatatttggaggagctgcaggagccgtggcattggtagggattgctataatacttatatggttttgtttgtctcgccaaaggaatgtttctaggacttcagagacagggtcctctgatccttcccaagtaggaaggcatggtgcaatggagttgcctatacgagatactaggcggtttgagatggaagaactatctctggccacaagaaaatttcagtgacaagaatttgattggagaatgggaaatttggggaggtatactagggtttactgcaagatgggatgcttgtagctatcaaaaagcgccgtggacttgctagtcaggaatttgttgatgaggtgcgctatctctcatctattcaccaccgaaatcttgtcagtcttttaggctactgccaggagaacaatctgcagtttcttatatacgaatatgtgcctaatggaagcgtctccagtcacttgtatggcgctggtcaacaaccgcgagagaagctagaattcaagcatagacttccaatagctcaaggtgcagctaaaggtttggctcatcttcactctttgagtccccgtttggtgcataagaatttcaaaacagctaatgttcttgtggatgaaaacttcattgctaaggtggcagatgctggacttcgcaattttttggggagagttgacattgcaggctcctcttctcaagtggcaacagatgaaatattccttgcatcagaggtgagagagttcagacgattttctgaaaagagcgatgtatacagctttggggtgtttttgctggagttgttaagtgggaaacaagcaacagaatcaccatttccggactctaatcaaaatctggttgaatgggtgctaagtaatcaagaccgtggcatgatgtcttacatcattgatagaagattggagagtagttttacagctgagggaatggaagagtacatcatgctcataattagatgcttagatccttcaagtgagaggcgacctgccatgagctatgtggaaatggaacttgttcggatcctagacaaggaaatgaacttgacaacaatcatgggagaaggaacccctactgtgactcttggaagtcaattattcaaatcaacaaaataaaaataaaaagagggtattgttgtcttaaattgttacgtattatatattatatactatatttgtgcattatatctttgctttattatttttccccctcggtgcataccagagaatagggccagctgcttcctaagtgtataaagagcagttgtatcccctctattcatcctccccctctatttttcttctctttttttatcaatgggccagtgaaaagctgtactcttctctttcttttccttcataaatgtatcagatctcttgcaaaccattatttgttgttaatatgacagtgaagannngcttgnnncnngcccag

SEQ ID NO: 99900 - DNA, 347 bp, Glycine max
  Clone ID: PAT_MRT3847_61225C.1
tggaacctttgggctgatttatgtgcttgcatggtcgtgaaagatgatagaagggggcagtacacccgagatcaatctggagagaaagagagagagagagagaaaaacggtcgacataagcggaggagacgtagcgagattggcggcaacacgcgacaataagcgcggtcgtatagccttacgtatcggcggccttatccgtgggcgtataagcgctggtacgataatcggaggtggcgactatgcgatacgtctgcgtggagagcatcgcgggcgtaacttacgtctacgctttaagatcgtggtcctcggaatcggccgtagacgcggtatagaccgtctacgcg

SEQ ID NO: 99901 - DNA, 481 bp, Glycine max
  Clone ID: PAT_MRT3847_61226C.1
cccacgcgtccgtacggctgcgagaagacgacagaagggtacgtagtaaataattaagtatcattacaacttggaaattgtacttgtacttatgcacctctactctacacttaacacttcccttttggagttctatttattaggtaaaccaagtctttataattagctggtcaattgattactataaaaaagcttcgtccatttctctctccttatgtgtgatgtgataatcccatgctagatgctacacaagtcaaatgaaccaaaacaaatcaaagactattgcttttttcggtgattccgaaagctactacccaatcttattctgcctgctattaagtagtacgtagatacccttgtgaaaatcaaggatgcttccatgtttgatttattatttctagatgaaaactctacagcctttacagattgtcttgcggggtgattggccattagtttacagggggagcatccacctaaatta

SEQ ID NO: 99902 - DNA, 439 bp, Glycine max
  Clone ID: PAT_MRT3847_61227C.1
atagggtgggtttctgcaatttggcgaccatgtatggtatcgcatgtggggctggtgagggaggacacattgatccgccaatcaacatcaaagtgttcggagcctgtaatgagaatgttaacatatgtgtggttagcattggttatgccttgacatccgacacaattgctgtttgaacgcacactgcatatggaggatgatctcctttgttattccactcaagagagaggattggtccgttgggtcagattaatgtactctttaggacaccattggaggagcaaattcttgcttgcccatcatatgaaccaggtgcgcgaagtgtaccttactcattaccggcaagtgtagaagcatctttactgtcctgagtcgttttacccataacatgctctaacaccaacacattcaaagggccatcctctgaaccaggcttaca

SEQ ID NO: 99903 - DNA, 220 bp, Glycine max
  Clone ID: PAT_MRT3847_61228C.1
gcaaactggtaggaatcaaatggctacagtgagaacacccttgaatgcctatcctaaaaggcggatcttgtgtgagcctcctattgcccttttctgaggaggaatcttagtggcccaacctggggattggatcacacttatgcaaaaaatctccatttttcttactcgctgaggagagcgtcttggaaaaaaacgcccattaatggccataattgtggtg

SEQ ID NO: 99904 - DNA, 689 bp, Glycine max
  Clone ID: PAT_MRT3847_61229C.1
tataactcttaaagttgatccaacaaacaataaactttgcagcaaataacccttagacatcctgctgtccttgcaaagttggggttactagacaatagtcaaaagggagcttctgagcaaattgctgcttctaaaacagctccttcaccagggttacaagataatattccaacagcagctaccaaggaaactgtttcgcctgaaaaaaatcctctggattcacctgaaaagtggcatagaatacctatagaggagatgtcccctaaagaactggttactcttgcagtcccatttttaaacagtgatgataaagaaagtgcaattcctttactaaaactagcccttgataaggaccctgactatgtacgagctttagttttgatgggacgggttctattgctgaaacatgtaaatgatgaagctaatgagtactttgagcgtgcaatatcaaaactttctcttgctggacattcagctgatgcggaagaagttgatcttttgattctttcatcccagtgggctggaattgcctgcgaacggcagggaaagagggccgaaggacgggcacactttgaaagagtagcaaatatgcaggagccagaagatcctactagcaaaggctattattttgatgggttactgttgcttgccagcactctatttgatgcaagtcaaaaggccgaagctgc

SEQ ID NO: 99905 - DNA, 118 bp, Glycine max
  unsure (1)..(118): unsure at all n locations
  Clone ID: PAT_MRT3847_6122C.1
agcagacngaanctagnnagcnagnaagnaagcacagagatggaggnaaagcgaggccatgccctcatgtncctnggnacgtgtttcagtcntcctctggcgcnctaacccnatccgc

SEQ ID NO: 99906 - DNA, 275 bp, Glycine max
  unsure (1)..(275): unsure at all n locations
  Clone ID: PAT_MRT3847_61230C.1
gtnattttttgtgtgaattttttgcttgttgtgtctgtgggatgcaacaataacttacagcaacaaccaacccgtatttttttatttgactaaaccaccattttggtcctctaaagatacatggtgacatcactgtggtattttaaagatttcttantcaaattagtcctcagagctctaaaatgacagtttaatcaatttatattttatttttatttctaaaaaaagatctatcttattaggggaggtttgtcatagcccgtggatcactatga

SEQ ID NO: 99907 - DNA, 239 bp, Glycine max
  Clone ID: PAT_MRT3847_61231C.1
ggactactcgatctatagtagcaactgtccagagtcctgtcactaaccagtagagtgtacagcagagggcaattagatcgcataactgaagtgcaccatatcgtacagacagcgcacgacccagattggtgtaaactggaagcgttagccatttagaacagtagatagtgaatgtgcagctagtctgatactataattcaactgccacatatcatcaatcgccactagatcatcagtgg

SEQ ID NO: 99908 - DNA, 436 bp, Glycine max
  Clone ID: PAT_MRT3847_61232C.1
ctttaagaaactttggatccatatataagtctcagaattcgtttttctcatcacaaaatactcatacgacattgctcaagtaattgaagcgggcgagactcatcaaatggcggtaatggcactgtccttcagcacgagacaaattgcttccactgctaatcaatgaagcaaacctgctttccgacatccccaaagaattcgcagacataaaaaaagtactagatgtcattcaagccttcctctaagatgcatatagcatggctgcaaatgaacgagacaacacaaatgatgggatcagaacattggtgaaagagttgagggatgcatcttttcgcatagaagatgtcattgatgaatactcgatctatgtggaacaacatccttattctcttggatgtgcaactttgctctttcaaattattcactttattgaaac

SEQ ID NO: 99909 - DNA, 207 bp, Glycine max
  Clone ID: PAT_MRT3847_61233C.1
ttaacttgaacactctctttttgatgtcggtcttaagagacacattgggagggcatacataccaacagagagaacatgttgttaggtgatcacggaaaaaattacgaaagaacatgcagcaaacatactattacgataaggagacaaacacccagggttgagacacgcgcacagccatggatcttacacatattatgagggccacgc

SEQ ID NO: 99910 - DNA, 399 bp, Glycine max
  Clone ID: PAT_MRT3847_61234C.1
cttccttttttttttttttcattcttattttcattttttttttgtttttgtttttttattaaattctcctttttttacaattttataaaaaatgcaacacaaccaaatcttaattatccctaaccaacttacacaatttatttttttcttttgcccataacactacccctaatattcaacaaccccaccccctttttcatattacaatttctttacatttttaaaacaaaaaaccaaaaaacctgctttgtaccttttttaaaaaaacaaatccccccatttactttattcaccttccacaaaagtaaatctttcttacaaccaaaaacattacactgcattttaaaacccttaaccttcacacccctttttttttcttcccaaacaaaaaaaaattta

SEQ ID NO: 99911 - DNA, 288 bp, Glycine max
  Clone ID: PAT_MRT3847_61235C.1
attaacgcgcttttttttcgagattattattagactaaacgccgctgatgagagctaaaatacttaacccgtgcagtcatcaatcaccatcatcactttacactcaatgacaagctgccacaaatgccacagattgtcctgagcacccatgacccgactatgttgcatgtatcaaagacgcatccactttatacagaagtcatctgtccggaggctaatattcttctccgccctataggtcacgcggcccacggcaagtctacagtggcgaaagcaatatcctgtgtg

SEQ ID NO: 99912 - DNA, 282 bp, Glycine max
  Clone ID: PAT_MRT3847_61236C.1
caaaaaacctaatataaggaaagatgacaaaataactgattcctacaatttaaggaaaaattacaacgacttatcttatccatcacaagcatctatagagacatcatatattcttcatcctcaacaatagcatcataacaactctaccgatcttaaacataagatccttcatatcatacatcaaccatacctccaaccatacaaacttcatataataaacctctattaacctagacctctactctaaataggcttgatgaatagaaaacccatttcaccacc

SEQ ID NO: 99913 - DNA, 313 bp, Glycine max
  Clone ID: PAT_MRT3847_61237C.1
tgcgagaagacgacaaaaactatgttttcatcttagtttctcctttttctctttcatataaccatccattgtctggatactaccaagagggctgtggactttatattattaaaccaataatctctacccaataaacttttcccttttcatcttaaatttctccagtttaactctctcatgtaaaatcaacaccattaacccatttttattaagataaaatcctatgaaatttctattctttcaatttctcaaacttctgccaattttaattatactatacttcttttacatcttaaatacttccacataatta

SEQ ID NO: 99914 - DNA, 203 bp, Glycine max
  Clone ID: PAT_MRT3847_61238C.1
gcgaccacgcgttcggaagacgacagaacggtagcttctatagcaagttaaatcagtggaaattctagataatcgggttaacaacattcaacacaagatatgtgaggaaatacatgaataaaaaatgaataagcaacaatggaggtttaaggagcatctacttgaacctctggtgctttaattaccacttggtgggacttgat

SEQ ID NO: 99915 - DNA, 371 bp, Glycine max
  Clone ID: PAT_MRT3847_61239C.1
ttttgtgtttttttttattttttttggtttttttttttttttttttttaaggaaacattttttttttattttaaaaagggttacaaaccagtttttttgaaatttttcaagatctaaaatccattgggcccagtttttttttttcaaactaaaaaaaaaccgcaaacttttgaatcactttcaccatgtggaggtgtgcttggacaccataataatttttaacaacctaaaaaatggccggtttttttttgacaagagatatgccttgggaaattaatgcctcacctaaaacttgggtagcaccttgggaaggatggacactttcccaaaacacatactgggtggttttagaacaaggtcctggggatttt

SEQ ID NO: 99916 - DNA, 452 bp, Glycine max
  Clone ID: PAT_MRT3847_6123C.1
gcctcaacgccagttcatttccgtttccttattttcagcaccaaaaccaaagtactgcgcatattctccctctttgccatttctctctcactctgcactttcttcttgaaatttgatctcacttctcgcatctttcaacatttttctctctcaatctgctgtttcttcttcaacatagagatggtatgtgctagctctagtctctttgctttaatttgttttcttatatgcacatgtttctttccgtttcatatgtttaattatcttcgctaggtatatatacaatatacgtttttgtatgaattagtcccctaatttgtttcaaaccattgagcttctggatcaactatcaaggttattccagtttaacccaaaaatttaatcgctcacagtaattttattcgtctcaaacattgaatgttttatgtgaagatcaatatctatggtctatt

SEQ ID NO: 99917 - DNA, 1123 bp, Glycine max
  Clone ID: PAT_MRT3847_61240C.1
gcacccacgcgttcagtctcatacaacatgaggagtcgataaggagctcttgtgaagtctatatttgtcttagaattgttttcactcttgtttcttcatctgaatcaagtaagaagagcatggaggtggatttcaagtctccttcccttgaaaaaacagaagctgagcctcaagtagaagaaaacatgcgctttcacaagtctcttcaggagctaagagaattgcagtctcagttgcaccatgctgcagattattgtgaaacaactttcttgaaaagtgaagctaagagagatgtgttggaaaatacaaaagaatacatatgcagggccatggttactgttgttgatcatcttgggaacgtctcggctaatcttgatgaccttatttctcaaacaaatgcattttctgaggctgagtctagaatccggtgcctcaaacaaagacttttctcatgtgaacaatatgctgataagcttgcgctcacaaaaatgagatggagggagaaactgccaagactccatacacgatatttatcatcaccacccatccttgagagatcaagcagcgagaaattaagagattctaaaactgaagatacctcaaaattagatgataaacacatactagaaaagcatgaggatttgccactctttttgtacacccaaaagccacatggagataagaatttgaagccaaccagctttactacattgaaggagcataatttgaccatggtggtaccgattccggacggtttgtcagtcttaacaaaagtttcaaatcctacatttcatttccaaggttccccgaaggttgcacgccatagaagatccttgcatggcagtgacatcttatggttcatacggcgtacaaaaagaatccaataaaaaacaatgttgcctattgcttcatgtgctattagccttaagtactcatggtggtggtctatcattttcatgtggcagttcaatgttagttgtttgattcaggaaccaaacattatttacaaatatctatattttgaggcactttgaagtagttatttatgtaattttggtaggaaacgtcatcatggttataatgatttagatttagcacaaaaaaaaaaaaaaaaaactcgagc

SEQ ID NO: 99918 - DNA, 239 bp, Glycine max
  Clone ID: PAT_MRT3847_61241C.1
aatgcccactttttttttttcaacgctcctcctccttcttatagccgtcgccacctttgtattcgggcggcgtgaccttctcggagacttttttccgctgtcctccgaaactgataaccaccaccacttttagggcgccccggggggccccctcctcgccgggttccatgggtactgggatttcacacatcaagctgatgtttgtgacgccccttaaaaatttagggaaagggggcttg

SEQ ID NO: 99919 - DNA, 694 bp, Glycine max
  unsure (1)..(694): unsure at all n locations
  Clone ID: PAT_MRT3847_61242C.1
aactacttcaaagtgcctcgaaatataaatatttgcaaataatgcttgtttcctgaatcaaacagctaacattgaactgccacatgaaaatgacagaccaccagcaccatgagtacttaaggtgttaggatccgagggcttttgacaaggtaacctcctagtatctatgctattctaagtaaaagataaaagctgagtgataattttcccttgctgttatttcatatttcctggtatttataatgggaataacactggataaggattggcactaaaggcctcaagagataagacaaaacaataacagaattcttaatatcctaataacagaattggaaaatatctgaattctgttataactgcttgtgtatgcagagcaagggaattcctaagctggctactcaggtctgctgggtcttcagtgcccttttgggcctgctaggtgctgctgtagtattgatatcataaggctattagcacatgaagcaataggcaacattgtttttcattggattcttttagtacgccgtatgagccataagatgttactgccatgcaaggatcttctatggcgtgcaaccttcggggaaccttggaaatgaaatgtaggatttgaaactttggttaagactgacanaccggcccgaacaggtaccaccatggtcaaaatatgctccttcatggagtaaaactg

SEQ ID NO: 99920 - DNA, 182 bp, Glycine max
  Clone ID: PAT_MRT3847_61243C.1
agcatttacatgtcccatttgggctgggaacagtggagcttgtggctggtatggaaagtgccaatgcccagatccactgtgaagttaccaacggtctttactatcttcgattctcagtttgagatgccatggctgggtgccatggattaatgatggtcgcagcaagtgccgccagggatagg

SEQ ID NO: 99921 - DNA, 959 bp, Glycine max
  Clone ID: PAT_MRT3847_61244C.1
agcggacgcgtgggcggacgcgtgggcggacgcgtgggcggacgcgtgggcggacgcgtgggcggacgcgtgggtgcaagtggaagcccttttgaaaatgtagatcttggaaatggagaagttggccatgtaaatcaagccaacaacatgtacctgtttccagggtaggcatgcctttgtggcttatattttttcacggatcatgccactcagtggaaacattggcataatttctactgcaacatttcatttcaggattggtttggggacacttttatcaggtgctcgtcatataacagatggaatgttgcgagcagcagccgaatgcgcagcttcatacatgacagaagttggagccaaaggaaactgtacgagtttgggggcttgcttcatacatgacagatgaggatgtccaaaagggaatcttgtacccatccattgactgtatacgagatgttacagcagaggttggggctgctgttgtacatgcagcggttgcagaaaagcaggctgaaggacatggtgatgtagggttcaaagagctagcaaacatgtcaaaagaagaaaccgtggagtatgtccgaggcaatatgtggtaccctgagtattgccctcttgttcatgaaaaatagacttttatgaaggccttttgttattgatatctcagttccgcgcaaccaagccgtttaatattttttagttttaatcttagcaatatatgactagcaaggttttgaacttttggtagttgaaggtcaattagaggtgagaagagagagatatatcttcattcgttgcagccgtgaactgtgtaatggcgtttggattgaacaaatcttggtcctcccactcccttttcttttggaagcttcataagtattattagacagttgtttaaaaaaaaaaaaaaaaaaaaaaagctcgagccgaattccgagcttacgtgcgcgtgcaaagga

SEQ ID NO: 99922 - DNA, 453 bp, Glycine max
  Clone ID: PAT_MRT3847_61245C.1
aaaaataacaaaaactttggtttggacgtgtttaaacttgatgatttttgaaacaatttgggaatggccccctttttttacagaacccatttttgcacccccggggacgtaattgtcacatatttttgccgccttggggatttttttcgctgaaattttgatccccccggttcacataacagggtttgcctcccccgtaatttttttttacgggccttgttttttccccgtcgtaacaaaacatgggcccaccgtttttttccccaggcccaaggggccttttttttttgcacgggggaggagcataaagcttcccaactggaaccccctttggtgcacccttttttggtttcccgggtaagggaactggcccgggcttttcctttggttttttgggcccgggcttgggctttttggttttttttttgggaacatcccctttgggtttttccc

SEQ ID NO: 99923 - DNA, 468 bp, Glycine max
  Clone ID: PAT_MRT3847_61246C.1
ggcctccgtctgcttcatcaactccttcagtgcagtcctacagggcagcctcttcgggcagctgggcaccatgccctccacctacagcaccctcttcctcagcggccagggcctggctgggatctttgctgcccttgccatgctcctgtccatggccagtggcgtggacgccgagacctctgccctggggtactttatcacgccctgtgtgggcatcctcatgtccatcgtgtgttacctgagcctgcctcacctgaagtttgcccgctactacctggccaataaatcatcccaggcccaagctcaggagctggagaccaaagctgagctcctccagtctgatctggctgacagcgctgtgccttgtgttggtcttcacagtcaccctgtccgtcttccccgccatcacagccatggtgaccagctccaccagtcctgggaagtggagtcagttcttcaaccccatct

SEQ ID NO: 99924 - DNA, 235 bp, Glycine max
  Clone ID: PAT_MRT3847_61247C.1
gaatgttgtgttgtgtcgcttcgcttcacaaactctcttcttctattgcaaagacccttttgaagtaatccatggagtctcagtcactttcgagattctagcttcgtcattccttaagcaatctcgtgcttgcactctttcaggcggcaggtaatagtgaagtcgcttactgcgataagaaggcagattatccggtaaaggtgtcgggagttgagatctcaccagaccctgtgga

SEQ ID NO: 99925 - DNA, 1055 bp, Glycine max
  Clone ID: PAT_MRT3847_61248C.1
ctttagtatctgtcccttcctcaatgtcagatagtcttcttgatccatcccgggattccaagattccttccacgttttcagcagatactgagagttttgggacttcagataaatttcccatctcagcagcacagctttcacgatctgtccgttcctcaacgtcggatagtcctcttgatccatcctgggcttccaagattctttccaccttctcagatgatactgagggttttggaacttcagatacatttcccatctcagcagcacagcttttactatctgccccttcctcaaagtccgctagtcctcaagatccatcatgggcttccaagattccttccacctcctcagcagacaatgtttagtcctgtctttcagatacatttcccatctcagcagcacagcttttactatctgccccttcctcaaagtcagctagtcctcttgatccatcctgggcttccaagattccttgtggaccctcatcagacaatgtctccacctctctttttccccctgatgctgtgacatcttccacagatagccgaacctgggatgcacagatggaatcacagaccagaagtaatagaaacaatagatcatagatattgtttaatgcagacaaacccatgaaagctgtatgtgtaatacaaaatcatctcccaatttgtctaatgtgctaatacctaataatactgattccatatataaggcatcagaacagaaacaatgcagtcatgattcttgcaaagtgggatgtataagtgtacaatcataataaactcagccagacagcttaaattttaatttgtttaactttcaactagagaaaacttcttaccctttcacaatatacttttaaataaaatattacaaaaaattgttcaaaaaatgaagcaaacaaattgactgtaaaaccaagataaaaggtttttgcagagtctaaaggggtaaccaacctgtgtcttgccttcattacatgtctcagcttcagaattaataattaattcctgcaggtcgactctagaggatccccgggtaaagagctcgaattc

SEQ ID NO: 99926 - DNA, 306 bp, Glycine max
  Clone ID: PAT_MRT3847_61249C.1
agagaaggcaagatggcatataaagtattccatattaaaattgtctggatacacaagtacaagttaaattgaacactcgatacagtatacaattccccaacccacgagaaatctcttaaacaacaaagtagaccataacacttgcccctttcgaaggagacaaagcttacagcaaacaaatgtatgggccacttaaaattcaatgaatctgctgcggttggtactaagcccaccttgtgacccaaccaaggggacgataacttccatgccaaacattgctttaacaaagtcagtattaagtgccct

SEQ ID NO: 99927 - DNA, 322 bp, Glycine max
  unsure (1)..(322): unsure at all n locations
  Clone ID: PAT_MRT3847_6124C.1
gtcgcangtgtaagnagtacgtannctcggtaattctgctcgagntnnctctnacctntgctctacgnttnctgcannaacnattcacattnngncattntgnacttgcaatcnttngtnaaganatcnaacatccaacaanaatcaatgggncgaaacaaaagacacccanatagtnagaantcncantagaccaanagnataatcntcacaataacgtgttctgttacatgacaagnancatgattgangccatagaggaccaccctctaangnaatctccgagagccncgngcacctcttgctcctggagctatggcaa

SEQ ID NO: 99928 - DNA, 302 bp, Glycine max
  Clone ID: PAT_MRT3847_61250C.1
cgggccgaccgacgcgtgcgcccaggcctgctgttggctatactaaccgatctacacatctgaaaatcaccagagcatccggttaaatcaaaaaatgacatagacaatagcccaaccgaaccctatgctctatcacgactaaacaacaaaactataatttaagtaaccatcgacgaccacctatacacttgtaccacatacaccatatgtaacctctgaatccttaaacaactatgttaatattgagaataccaagacccaacctatgataggaatcctgattgaccaccaggcattcattg

SEQ ID NO: 99929 - DNA, 279 bp, Glycine max
  Clone ID: PAT_MRT3847_61251C.1
tgacgaagccattatttttctgcatacgcttctgaatcaaactgagggcatgattaacactaggaggatgacaatatacggatgctgcatattactctacactccatcgtaatgcgggtgcctattacccaagaaagtttcttgaacacagggaatacaagttcagaaatctcacccagctccacagaatttgccaaccttatagagaacaattcacaaaactaaaaaagatctgacctttcttaaactcgtttgacatatcataagggaatttattaa

SEQ ID NO: 99930 - DNA, 754 bp, Glycine max
  unsure (1)..(754): unsure at all n locations
  Clone ID: PAT_MRT3847_61252C.1
tgcacagttatgcttagtgcaatggtgccttctacattttcttaatttccccagttttgattggattcgtgtttacttaatttaacagggttacaaaatgtgagcggcatcaattttcttatcaaagagcagtactgcctggtcttatgctgtagtgctgtactagtgttacgcccgagtagattaggagagccaaaaaacttttgaaacagctcactcggaagcagagcagaatagatgaatttgttatcgcaatccactgccccttctacttctctatcaccttcctgttttcttccacgccaccctcatggttccacctggttctcttctggtaccttcaaattcttgaagaaagagagtagatgtctaaggaaagctggacgtactaaaatcactgcaaagtttgagctgaagccaccaccatatcctttggtaagatctaaaatttgcccattactccaattattacctgttagaattaattgtgctagctttgatggtgtggttctcccattcttcttatcaaattgtcctttaagttggctaatttttaatgggacctatgtttcaaatgaaacatgccaattgccataaaatttgatttggcttggctttatcattntcaaatttatattagaaattttttgttatgtattctttcatcaatatagaaaggtaataactctagaaatgaagaactcaggcatatcggtttgatttattggcagggcacaatgcttataagtttaca

SEQ ID NO: 99931 - DNA, 270 bp, Glycine max
  Clone ID: PAT_MRT3847_61253C.1
cggctgcgagaagacgacagaaggggggacattccaaacgaaactgaaagtcttaaaccagtctttccttttttggttattattggtcgaaaaaacacggttccttttattttttatgcaactaatcatgttttcttaatatatcagaactctatgtttggccccagaaaagtaggtccaattttgatgtatacggacagtttttcactagcagcccagctagcaagcttttgttggtgtccatctctattgttgtcaagaaacttattc

SEQ ID NO: 99932 - DNA, 456 bp, Glycine max
  Clone ID: PAT_MRT3847_61254C.1
tggcccccctgcaggaaccagtcccggattaatttacctctctaccaggtcacctaccggcggtcgtccttttgtacaagggcgcataatctattaatgcctccaatgaaaaacagcatcgtgaagtctcttacataacttgttgacacacagctgaaacaacataaaatgaagctagtgcccctctttgaacgcatcttatgtacatatagatagataggagcaagctatatcgtttacaggtgaaggaactactgattgtagtacaggggattatggaagcttcataggtcctgctttcccctctgaagcctccgaggagatctgtcctttggtctccaatgatcccagacaatgatcgtattcctgccttatgagggctctctctccctgctgttgtgaacgaaactgccttaggagtggaaggacttcgtggatccttcaaaattaattttt

SEQ ID NO: 99933 - DNA, 855 bp, Glycine max
  Clone ID: PAT_MRT3847_61255C.1
ggctcgagaagaaagcataagccaaattttgagtaaactagtgtgcacactatcccatgcctagtggaagtagggatcctctcgttgttgggggagtaattggggatgtattggatccttttgaatattctattcctatgagggttacctacaataacagagatgtcagcaatggatgtgaattcaaaccctcacaagttgtcaaccaaccaagggtaaatatcggtggtgatgacctcaggaacttctatactttgattgcggttgatcccgatgcacctagcccaagtgaccccaatttgagagaatacctccattggttggtgactgatatcccagcaacaacaggggctagtttcggccatgaggttgtaacatatgaaagtccaagaccaatgatggggattcatcgtttggtgtttgtgttatttcgtcaactgggtagggagaccgtgtatgcaccaggatggcgccagaatttcaacactaaagaatttgctgaactttacaaccttggattgccagttgctgctgtctatttcaacattcagagggaatctggttctggtggaaggaggttatactaagaaaaagtactttatattattgaaaaaataaagtagtataagcttcgttgagggtttcagaaatattaattggcaatctcccacactctttagtagtaaatgagtgtttttcaacttaattaaactgagcatacagtgaaataaattgctagctcagttggtagcagcaagtactctgcatatacacataaatgaaactgaagcatctaggttcatttttcttatttgtattatcagttgaagaatgttaaagatatctgatatacgt

SEQ ID NO: 99934 - DNA, 592 bp, Glycine max
  unsure (1)..(592): unsure at all n locations
  Clone ID: PAT_MRT3847_61256C.1
gagtggtactctaagccgactacatgcttacaatgcttaaggttgtgaatgtatatcatgaatctgctaacctttttgggagggcagtttcgtgtttttgggaagataaaacatatagaattgtagtggatatagctggtgtacaaaaagggatatgttatttagcctctctgcaatatgctacgtaagggatatgttttcctgtttttctgtcattttgctggttgataattggtgttgggttgggaaggaagcaatggaactaatggtatgtaattaccacaggtacttctggtacccaataatgcaatcattttttgctgataaaaaaaatccaaagtttattacatttgatgcatttttctaaaggcaaaaatacaattttgtagttagttttaatgttattcttctatcagatatagagtcttgtatcaataatttatgttgacttataatgtaaactattattatataagattagttgaatgaaaactccttanaagacacacagacacaaaanaaaaaaaaaaaaattaagaagtgcatttaagttttgtcaaaaaaattaatgtgcaagggctaatttaattgg

SEQ ID NO: 99935 - DNA, 239 bp, Glycine max
  Clone ID: PAT_MRT3847_61257C.1
gtggctaccatggcgtatcctaaccacagcttcgcgttcaaaccgagccgaacctgcaccatctccgctcttcttaaagacatcaatccatactcgaatcgacctgaacctcctcttattcgcgctaatgctctcctcctatcgtcttacagcccgccgctctcgcgcaacgctcgctcgacgccgcgcgcgctactactgctcggtgtcgcgacttacactgcggcctcattatctcg

SEQ ID NO: 99936 - DNA, 358 bp, Glycine max
  Clone ID: PAT_MRT3847_61258C.1
tgttcgaggcaaacttcaacttgtaatcaagggagagagaaaatttcaagctcaaaatatggcggtcaagaaagtggagatccttggaggtggagatgacggtgccaacctttcataagctatccatcgtctagctaacgtcagccttattgctccgaatgattttaaagagattacatggtccagtttcaggggattggctgacctaactaaagcttacacgcttgagatcacccatagataggactatgaaaggggcaaccttgggagatacagccgctgacaacatacctgaaactgtaattgtgactgaatactgtcagcaaattgtctatgactatggcgttattgactgtgg

SEQ ID NO: 99937 - DNA, 301 bp, Glycine max
  Clone ID: PAT_MRT3847_61259C.1
tgggaatacatcacaaatgggcctcttgtatgttgtcacagtaacacaagaaccttaaccgcttctctgactctctaatcttccatagacacatacggacgcgtgcgatatcggacatactcgaaagtgcgcaatattctgaacaagacgcgtggggagatggacaaccatagccgaaaaaagcgccttgcttaggacctgacggaccacaccttctaaccaacatgcgaagaaccaatggtatcatcgagaataatctgccagcgaatgcacttgatactaccctactaacgacatgtgc

SEQ ID NO: 99938 - DNA, 440 bp, Glycine max
  Clone ID: PAT_MRT3847_6125C.1
tggctggagctttctcttgcaatctttaattatattaaatatgatcctacttaatccttattgcggggtttcattcccgaattttatgcatccatgcatttggatggtgaaccacctcgattatgcgtgggccccagagacggtgcacgcgaataaaaacgacatctgctgcatgagatgcatttgctttgatgaagacagaacaagtttggacgattacgcggcatagctgatatgcagatactgcctggatctctccaacgacctgccatagaaaaaccgaacgggattagcgaacaagcgtgggatgactgagtctcatgtaagatgtgctcatatctaccgagccggaaccagatactccagagaggtttccctttccaaagagagtaaagggtgcacaccaagtctaccgcatgtgcctgacgaagaatacaccg

SEQ ID NO: 99939 - DNA, 1426 bp, Glycine max
  Clone ID: PAT_MRT3847_61260C.1
ctcgagccgatcggctcgaggctaacccttataaataataagagcaaaaaaaaaaaaaacccccactccaacatgtttctcattccttttctgagtcgattaatatttacagagtgaagattttatttttctttctttctttggaagataaagaatgggttctaagtccgaaaccgtttgcgttactggggcttctggttacatcggatcatggcttgtcatgagactcatcgagcgtggctataccgttcgagccaccgtactcgacccagctgatatgagggaggtgaagcatttgctggatctgccaggtgcagagagcaagctgtctctgtggaaggcagaacttacagaagagggaagctttgatgaagccattaaagggtgcacaggtgttttccacttggccacccccgttgactttaagtccaaagacccagagaatgaaatgataaagcctacaattcaaggagtactaaacatcatgaaagcatgcctgaaggcaaaaactgtccgaaggctagtattcacgtcctcagccggaactaccaacattactgagcaccaaaagcctatcattgacgaaacctgctggactgatgttgagttctgccggagattaaatatgactggttggatgtatttcgtttctaaaacacttgcggagaaagaagcttggaaatttgcgaaagagcacggcatggacttcatcgctatccttccagctcttgtcattggtccctttctactgccaacaataccttctagcgtgatcagtgctctttcacctattaacggaattgaggcacattattcaatcataaagcaagctcaattcgtccacatagaagatatctgtcttgctcacatatttctgtttgaacagccaaaagcagaagggaggtatatatgcagtgcatgtgacgttactatccatgacattgtaaaattaattaacgaaaaatacccagagtacaaggttcccaccaagtttcagaacattccagatcaattggagcccgtgagattttcttccaagaaaatcacagacttgggattccaatttaaatacagcttagaggatatgtacactggagcaattgatacatgcatagagaaagggcttcttcctaaacctgcagaaattccagcgaatggcatcgagcataaataaatataggttttcatatctttgcctcggtgatggctatgaatgttgcttttcttgttcagtttctttaatgatgtttccgttttgtgaattcgtagtcaaaattgtaagtggtttgtaagaccaaattagttatctacaaattgtttaatattatcacaagacattttttacggtaaaaaaatatctcagagctcgaggcaatttaaaatatatataatatgccgccattgaattctcattaaaaaaaaaaaa

SEQ ID NO: 99940 - DNA, 493 bp, Glycine max
  Clone ID: PAT_MRT3847_61261C.1
tggcctgatcagagttattcttcatatagattctgccagagtgccaggtaggaaaccaaattatgaccatttctgtgacttctctcatactcaaaagtctagcacttgcttgacttccagtgttttgagctttcataaggtcatcctatgcccttattgagattctttttttggtgatttcccttattgagattgtccttacgaattggcaatatcagtcacagttgataaacagtataactaattaatgccattttgagtgcagtaaaaaaaaaatacaatgaaaaaacaacaaaaagaaaaaaagaatagagaaactacataagagataaaagatatgggggggggctcccctgcccctgcgtcgtcattatcaccacttagggaccgaattatctttcgcagtcgacgatgtttacctccagtggcacagatatccagggccgatgaaaaagtggccggttttcctattggtggaaagtgcaatactaag

SEQ ID NO: 99941 - DNA, 170 bp, Glycine max
  Clone ID: PAT_MRT3847_61262C.1
ggagaggactttatggtcaagcccctttctgactcgcgggcgaaacctcaagcggggcaaacgggtctcctggtctagcaatccatctaatagccctacctgatatttgccactgagctctatctctcaatgaaaggtcataagcgggttatggctttcacaacaagctg

SEQ ID NO: 99942 - DNA, 158 bp, Glycine max
  unsure (1)..(158): unsure at all n locations
  Clone ID: PAT_MRT3847_61263C.1
gcagcaaacactgatcctattgcttttagcaaacctntccttgctcttcaatttagcgttgtttatctacatttanataaaacgngtatgtgaatgcaagtacccaccaactaggcaataatattgaaaagacactggaaaatgattcctttgttctt

SEQ ID NO: 99943 - DNA, 458 bp, Glycine max
  Clone ID: PAT_MRT3847_61264C.1
tcccggaaccgaagatttttccaatcccatcatcctctctgtctcgcaggggacagccaccaagaaaggcaatttacaggaaggttatacgacatggtcaatgccactaaaggggtctttatttcctgtgacatacctatggcacaatatatcatcaacatgaatgcttcattgcctgcatctgacaagttcattatacatatcttggataatacccatatgtttgttcaacctcatgttgagcaaatgatacgaagtcaaattgccaagtttagagaggacaatacatatgtcaagcctaattgattactatggcctttctgtcctccccgaatggctacagtgaataacattctggaacattttgtgttgattggtagttgatctttactaagaccgtttctttgtatacaaagttctcgcagttcgcatggaaaaatgaaatgtgatttgctatt

SEQ ID NO: 99944 - DNA, 396 bp, Glycine max
  Clone ID: PAT_MRT3847_61265C.1
ctcgtcccacttttaccgaaaggaccgcttaatgtatgagcgtgagtattttctcgaaaaatatgctaagttggggtcagaatcgaagtgtctgggaatgcatgcacccaaaaagagtgattgggcctcattgctacaagtgtttttatctaacaacttcagcacagagcatttttatgcatgtgagtggacaaaatcagaaccacattcctgggaattgatcttgccagtacaggtttgtggtcctaataatggatttgaaatgtggagttctgaccgggcaaatcaaacttcatggcatttgagtttccttattgacaatcccaaacagtcgacaaaatttgatattctcttgggaatctctcaagattttgaaattgcttggaatactcttat

SEQ ID NO: 99945 - DNA, 420 bp, Glycine max
  Clone ID: PAT_MRT3847_61266C.1
gagaaatccaaatcctataggcacgtgtgttcttggagagatgttgaagaaggactgagagaagaagtaagagattaagttgtaagatgagactgagaagtaatacacttagcaagaagcttcttcctccttcttcttcttcttcttctgtttcctattatgctgtctcacgcattgcgcttctttgcttttgcgtttaccttttctgtctctcctttacttcacctacgccaaatcagcttccacattccctctccatcaccaaccactcttctcttgagcttcattccatctcctcctccaaccaatcttctcttgccacttctacggagcttcctcgttccatcttcatcactaaccattcttctcttttcgcttctccacctccaccaccagtttatgtctatgaggagccatgcg

SEQ ID NO: 99946 - DNA, 402 bp, Glycine max
  Clone ID: PAT_MRT3847_61267C.1
ggaacgagaggaagaagaagaggagagagggaagagagaagagagaagtgttcgttgatctacgttgtttggaaaccatggcaagagttcttctcgcacgtaataacctgtgtctgtggatccatgtgtattttttgttacttgttcatctccatgttggaactagtttttaccttcctggtgttgcaccggaggatttccacaagggggatctgttgagggtgaaagtgaacaaactatcttccacaaaaacacagcttccttactcctactattcactgccttactgtcatccaggtcacattgttgacagtgctgagaatcttggggaagtcctgaggggtgaccgcatagaaaactctccttacgtgtttaaaatgagagaaccccagatgtgcaatg

SEQ ID NO: 99947 - DNA, 397 bp, Glycine max
  Clone ID: PAT_MRT3847_61268C.1
gtcttctttgggatgcatgtggattccgtgtggcgaatcggcgtataaaaaaacctgttaccggttgaaacaggggacgccaagactcaaatcccttgcctaaagaatgccctaattaacgcgggctcttatgtggaaggcggaaacaaggaagggattttttcggtggggggccaaagtgccccctttcaagagctggaggggggtaagtgaaacaacccccttttgggagggggggaaaagtgagagaatcccccgattaagaatatagttgggagcgtgaaagggactacgaggtcccggttgggacaaagtgctaactattttgggggaggagaataagagattggccaaataccagcgccctggatgtttggggaacctaaacaaaaccaag

SEQ ID NO: 99948 - DNA, 568 bp, Glycine max
  Clone ID: PAT_MRT3847_61269C.1
tttttttttttttttttttttttttttttttagccaaaaaaagagtagattttaggggttcaaatttcagaacaactcgtaaaccataaggataaataataataatgtattgttgcggtatcaactatggtttatgaacaattgtctgatgggacatctgaagaaaaaaaattgaaaaacaagaatactaaagtcctattaggcttacaagtttacactaattatcaagataatataatgtcggtaataacacaaatggcatgattcttgggagtttcctccgtcaatcaagttggtctgtctgcaccttccttcatcgatcagctccgtggacgagaactgccataacccctcccacggtcttggaaaattcccggacctgaagggtggaggtggtgcaccactccccattgctgctaattcaggactcactttctgtccagcttcctcgagtatggctataagatcctttgcaaatctggcattagcagctgtgaagtatgggtatgcagttccttttgcgccagctctccctatccgcccaatgcgatgaacataatcctcaagc

SEQ ID NO: 99949 - DNA, 262 bp, Glycine max
  Clone ID: PAT_MRT3847_6126C.1
caaccgaacatagactatcctcgagacctacaagagctagatacttaaaatgatgaagcaagtgctcccttacatcttctatcttcagaactgttatactgatcatcaacacgcttataaactacatctctcaaaacctcgcccacaaatcaatagttgtctttcccaccaacaagaacaccactatcatttcctcccttactcacaacgctggaagaatactattcatacacgtgttgtcaccacatgtcaagaataaatt

SEQ ID NO: 99950 - DNA, 182 bp, Glycine max
  Clone ID: PAT_MRT3847_61270C.1
taaaaaggaattatatgaccactttatgcacagttcataagttaattatgctgtgcttctactgtcaagtttgaagaatcatttgcgtaaaaggagatggaattgcaaccctagctcccgcttcttattcttccttctttatttgaccatattggtataaatagctttcgcccttttttcac

SEQ ID NO: 99951 - DNA, 1919 bp, Glycine max
  Clone ID: PAT_MRT3847_61271C.1
aaatctaaatatacaataataagttaaacgcacgcaaacccaaattggcttttgcgagtgatgaaaaacacagaatcgcgtttgcgactgaggaatgagtttcttgcagggaataattgattccttcaactccatcttcacacatgataacaacaacaattatcacaacaccaattctccttcttcttcttcctcaacgaatcgaatggaagcttctcctcctccttcggtttcgaacgagcgcgttgcatacaagctcaaaggctacttcgatttagcaacgcaagagatcgcgaagggcgttagggcagaggaatggggcttgatcgacgacgcgcttcttcactaccgtaacgcgcactcgatcctcctcgaagctaataaaactcccgttccttcctacatcactaccagtgcagggtagagggtgcaatcgtatcgagagaagatatctagatgacagcgacagtcatctcaccaattctagaccttcttcttcttcgctgtcaacgaatcggctgaaagctgctcctcctacttttcctcttcctccgtcggtttcagtaagagcgcgtggcctacaaaaaataaggtacaaaagccccctcaacgcagaggataggtaaaggaagttggaagcccaaaatctagtcaagcatcctggtgtaaattatgatgacaaactagttgaaatgattaacactgccatagtagatagaagtccttctgttagatgggaagatgttgctgggcttgaaaaggcaaagcaagctttaatggagatggtcattttgccaactaaaagaagagacttgtttacgggacttcgaaggccagccagaggtttgcttctctttggtccgcctggtaatggaaaaaccatgcttgccaaagcagtggcttcagaatcacaagcaacattttttaatgtcacagcagcttccttgacatcaaaatgggtgggtgaagctgaaaagcttgtccggacactattcatggtagctatatccagacagccatctgtaattttcattgatgagattgatagtataatgtcaacaaggttggcaaatgagaatgatgccagcagacgattaaaatctgaatttcttatccagtttgatggggtgacctccaatcctgatgatattgtgattgtaattggtgcaacaaataagccacaagaattagatgatgcagttcttaggagactggtaaagagaatatacgtacctttaccagatgaaaatgttcggaagcttctgctgaaacacaaactcaagggtcaagcattctccttacctagtagagatcttgagaggcttgtaaaagagactgaacgatattctggcagtgatctgcaagccttgtgtgaagaagctgcaatgatgccaattagagagctgggtgttgacattcttactgtaaaggctaatcaggtaagaggactgagatacgaggattttaagaaggcaatgactatcattaggccgagcttaaacaaaagtaagtgggaagagcttgagcgttggaatgaggaatttggctctaattgaagtcatattctgatgcatatatatgcatcaaattatttttttaaaaaaaaactgtgtacataactgaaattagactagacgaaggcatcaaggttagtagctaaaacaatgaatcagggtgcttcttattttgttaatggctatcctgaaatcctattctagccgcttgtctcaaatgactgcctttatttatttttattctttgtatatctttctgattactatatcaagtgattgtaaatcccttcccccgggggttttctgggaagaaaaaagattgataaattgccccggaaatgaggggagaaagacattgaaaacaaggttttttaaacatggcagtatatgaattttaaagctttt

SEQ ID NO: 99952 - DNA, 270 bp, Glycine max
  Clone ID: PAT_MRT3847_61272C.1
gagcaaaccaaaagcattgggcattagctggtggcaccaaaccaacataccccttggcaggaaaattttttttacaatttaaaatcacaattcacaagcttgaatttttaatggctcccatcttttaattttccttggggggtaaaatttagggggaaaatcacaattgctggcacaagttttttttgtttttttaacaagtgaaccgaaagtttctggttaaaaaacgggggacccaccccttaaagggggggaatcatgttttaagac

SEQ ID NO: 99953 - DNA, 942 bp, Glycine max
  unsure (1)..(942): unsure at all n locations
  Clone ID: PAT_MRT3847_61273C.1
ttcttacaaacttatttttttaatcaatttatgagattaatattattgtcataaattaaaaaaaaaattaaatattcagttattcctttgcttaccgaagcacgtcattgtcgtgtgactgcttgaggctttgagccaaacaagcttacacaatacacttttatttaccaaaaatcaatcaaatcgaacaacacattcattaaaaagtaaaaacaaaaatcaaatctaaatatacaataataagttaaacgcacgcaaacccaaattggcttttgcgagtgatgaaaaacacagaatcgcgtttgcgactgaggaatgagtttcctgcagggtatcgttgatgccttcaactccatcttcatacccgataacaacaattatcacgacaccaattctccttcttcttcttcctcaacgaatcgaatggaagcttctcctcctcctcctcctcttcctccttcggtttcgaacgagcgcgttgcctacaagctcaaaggctacttcgatttggcgacgcaggagatcgcgaagggcgttagggcagaggaatggggcttgatcgacgatgcgcttctccactaccgtaacgcgcactcgatcctcctcgaagctaattcaactcccgttccgtcctacatcacttccagtgaacagcagaaggtgcaatcttatcgagagaagatatccaaatggcagagtcaggtttctgagagattgcagactctcgctagacgagctggtagctcatctgctaatcagagcacctcanaacttgcccaaactgtggcagttccgattaagccatcaagtactagaaaaaatgtgttacaaaagccccctcaaagaacaggtcaggtgaataaagttggaagcccaaatctagtcaagggtcctgtgtaaattatgatgacaaactagttgaaatgataacactgccctagt

SEQ ID NO: 99954 - DNA, 469 bp, Glycine max
  Clone ID: PAT_MRT3847_61274C.1
cggacgcgtgggtttaacgatgatgaatgcaccatcgcccccccatttccaccttgtttgtactgaacatgctcagatagataccccatcatataatagcttgtattttacttcaaaaaaaaaaaaaaaaaaaaaaaaaaaaaaaaaaaaaaaaaaaaaaaaaaaaaaaaaaaaaaaaaaaaaaaaaaaaaaaaaagaaaaacaaaaaaaaaaaacaaaaaaataaaaaaacaaacatacaaaaaaaaaaaaccaaaaataaaaacccaaaaggcccccttttttgactttccattttccaacttacctaactgggaaggcccttggctttttccaaccttaaccgaattgcagcacatgcccctattgtccgcccgtgtaaaaccgaaaaaaccctgactgaccccctttacaacccttggcccagcctaaatattccgtgggacgcgcattatacgggggcattaac

SEQ ID NO: 99955 - DNA, 364 bp, Glycine max
  unsure (1)..(364): unsure at all n locations
  Clone ID: PAT_MRT3847_61275C.1
cttacacanatatctnatctctcttaaaaaaaaacaacaaccccnccaggaccggctccctaacaatttatgatatcccccattanccctctattctttcttattaaatactattataccataccctctttttctcatatatccataaaactattatatcttctacttattacttcattatacctaccagatcttcttacttatctacataaaacacctgtcatttcttaatttactaatacaaccaccactcctaaccactctacttcacttaccatcatctaactttttactacacctatgttcaccctttttctcactttataagccccacttccaaattcccttatactcacatcataac

SEQ ID NO: 99956 - DNA, 456 bp, Glycine max
  Clone ID: PAT_MRT3847_61276C.1
aagcaccattgcctttttcaaggaacaggaagaaccgcagctgaaatcacttatccatatagtcttctcttcacgtctatagctaaaagcaacataggaatgctccactttgccgcactaggcattaatctttcagaataatgtttcggcctcaccaagcgacacatagaatttcccttactatgaaacaccttagtcgtgtagcccagcacgtggcacaacacaaagcactgatgcccgacacttcatttctcctgtgctcttcttgcaacatttcggcactagcgcgtgttattgacatcttaccccccttagcaacggaatatattgaaattgttgccccgcaccttgtaaacaaagagggtatttttccgggcacctgttgtggaccccgggacccccactattactagaaagttttcagggggttcccacacctgcaatctttgatattaa

SEQ ID NO: 99957 - DNA, 331 bp, Glycine max
  Clone ID: PAT_MRT3847_61277C.1
attttcacatggcctttggggtaactttgcggttaagggagcgtccattaaggtaattaggggggccaccgcttcttttcccgccagggggatccttgaaatttaatggtgggttgcctttaaatgaatgaggtttgacatgaagggggaacacgtttttaacaggggtaatgggatatgtttgaggggggaatttggaaataatattttagggccaggaagttattagttaaaattattagaggtggttttttgatggggtattaataataaaggctagctttttgtaccattatggaataggatgggggcatattaataaagttagttg

SEQ ID NO: 99958 - DNA, 449 bp, Glycine max
  Clone ID: PAT_MRT3847_61278C.1
acgaggaaacatgtataattaacttcaggggctttctgttggttgtctcttggagttcctctgaacgcttcatgtgattggctagttataggcctttgatgaagtgtttgggggaactcttaggttcaactaacacatcaaagaaaaaatatgagtttaattcccaaaccacctatacacaggtgtttgtctcatttttagtcacgacaatcatctgatgacattctcatttttaacatatatgtacgatgctagatttcagtctacccatgtatggagcccaccctactacagccagtgtgaaggatctgttacctcttcacaagtcatgaggacacaaagacaatgctcggttgttagaatatcgagttgtgaggaggacccctcccagaattctcaatattaattgatcgagagtagtcttgtaaacgtatagcttaatgagtgta

SEQ ID NO: 99959 - DNA, 835 bp, Glycine max
  unsure (1)..(835): unsure at all n locations
  Clone ID: PAT_MRT3847_61279C.1
ctctctctctgtgtctctctcacattcttgtttcttattattcatatctgttttttcgatgatgggcattgaacagaaactgtagaagcctgtcgaacagtgaattgtaatagtggtaaaatgaaagaatgaatgggtatatatatgtgtgggagtatacagatatagatatagatatggtggtgcagctgtggtgatttggcattttctggtttttgttcggtgcttgttggtattggttggtttgttggttccatttgatgtttacatagaggagctagcttagccactttcggcaaaagaactcacagagatacatttacacaaagaaagaacgcgtttactgtttagagaccaaaccccatcttttgtaccactcaatgaatcattagtccatactcaaactctgaaagcgagtgtttttttagagctgagacaaatagtatatatttgagtttgggtgattggagaagaaactgaagaagagagattgcaaaatgagagtgtgctgtcttggttggttgagcattcttgtcaaatgaggtttccctttccgaggtgatttatttggacacgcagattaaactgcatgcaattgacgcgcaagatgttttaaaagaccacgcaagaaagagaacaaaagaaaaagaaaaaagtcttgtttctaaattttcccaattttgaaggaaaactaaaagagaaaaatggatttgtagtaacgagttggatatgcaagaaccgagcattgagacggatagncttagttacgaaatcttctccattctcgaaagcaagtttctcttncgctacgacgatccaagcttctggttcccca

SEQ ID NO: 99960 - DNA, 314 bp, Glycine max
  Clone ID: PAT_MRT3847_6127C.1
accggggggtccggcacaaaatggacggggggggttttttaaaaaacactaccgggaagggttacccctgggttctttttggcccaaaaaccgaaagccaaaaaaagccgggaaacctttgggcattacccctggaaggaaacacaaaaaggacccccggccaccggggccccccaaaaaaagggttttcaaaagacaaaatttttttgttccccaaaacagggggctgtaagcttttcggggccagggcaaaaaaaccaaactttccgtgggggataaaacccaaccgggggggcccaaccacatccattaaa

SEQ ID NO: 99961 - DNA, 702 bp, Glycine max
  unsure (1)..(702): unsure at all n locations
  Clone ID: PAT_MRT3847_61280C.1
cagaagttgacaattgcatgaattttgctattttttacaacatgcaacagctgtacactttgtttagtacttcctgagaggatcttccacgtagcaatgttctgtatggatatcgcatagatggacctggagaccggggtaaggggcatcgatttgacagcagcattgtgcttgttgatccttatgcaaaactagtcgaaggtcgaagatattttggggatattagcttgaagttgtctaagtttctcggcacatatgattttgacagcttgcctttcgactggggagaaaattacaagcttccaaatatttctgagaaagatcttgttatatatgagatgaatgtccgtgcatttacaagtgatgaatctagtggtttggatagcaacattcgtggcagctacctcggtgtgattgaaaagattccacaccttctagagcttggtatcaatgcagtagagttgctgcctgtctttgagtttgacgagttggaaaaactgacgggctttgtgatatgctatgatttgatttgtgacttatttgattntttccttctgtgttgnttcattttgaaaacatgtcctagggtgattctggtgtgaaggggagcttttgcactcgtgttgctgggtcttctgatctttacagagtgaacaaccgtaggccatatcatagtattaacttgttattgcacatgacgga

SEQ ID NO: 99962 - DNA, 358 bp, Glycine max
  unsure (1)..(358): unsure at all n locations
  Clone ID: PAT_MRT3847_61281C.1
gtaacatggttaggtggttatagtaaacgcataccttgggcttctcgtccattccccttttttttgttagttgacaaatagatacctttttcccccgttcgtaatgatgcgcatcctgtaactcttgccgtccattgaattcaattgccttcttggcggtgctattttgatacaaggaaaataacactcgctgaaaagaaaaaaaaaaaaaaaaaaaaaaaaaaaaaaaaaaaaaaaaaaaaaaaaaaaaaaaaaaaaaaaaaaaaaaaaaaaaaaaaaaaaaaaaaaaaaaaaaaaattttttnnnaaaaaaaaaaaaaaaaaaaaaaaagggggccctttaaagggccccaatttt

SEQ ID NO: 99963 - DNA, 259 bp, Glycine max
  Clone ID: PAT_MRT3847_61282C.1
tcaactacgagctctctgcccgctgtcctgacctaagaagtacttccaattgaatacctagtccaacaaaatggcctctcgaccttcccaggatgcgcgcgtactttcgcatggccgcggtggtgccggcaacctcgccaaagatgacccgaccgcgaactaccccatgctcgatgacctcactactcccacgttgaagtcgaacacgtacaccacgggccgcggtggaacaggcaacatggctcagaacgaccccgag

SEQ ID NO: 99964 - DNA, 211 bp, Glycine max
  Clone ID: PAT_MRT3847_61283C.1
tacggctgcgagaagacaacaaaaggggattatggatggtaccagccttgtgcatattcttgacggtgggcttgaagaacagctatttaaacttgcaagtaggtgttctgtcgttctatgttgccgggtctcttctttgcaaaaaggttgaattcttgactcttgagagtactcaaacatttgacatgacacttgtctaagggggggttgt

SEQ ID NO: 99965 - DNA, 148 bp, Glycine max
  Clone ID: PAT_MRT3847_61284C.1
cggggggaaaaaaaaaaggcccggggttcgatcttagaactgtgaaccaacttgggtaaaactgtttggatggtgtccatttgggtaaaacaggggccaaaacattcataaaatactttgtcgatttgaggttaaaggacctttaaaa

SEQ ID NO: 99966 - DNA, 1207 bp, Glycine max
  Clone ID: PAT_MRT3847_61285C.1
ccgggagcgacccacgcgtccgggctatccaagaagcaccttggtggtcagcattagaccatgaatctattctttccaaacctcactcactccctcttctctcacaatgccatctgtggccactttacagaacagttagttaatgatgtcatcttttgttgttcttcatggcctgcatggctctcttctccgctcccagttcctaggccaagacaccctcactcatctctaccctcgtaacaaggcttccaccattcataacaagccaacaacagcacaaccacgtgccaaatttgacatgctgcaagtcttgggaggaagaggactatgcaatggagaagcaggtcttaaacaagagctgaagagggaacttggtgttgatgagaaggcaccagcatcagcaacaagtgacaaagagcaagagttagaggaggaatcatcaacaacacagtccttggcaagtgttgctgcagaagatggttttgagaaggaactgatggggttaactggggggtttccggggggtgagaagggtttgaaaaagttcattcaggaaaaccctcctcctctaaaaccaagtcaagggagcaaaagcctgaaactagcactgtctaagaagcctaaaccaccagaattgcctttgttgctgccagggatgattgccattgtgaagaacccgaataacccgttttacatgtactgtgggattgtgcaaagaatcactgatggaaaggcaggggttctctttgaaggagggaactgggacaggttgatcacgttcaggttggaagaacttgagcgcagagaaaaaggcccccccatgaagaaccccaagtcagctgtgctcgaaccgtttcttgaaaagaagtcatagttaagcttagtttcaatttgcaaaacatgttcacttttgtatcatatatgtataatgtatctatctatctatctatctattgagctttccgacaaagaaagcatagctgaggattgctactactgtgctttgatgttctttttgggtgagtaaatattgaatttgaggagccaacagaagggatcaaaggttgaattggtaacaggagaagtacatctttatggtaaacatgtaaatttgtgtaaagttatgttacaaaaaatgatggtgtataatttagtgagagttttagtgtcttgtgtgtatgtgtgtagctgctgttcaatggtcatg

SEQ ID NO: 99967 - DNA, 372 bp, Glycine max
  Clone ID: PAT_MRT3847_61286C.1
ggatgaaaaggaagggccttgttttcttcgtatgtacggtgttagcagcatggctgtgacatgcggacgatatgtggcctgtcctaatgactcactgtctatggcgccctgactagggaggtgaaatgcacacgcaggaggctagatgaggaagcacacaccatcatgtggctatgagaccattgaccagacaattgcggtgaagcaacggagaagtacatgcatggcaaacaatatagaggagactccaaaacagataaccaacaagcttacttttatgccaaatactacgaaggacatcccaaggacacattagggatcagcataaagggcaccgtactgtctaatatgccatactacaacaaacatgga

SEQ ID NO: 99968 - DNA, 193 bp, Glycine max
  Clone ID: PAT_MRT3847_61287C.1
cgccccctccctgtggagcctgttacctccgcatttgacacgagtctgctgtgaaccccgcaacctcctccccacctcccatctctccttccaggcccatccctggcccagagcaggagggagggagggacgatggcggtgggttttgtatctgaatttgctgtcttgaacataaagaatctatctgctgtta

SEQ ID NO: 99969 - DNA, 794 bp, Glycine max
  Clone ID: PAT_MRT3847_61288C.1
tttttttgccacaaaagaaatgggcttttactgcttcattttttaatataatcagtttgaaaataacctttgaactcttgaattaacatcacacatgtaaagggtcatagtgtatactctactcacttttgtttgatgtagtgtacatagtaattctacatgcaagtctatattggatggagcgaattattctgttcatctcagttattttcaatgggttgtaattggcttatgccaaaaacttgatgcaagttactcaccaaaaatgaaaactcatatggagtaggaactaaagatgaaaccttcttagcctttcatgtccaaatgttacatactgtggtaagtcctagcaattccagctgaaaccgttcaaatcaaactgttggcagtgggaagaagcatcattatcatcatgggaattcaggtccagtttcacatcaaagtttgcaagtctataatcttgagaaatcttctcgtagttcaatttaactggcactcttccagtttcagtgctctctcttctcttccaaccttcttcctttggaaccgttgttctaccaaaattttcttcttcttgaactcctacattcatggacaagaggcttgatggcctctctgataaaaaatcacccttcactactttactattacttgatgaggaaagaaacatcatattctcctttacttcatcacacaatctgtaatcaggctttaaatgcatagactcttctgcacacccttttgaaactgaaaatggagggccatttacagctctcaaatcaggttcatgctat

SEQ ID NO: 99970 - DNA, 399 bp, Glycine max
  Clone ID: PAT_MRT3847_61289C.1
tgcgagaagacgacagaaggggtggtggtaggtaccgagcaaatctttgctgagagatgactgagagattttattatttttgacggtgacaattataatgatgtgaattttgaaaacatcatatattgggcacgtactggcattaaaaatatatccaggatataattatttgggagcaatgaaactcagtagaaaaaataatgacgccaattttttttatggccaattataaagtgttacttgccatttgtcaaggtaacgggttatataaaaatatatcaatgcccaaaaaatattaacctctaatgatctttcattaagtgtcatcatatactcataacaacttttttataaggtgtaaaagatacatcaaggtacaaagggtcatcttaatcattt

SEQ ID NO: 99971 - DNA, 727 bp, Glycine max
  Clone ID: PAT_MRT3847_6128C.1
caacaggacagggagagaaaggaaagaagcaagaaaatggaagaagaaaagggaaaaagttcagaccttgtaattctatctaccaaagaggagacttcagttccagccctagtctgtctgagaaaagaggacattaaacgtttcgaggaaaccgaggaatgcttcgtcttagacttcgatccatttcactcgctcgacttctccaagctttccttggaccatcaagatgtctccattcttgctgaaaagggcgaggtagcttgcagggattacccgcatccaaggcatttgtgtgtcaaatttccgtttactgcaacacctcacgggagctattgtgaaatgtgttactgttatgtatgtgattcagctgcaccatgtaagtattggaacccatctacactctcacactgtgatgcagatagcgatgatgactggaaggaagaaaggaatcggaagaaatttcaaagtattctcgctagttagaaacaaaatgcagaaggaaaaactcttgtttaaatttaggtccccttgaatgtgcatggttagtaatggaggacaaaatcaaattgaaattaagccaaacgtagcatttttaacgtttcaacttttagttaatttcactgaacataatctttatcttccatctatagtgtaaatattagaaaaataaaatattgagttgtattgagaagttaatccaaattcacttttaatcaaaaaaaaaaaa

SEQ ID NO: 99972 - DNA, 335 bp, Glycine max
  Clone ID: PAT_MRT3847_61290C.1
aaaaaaaaaaaaaaaaaaaaaaaaaaaaaaaattaaaaaaaaaaaaaaaaaaaaaaaaaaaaggggaaaaaaaaaaaaaaaaaaaagaaaaaaaaagggacgccaggataaaaggtccaagctttggaatcgcgaccataaaaattaataaattttaaaagggagacctaaaataaaaaaaaggggcgcactttaaaaaacgtggaaacgggaaaaacctggggtataccaaactaaaaagcctaaaagaaaatacctttttggaaagatggggaaaaaaaaaaaaggccaaaccgaaaagcctttccaaaaattggccaagcctaaagggaaaa

SEQ ID NO: 99973 - DNA, 377 bp, Glycine max
  Clone ID: PAT_MRT3847_61291C.1
agggagtggcacgtgtccatatattcactctagccttgctaataacaccatactgtatacctactcatcacatgttactaacgacccatatacagatgaccgctctcactatcaatgcacctatataagggacctgcagcagaaactgttccatactcttgtatgccatacagcacgctagcaactatactgactactacatcactccagctgagaacactactgctcatgctgctctcgctgctgatataactgtgagagctgagggacaagattcctcattaatatcgaaactgtatggggatgctgtctttcctataaatttcaactacatgcctatgcgtgtgtgatttaaatattaaaccctcttcaacata

SEQ ID NO: 99974 - DNA, 318 bp, Glycine max
  Clone ID: PAT_MRT3847_61292C.1
cttaaaaaagctttccatcttattcacaaaataaaagcccttaaacctgatttaaatgaacatgatcttgcttctttatttctatcactagccataaaactttccttaaacccaaaaagcaaaaagcttttttccaggagggaaatttccaagggttaatccaacacctattttatatccatttccaaaatatttacccccattactgactgacatgccaacatacactggcgatccaatcttattagaacattcaattttaacaatcttggccttaattggctaaattagccctttttgaattggggaacccgcaaa

SEQ ID NO: 99975 - DNA, 885 bp, Glycine max
  Clone ID: PAT_MRT3847_61293C.1
cctctcgtccgcttttctcaacctttgtggccctgcaatttaaattttcccttctattaaattctgaacatctctctcctctgggctacgttaacgtcgaagcggttatttatttatttacatattttttaatatttatatttattactgctgctctggcactcgttgcattttgcgcttgtcatgttattcaatttttgttccaccccactgcggcgacaggttccaaaaactctatctttttaaggatttttcgtggatttgaactctgtttgataccttgttcagtatggaacccatggcggttgtgttggatgtgagttcggacgaagaagaggaagtggcgtgtttggaagacaagaaagggaggaacatgaccattgattttgactgggtgaaggagtttctggacatttcggacgaggaatcgaacgaggttgctgtgatgcacgaggtgaacaaacctcaacgcaagtcgaagaagtcttcgatatcaacgccaagcgtggacgatgacgatgatgattgtgtggttctggatactgaccctgaaagccgagtcactactgttgatgactcgtcaactgggtcagacgaggtgggtgctgttggggagaagggtcagattgcgtgcagagactatcctcatccccggcatctttgtgtcttggttcctttttcttccaccccccatgagaaacactgtgaccaatgccactgttatgtgtgtgattatgtcgcaccatgtccgaagtggggcactggctttttaggtacagatcactgtcatgcgaccgagaaatctgagactgggagaagtctgaggaaaaatttcaagttgggcaagactgctccattaccggcttcaacaaaccactgtacttt

SEQ ID NO: 99976 - DNA, 213 bp, Glycine max
  Clone ID: PAT_MRT3847_61294C.1
cagtctcttgacccttgacgagaaggatccccggcgtctatttgaaggcgatgccattctccgtctcctcaatcttttttgggtgctctaggagaccacaaacgactcgaccacctcctaaaggtcttgatccaggactttctacggcgacgactccctaccctctgccaggaaagaagagacatggccaaatatattcatcaccctctcgat

SEQ ID NO: 99977 - DNA, 320 bp, Glycine max
  Clone ID: PAT_MRT3847_61295C.1
gtaaaggggcagatgacctcgatcatctctgtgagccaacagacgtggtcctctcgaaggcaaaagactctgacagtctttgaaaggtaaaaggcagatgttgttgatagtctctgcatgacaaaagactctgatagtccttgaaaagtaaaggagcagatgaccttgattgtcttcgcaagacaaaagactctaatagtctttgaaaagtaaagggcatatgaccttgattgtctctgcatgacaaaagactctgatagtctttaaaaagtaaaaagcagatgaccttgattgtctctgcatgacaaaagactctgata

SEQ ID NO: 99978 - DNA, 383 bp, Glycine max
  Clone ID: PAT_MRT3847_61296C.1
ctataacctttatacccacactttcaatatttttatcatccggtgcatatttacagaaagggctttttttaacccatgaggccctcaaaaaaacgttgtgcaccaattgaatctcatgactgatttgctaaagactcctcctgctcagtccatatcaaggattctaaatgaaaagacttacaagcttcttaatagcatgaggaatatacaaccaattccattcttccaaaaatttccaaatgcacatccatttgctctccttttgctgaagcacctactcgcatttgatccaaaagatcgtccatcaactgaagaggctttatctgaaccctacttcactggcttggccaacatataccgtgaaccatttactcaacccattt

SEQ ID NO: 99979 - DNA, 153 bp, Glycine max
  Clone ID: PAT_MRT3847_61297C.1
ctccctctctccaacatcttcatctacttaccaccatatcttaactcaccattcattctcctcattgtcacacattacatctaaatcttccatctaataacttttggctcttatcatgaaactcaatattgatttactatcaagtaattattg

SEQ ID NO: 99980 - DNA, 617 bp, Glycine max
  Clone ID: PAT_MRT3847_61298C.1
aaaaaaaaaccacgtaatattatttaattaaaaaaatacttttttacccccaataatagtaggggatcgaaattcttgagtcatcatcccacttaaaaaatttggtttttgggaaaaccaacacatgtctggggaaggggggagtttaacggggagcaggatgacccccccttttgcggaaccaatttggccatttttgccaactccctcactttttttctcagttttttccccttgactccttgcatcacctccttaaccggttttttaaacccttcccttttaaaaaacccttttaccgacccattaaacgtttccaccctaaaccccacctttatttcctcctccaccattctagctttaaaaaactggtccgccattattggcccccccactataggaacccctggtgggacactttccatcaccgagttccacccccagggggtcaggaacccttccacactttaatgcataaatttttttttctgatccaccccctttcttataactatccctctggctttaactctttcttcatacccatgggggagcccccactccttcttccttatcacccacaaaaaactcacctttgattcctccaaccccttcgg

SEQ ID NO: 99981 - DNA, 488 bp, Glycine max
  unsure (1)..(488): unsure at all n locations
  Clone ID: PAT_MRT3847_61299C.1
ggctcgagaaaatggaatctgctatttgcctacgctatggccccattccctattttcccaaaggattttttggtgcaaatcctagcagatttcatctgaagattaaccatgccacccctctttctctccctcaaatttccaccaccagaagccctgttacacgttcatttgggcatgcaaattgcatgcttgaaagattctcatcagtaccctccgagaatgagggaagtggcaacaaaattttgagaggagtgacactatcttctctggttctgacatgtgttcttggattatttagttttggtggcaagaatatgaatcctaaactcaccacagcttatgcttcaccatatgataaaattgcatctttatttgtccgtgagactgaggctcaaggaagtgttgctctcaagccacggttggatggngctcaaggaagtgttgctctcaagtcactgttggaaataccgagcgatgcagaactcgca

SEQ ID NO: 99982 - DNA, 593 bp, Glycine max
  unsure (1)..(593): unsure at all n locations
  Clone ID: PAT_MRT3847_6129C.1
ttccattgacaaactgataatgattaataaatacatcattatggccactaaaaaacatatattatggttaactaaaaaatgccaaatgactagagaatatctccttaacatgaaatcttgagaaaagaggatacaaaaatgactcctacctcaaaccggtaaattcctctaagtcctccacccaaatccaacactaacccatgtgcaccaatttgcgagactttggcagttacttcgcttccgagtttcagatcttctgcagttaccttatctttaggtccctgctcatccccttttggcctttgaagatcagattttgactctttgtgcattgaaagttttgacttcttaacatttgtataaggcaggggacctgaatgagaagatggagcatcaacatctcgagatctacaagatttagcattttgagatcgagattttgacttgagatccaattgcaccccattatctacttgaggattttttgaagacagattcaagctggatgatttctcctcttcatcacattctgcagcactacgtattaaaattactggtacttgggnnntttcggattttgcttcccccaactc

SEQ ID NO: 99983 - DNA, 429 bp, Glycine max
  Clone ID: PAT_MRT3847_612C.1
gtggcttgggaaaaggaatggaaccatgtggaggttagttatgaaagtgtgttagcctatcaaatcatagagagctcagtcattaaagcaactggaatccatatagtcagagaagaaggcagtacgtatgaagatattcgatttgatgatccttatctcagcagctctgcatcagaaagcagtagggaggaagatattcgatttgatgatccatatctcagcagctctgcatcagaaagcccctccttcctacaaaccttagctttggggacacgcaagttttccattgcttttttcttattcttttcatgttttttattttattattttgggttccgttgtcaaaaattcacttaacccaactgctcttcaccctatcttcatcatgtacttttgacgcatttatatatattcatcttttacgacttt

SEQ ID NO: 99984 - DNA, 373 bp, Glycine max
  Clone ID: PAT_MRT3847_61300C.1
ccggaaaaaaaagggccttctcttaaactatgggcttcaaatttgtcgaaaccggaaaaacaaccttgaccccctctggaaccattaagtgaaaggcccctgcgtggggtgaaaaacaaaaacaaaactgtggtacaaatctactcttggcccaacccttaaattaattttggttcccctttcccagttccccccaactggaagaaaggccaacattttttaactaacataatgcattaccccaaaatatttcaaaacctttcttccccccaggagggaatgcctcctccctccccaggtccacacccccaaacacctgttatcatccctttcccaaaggcaattgcgcccatcccctttccttattggggat

SEQ ID NO: 99985 - DNA, 479 bp, Glycine max
  Clone ID: PAT_MRT3847_61301C.1
gtcccacctataagtactagtagatgctcaacaccaccctattttactgactcactatcgtcatgaactgattaaaaccgctagatctaatttgtcgtttcgaaaccagctaagcaaagtgatggacagggatccatttctgcatcaaccactataggatactggcgataatacaatcctaattactcgtactgagaataaaatcatgattgcacttacctgaatatttctactatcaaagaactctatttgaccaacatctacactacttttaccatctttacacacgtactcaaaaaatggggtggaattctgataatgagtaacatcaacacaatttggaataatttaactggccatcctgatgtgacatatgtaacatatggtacgttggtcaatgtatacactggcatcattaggagaaaatattgatgtggtttagagaacgttatacggcactcacattttgtgatgcttgt

SEQ ID NO: 99986 - DNA, 824 bp, Glycine max
  Clone ID: PAT_MRT3847_61302C.1
tcccgtcccctcacatacatgatatggttacccaggtgtggttagttcgatgcgatccaacaacttgcataagacgaaaaaaggatattacgaagaaaaataaaaaagtcgttaatattcattagattcaagaaaacctatgagttattggactattgtcttcaaggactgacatagtttagtcagacctcttctgcgaattagaaatgctacactcacgcgctgtgaactctcgcccaaagaaacgtacgatccttggtgtctcggaacttgtgcgtgatgcgcgcggaatccacgtggacatgatcccagggaatattactgatagtggagaacaactgattccataaaagtgtaaactgaagtgaattccataggcgatcctatagcatactggtgcattctacttcataatagtgggaaagtggcactgcgatgaaggtacaaatgtcgtctgtggagattatgtatactttgttttttatttctacctaattattctacaacagatttcgacattgagagtacctctgctgtatatcttgacaatcagtgcccaaaacgtattcaagtctgacgctactcacctgcctctttggcagttttggaacacatagtatgtaggctctcttctccagcaaatgaagactcaccctttgctactcttgaggcggtctatctattacgcttggcatgccgggttctctcatgtgacatgagagttacccccatcctcatggccgacctcctcatgatttgtggcacctattcctttttgtagtgcaaaatataatatttttccaaaaaaaaaaaaaaaagcccct

SEQ ID NO: 99987 - DNA, 357 bp, Glycine max
  Clone ID: PAT_MRT3847_61303C.1
ctttaataaattatgcgccgttgttccatactttgaaaaaaaaaaaaaaaaaagaaaaaaaggggaaagaaaaaaaaaaaagaaaagaaaaaaaaaaaaaaaaaaaaaaaaaaaaaaagaaaaaaaaaaaagaaaaaagagaaaaaaaaaaaaaaaaaggggggacattataaaggagcaaagctaacgaaccatgatatggaacagaataacgtttcaatgggggcaccaaaatgaaattaaagggccgtggtttaaaaacgtcgggacgggaaaaacctgggggtaaccaaactaaatccctttggaaaaaagacccttttcccaagggggcgaaaaggcaaagaggccgaaaca

SEQ ID NO: 99988 - DNA, 519 bp, Glycine max
  unsure (1)..(519): unsure at all n locations
  Clone ID: PAT_MRT3847_61304C.1
caggcccccgggagttggtatcattccaaagaatcccccccccgggggaacgtgggttttattcccnggcggnnnagggnnggaacanccaaaaancaaaaggacgggaagaaaaaagaaagaccccccgaggactaccgccccaagaanccggcgcgaaccacaacccatagggcggcaagcaagccccccataacgggagcccgcaccgggggacccacacttnncatgagaaaagcccttattttttggccggggggtgcccctgtttgtcattccacagtgaagaatgttatgtacccattacgtttactcgatccagcagactatgtatgggatcctatctttcgagctccactgatctgggcttaggccgtgataccaccgctcccccttgggcacccagtgcctggcggaaatggcctctatggccatatgggccccccaccccaccaaggaccattctgcagacttcagttttgtggcgtgggtggcggacccctgggccgaggctccccc

SEQ ID NO: 99989 - DNA, 535 bp, Glycine max
  Clone ID: PAT_MRT3847_61305C.1
aaaaaatgagtaaagggagaaaacgaaagagagaaagaagtagagacagagagagcagaagaaggatccacatcgttctcttcctctcttctgtcttcttctccttcaacattcccaaacccaaaaagtgatttatgatatgatggagtttggtgtgaatttcattcactgattcaacgattaggatcaactgtcattggtttttttgtgttgggactagaaatgtcaatgtcaggatttgaagggcaatgtactaatgatgagattagagagaggaggtccgatgttgagaactcagaagacgagaggcggccgtcgagaattgggaacttgaagaagaaggcgatgaatgcgtcatctagattcactcattctcttaagaaaagagggaaaaggaaaatcgattatcgggttccgtccatgttcattgaggatgtcagagatgcgcgggaggagactgccgtccacgaattgcgccagaaacttgttgagaggggatctctacctccctggcatgatgactatcatacattgt

SEQ ID NO: 99990 - DNA, 420 bp, Glycine max
  Clone ID: PAT_MRT3847_61306C.1
gatggaagaattggagtgtaacagcctcagctgcaattgatgacattcacattcacgcgacggtgcactgagtgagtaattgcctactttaaccttttctcaccgctgccaccaacgccctctaccatggactccgttccgtttcgcgatggcagcatacacaccattctcgactcccgatattttcactctccgctggatgttagtcatagtttgcacactcattcctcgttgattcggaggctttctcaagaaacggagttagaggttggtaacgtatcttaatttaccgctacaccatggtattgccatatgttagtaggaaatcggagtagcatccatgtgattatgtgaatattcttcatatacatgtttctgtgtgttttagtatgcactggaaattaagaaatgcaaaattgc

SEQ ID NO: 99991 - DNA, 447 bp, Glycine max
  unsure (1)..(447): unsure at all n locations
  Clone ID: PAT_MRT3847_61307C.1
ggatccacatcgttctcttcctctcttctgtcttcttctccttcaacattcccaaacccaaaaaggttttgattggggttaccgagcgaacaggtgttttaacagctacaaaataagtgatttatgatatgatggagtttggtgtgaatttcattcactgattcaacgattaggatcaactgtcattggtttttttgtgttgggactagaaatgtcaatgtcaggatttgaagggcaatgtagtaatgatgagattagagagaggaggtccgatgttgagaactcagaagacgagatgcggtcgttgagaattgngaacttgaataagaaggcgatgaatgcgtcatctagattcactcattctcttaagaatagaaggaaaagggaaatcgattatcgggttccgtccatgtccattgaagatgtaagagatgcgcgggaggagac

SEQ ID NO: 99992 - DNA, 373 bp, Glycine max
  unsure (1)..(373): unsure at all n locations
  Clone ID: PAT_MRT3847_61308C.1
aacctattcccccnnccttgggaaggttactccccactgagttgccaggaacctacctttccctcttttaaaaaaaaaatacttcttccaaattcaaaactatttcacttacttgttttattttcaatcctcaccacgttaaaccaacaagacacctactattctaaacattccaaaaaattatcccctcaccatatttgttcattttcttatccacaaattctctcatcttttatacccctatatttttatccccccacttaaacatttttcccaatttccatctctccccattattttaccctaattttcacctttccaccttttttaaccccatttatattttccttcccattatttttttcatttttcc

SEQ ID NO: 99993 - DNA, 352 bp, Glycine max
  Clone ID: PAT_MRT3847_61309C.1
gtgaaaaccaggggcccatatttccaaatatccccggggacaaatttccccaaaatacccacacttcccctgccaggctttatttgggttactagaaagtaaatggttccaaagggtaaccacaccctccttaaatagaaatcctgtgggaaattcctttgaaagtcaacctttcctcatttgtaggaaggagcaatgtgtttggcaactgaactggcccataccgatttttttaattggaatcctggtttttggctgggattttcccctaaatttcggccaggtggcttccaaacttttggaaggcttttaaggcctttgaataaaaggcccaattaggatggtttttttc

SEQ ID NO: 99994 - DNA, 446 bp, Glycine max
  Clone ID: PAT_MRT3847_6130C.1
tttttatttttttttttttgaacaacagccaatagacaatatgcaacatataaaattgcatcgcatgcaacaaagttttggaaaaaacaaataatcaaaatctaccataaagggtgtaaaaagaagctcactacaaaacattaataactctcccatgtatcggacctaatcacccttctagatacgcaaactggacgtcttgttcgtaaagacaacatcaaactaagcaactttctcaactatatccttactcttacttgtggatacattgggagcaatctcagcacaatatgtcctgttttgcattatgagaagttcaacgtctttcacattgtgcacgacaaaattcttgaaaccatctgatatataatgacgggcattcttgattgagccataaccaatgttgggcatcaaagggcatcctttgaactttctactgacacgag

SEQ ID NO: 99995 - DNA, 657 bp, Glycine max
  unsure (1)..(657): unsure at all n locations
  Clone ID: PAT_MRT3847_61310C.1
tttgagaaaaacttctttgagaaccttttcacattcgttcggctcgagtctatgatggaaggnatgttcggattcagatgaatacagcttatgtggacagcaaatcgagcatccaagaggtggccttttgcataacaatggaagcacagtttcttccaatatggatttaacaatgtcctcagtagattcaatagtaccagttagatcaccgcatcacatgaatattactgtcaggtcttctggtcaaacaagcagccagaccgaagttgacgaacttgaatttttgactatctgcagggatgctggggtggttcacatactgggaaacacagttgtgagggcaaggagggaatcaaggttctacaagaaaatagctgttgattatatatatgcatttcttaggaagatatgcagggaaaattgtgtaatcttcaatgtccctcatgagagtctcttaaatgttggtcagattttctatgtatagcatagccccatatccttgtgattgccattttttttgcaaaatgagctgagtgtagcatatgaacaacactttgcttatggtaatcaagatacaattcggaattgacttagaagaatggctttttggcaattatctcttaaaaattgaaagtattgctcccatatggctaaaaa

SEQ ID NO: 99996 - DNA, 504 bp, Glycine max
  Clone ID: PAT_MRT3847_61311C.1
tcgttgacgcgtgggtcacaacttaatcttctttcacaatatctgacgatgtttcccgtttacatgatctttccgatgatgcttctcattctctctattgggaatggaaatgggcacaaggaagagtgtccattgtggtttgattgtggaaatcatgggaggttcgagtggccttttcaccaaggtagaacaccaagactgtggcatatggccaatccatggttgtgatgatgatcttattaatccaaattatgtgttgttaaagattggaccaagctcgattaaagttcaaaaatttgagatgcaaaggtttgctactattgtttacttcacagatcatcatctcagaaatctcttgcaatctgatagttgtgagatctttagctacaatattacactttctcctagctctcctttgggttactttactattaacaacaatataacttttgtcaagtgcaaccgcacccttcaagttaacaccccaaaactttcctcaaaata

SEQ ID NO: 99997 - DNA, 310 bp, Glycine max
  Clone ID: PAT_MRT3847_61312C.1
gccacgcgtacgatgggtcatgtttgaaatttaataacctatatgtacaaacaggctcagggggtgtgtaatacggggagacattcatacaccataccaaccagaattgcatctatcatctcttacctggatataaattacatggatgtgaaacgacctacttatatgatctggctccggttgagactgagtctcaacttcattggataccttgtgcagatactgagcatcattatataggctatattctcactgtactgtaacatcctgagaaagaatgaagcgtatgattcgcgtgtctataatcaca

SEQ ID NO: 99998 - DNA, 186 bp, Glycine max
  Clone ID: PAT_MRT3847_61313C.1
aaacgaatgactttatcgcaggcaacacgcgagcatcaagtccaacaagtgtacattaccaggactaagtataaccaaacacgaaatgaagcaatcccaataggatatcccccgatcaacgaccaaccctatagaacacagccaaaaggaccacagttcaacaccacttccaacaccagcaaccaa

SEQ ID NO: 99999 - DNA, 477 bp, Glycine max
  Clone ID: PAT_MRT3847_61314C.1
ggcactcgtttttttataaatagaaaataaaaatcactttacagattacagttatcctttatttttctctgcttcctaagattcgtcatgtgtgactttcattccattaccttctcagcaacttaacatggttgggttcaactcagttcctaattggcttctcattcttaaggaagagaagttttttactcgctgtttgattcatcactctgtaaagaagaacgagaagaacattttctgcttagattgctgcacaagcatttgcctccactgcttgccctttcaccgctctcacgtccttttgcagataagaagatacatgtacaatgacgtattacgccttggtgatgctcagacattgttgaattgttcccttgttcaaccgtacacaacaaataaaactaaggttgtattttcgaaacaaaggcctcccaccggctctcacagaggctcgagcaacttttgcatctcatgtga

SEQ ID NO: 100000 - DNA, 377 bp, Glycine max
  Clone ID: PAT_MRT3847_61315C.1
agaactagtctctagtttttctttcttaaatttcatttttttttaagaaaattgttttgtgtgttgttagttgatttgtgcttctggatatgttgtatatatgtagtaatcttgctaattcttttgagttgaaaactacttaacagtataaggattaaagcagtttcaagtgttcatcaacagattctggttaaaagagatacaagggatggagggtgttctaacacctagtgtccttgcaagtgccttcatgagagaattagtattgttgtcattggagtacttatagtaatgaagatcaaacttgtaggaataaacacctagatgtctttctatgtcttgagattggtgtctcttatcattctcccaaaaagttt

SEQ ID NO: 100001 - DNA, 409 bp, Glycine max
  Clone ID: PAT_MRT3847_61316C.1
tttcttttaattcccaaattttccggggggaaaacccccttcttttttttttaggtggtgttttttggcctaccaggggtccaaatccttccccaaacagggctttttttatccccaaggttgggaatcaattttgaccaacctccccaaaggatggaatcccgacccttcttcctaaatagaaaaccattttcttcccctccaaattttccccccggcggggatttaaataaccatattggcataaaccctaccttaattggaattacctttttattagttcaaatggatccggccacctttcccctggggaaacaatcactccaacccattttggaaatgcccaccccgtttctattttaaataaatatttttgggaattggattctccttcatgcccaagggggct

SEQ ID NO: 100002 - DNA, 232 bp, Glycine max
  Clone ID: PAT_MRT3847_61317C.1
aggagctattgtgttaaaagaccaattatggcatttcctccatatcattctaatcacacccttcctctgcctcctgtatatcctatgtggggacaatctggcagtccaacggctggcatgcagatttggggctctccaggttatcccttttggcatactactgctgaaaattggcactggataccatttccagggatgcatgcagatgcatggggctgtccagtgttaccat

SEQ ID NO: 100003 - DNA, 249 bp, Glycine max
  Clone ID: PAT_MRT3847_61318C.1
ctctcgctgcttcattactcctattcaagaaaccagttctgaggagcaacattgctgctcggtaatccccgggtatatttagtctacacagtaatgggcttacccagaaaaggttcacgcgtcacatgaattttatactaggaataagattactgtcgtacatgccgtggacattccagtacaaccagctccttaggcaactgtggagtatagataactcctagctgcagagctacggtttcaggcaag

SEQ ID NO: 100004 - DNA, 277 bp, Glycine max
  Clone ID: PAT_MRT3847_61319C.1
cagctgcttaggaagcgggctctagctcgagcggggtcggcttgtgattgttgcaaaaaaaaacagaaggcgggcgatgtgtgaaattgcttagttctttaaacagagctctagtcttgaataaagagatcattcagataagggactctagaatctacaaaaaactaagtacggaagaggtcttaacgaggattggcccttggagcaccaatgaacaattgctaagaaggaaagcctatgactacgttggaggagtccagtctactgcgagttgggg

SEQ ID NO: 100005 - DNA, 229 bp, Glycine max
  Clone ID: PAT_MRT3847_6131C.1
cggtgacatgtttatcgccaccgtcaccaacggaaaccctcgatctctcgctgaatgggtagctccgccgtccgtgcatccgtccagtcagcggcaagccggtggcgcctgaaaggacggtgtttacatctactctgaagataatgctggggtcatagtgaatcacaacggtgatatgaaatgtcctcctatcactggtcctattggtaatgagtgtgctcatctgtgg

SEQ ID NO: 100006 - DNA, 289 bp, Glycine max
  Clone ID: PAT_MRT3847_61320C.1
gggtggaatacaaaaagggaaaaggggtttcttcccctaaaaaaaagaaaaggggggcctataaaccacctctcggtcttatacaaaccttgcgccccctctccctccctagggggttacaaggtcaaatttttctaccccttttttttttttttccaaaagaatcttaaatttggaaataaacttcgccctttttggcctagctttaccggggttagagaacccccctacaatccctgagggggggattttcttttgggggggggaaagggcccctctttggcccccc

SEQ ID NO: 100007 - DNA, 503 bp, Glycine max
  Clone ID: PAT_MRT3847_61321C.1
caaaaaaccccaaaaaaaaaccccgccccccccaaaaaatggggggggacccccaaaacttttggggcctggggggaccaaaggggccccccccacttttttaattgggaggggggccagtcccccttttgggcgcccccaaagccaaaaaaagtggccccaaaaaaacaaaaaatcctttgggtgggcccctttccaaaaaaaaaaaaaccacgggtaaaaaaaaaaacccgcccacctttggggttttaaaaaaaaaaattaaaaaaaaaggggggggaagggggctaaggtaaaaccagggccaacccccaggggaggggcccggaaaaacccccccaaaaacctagggggaataaaaaaaccttaccatccgggcgggggggggaaccccccaaattggaaaaaaccccatagggggaacccgggcaagggtttttcccttcaccccaaaagggaaaaccggcagggggtctatcgggcccaaaaaagcccaatggttt

SEQ ID NO: 100008 - DNA, 502 bp, Glycine max
  unsure (1)..(502): unsure at all n locations
  Clone ID: PAT_MRT3847_61322C.1
tggtctacaacttgaccaggctattcttgaagacatcctaatcccaacaaattcacatcaaaacacacatgggactatttatgacacggattcaattttgaggattttttccaattttctgaacttggatgaggaggatgaagatgataatagtcacctgagagatgaaagtgaaatggttcatgactttgacagccccggatctccaaaacaaagctcaattctgaaggtatccaaattaatggacaactatctagctgaagtagcactagacccaaacttgttgccatcaaagttcatatcccttgctgaactacttccagatcatgcacgtattgtgagtgatggactctatagagccattgatatattccttaaggttcatccaaacataaaggactcanaacggtaccggctatgcaaaaccattgattgccagaaaatgtctcaagaggcatgcagccatgcagcacaaaatgaaaggttaccagtgcagatggca

SEQ ID NO: 100009 - DNA, 1045 bp, Glycine max
  Clone ID: PAT_MRT3847_61323C.1
ccacgcgtccggagagtgagtgagagagagaaagacgttgctttttaacgccggcgaggaatttccggtccactcgccggaaaacccgttttccatttgcggtttaaaactcttccggcaaactccatatactccgttcctgcatttcacggtttctggatcgagtcttctacaatactctcggtgctgttctcttcattttttctcctttgttttactttgaagctcccccagaaagaaaaaagtaccttacttgcaaagtgggatttagggtttggtttactctttagtatttatcttctgtgaccatttcttattttagtttactttttttgggggggttctttgtaacgtttcctcgaattccctcacccgcaaatgctactctcaagtcgtgttcaacaccattccctttttctccctcactctcaaatctagccgttaccaaaaaacaaacagctttttttttttttttttggttttggcttgagcttaatctgaagttggatttctgggttttgcttccctcgtctaaattcggagtctttgatcttcgttacttgtttcccccagctcaatttcacatggatgtttagtattccaaaaaaatgcgagtgctattttcaagcatgagagtttttcttcttcttgtgtggttgttggagctggtttgtgtttcggtgaccgccgtgaacccttctctgaacgacgacgttttggggcttatagtgttcaaagctgacatacgagatccgaaggggaagctcgcttcttggaacgaggacgatgagagcgcgtgtggtggtagttgggttggggtgaagtgcaaccctagatccaatagagtggtggaggttaaccttgatgggttctcgctctctgggagaataggtagagggttgcaaaggttgcagtttctaagaaagctttcactggcgaataataacctcactggtgggataaaccccaacattgctcggattgataaccttagggtcattgacttgagtgggaatagtctctcaggggaggtttctgatgatgt

SEQ ID NO: 100010 - DNA, 218 bp, Glycine max
  Clone ID: PAT_MRT3847_61324C.1
atacaggcgtcagacagactacaaaaagaggaggaaagggggagcgaaagaggggttttggaacctgcagcattcggtgctccaatctcagctatccgtgaaggctccatcaccgatcgacaatcctgtcaccgattcgtggtacacccaccgtcccgtcttcacgctcgcaatcggacacgtcttaagtgcctcattcttcacttattacgcaacat

SEQ ID NO: 100011 - DNA, 263 bp, Glycine max
  Clone ID: PAT_MRT3847_61325C.1
ataagggttgctccttccgttcgagaccaaggataatctcccggagaaagaaggaaaacaaaagcaagcttggtgttgggtgcagaaaacaaaacctggatctcaaatgaaaatgggcgtaggaattaatgcctgaagatgattgcggagacaaagccctttgacagcgacgagaatggcaaagaggaggaggaagaaggggtggtgaagatttgtgtccctaaccgtagcaacacacacaatagaaagggagaagcggatgt

SEQ ID NO: 100012 - DNA, 469 bp, Glycine max
  Clone ID: PAT_MRT3847_61326C.1
aaatttatcgactatgtcactgatgttaggcacatcaaatatagctaatgatgatttggaatatttggaaatgctttttttattaagcttccagtcttttatttcccaaatgattcttgacctttgaaatttatgtagcatattctagacttttggtttaaaatttgaactttaaggtaggggttcttttggttaagttggactgcaatatcaggctacatgactttccgttaggcttactttatttgaaaatatgaattgccgtttctctctccttgctaaataatatacttcacattgttgactacttgacttgactcattaaccatttattggtgttgcacagatatacaaagctcagaggaatgtaatactgtgtgttacagcatgtcttctctactggtaaagtaacaatttgagattggaatttatttgtcctttgggaatggaatggacctagttattatct

SEQ ID NO: 100013 - DNA, 1902 bp, Glycine max
  Clone ID: PAT_MRT3847_61327C.1
tacggctgcgagaagacgacagaaggggctaaagtgatcttaatttgaagcaaaacccacaaaactaacagtgtatcaaaatttttgaacctgaaaattgttattttgatagggtttacagcaaatgcagcatacccgcgttcacaaacactgaacgccgctgctccgtagtttcgatcgacgcattcttcacttcaagatctcacaatgtctataacgcacagcctcactacttcactctcttcttcttcctctgctttcttagctccttcttccttcaattgcaggggacaggtttcgttgcctgtgaagagcgtgagcatttgcaaatgcgttgccacacccgaagctgagactgcctacaagacaggggtcaatcgcaatccaaatatggggaaacttcaagctggctatctctttcccgagattgctagaagaaggtctgcgcacttgctgaagtaccctgatgctaaagtaataagccttggaattggtgatacaactgaacctattcctgaagtcataactgatgcaatgtcaaagagatcacatgcattgtcgactatagaaggatacagtgggtatggagctgaacaaggtgaaaagccattaagaagggcacttgcttcaacattttacagcgatcttggcatagaagaggatgatatatttgtctcagatggagcaaagtgtgatatatctcgtctccagattgtctttgggtcaaatgtaaaaatggctgtgcaagacccttcatatccggcctatgtagactctagtgtaattatgggccagactggcctcttccagaagaatgttgagaagtttgcaaacattgaatacatgaggtgtaatccggaaaatggtttcttccctgatttgtcttcaatttctcgaccagatataatatttttctgttctccaaacaatcctactggtgctgtggcaacaagggaacaactgacccaactagttcagtttgctaaggacaatggttctatagtaatccacgattcagcttatgcaatgtatatttctggtgacaaccctcgctcaatatttgaaattcctggagccaaagaggttgccattgagacttcatcatttagcaagtatgctgggttcactggagtccgattgggttggactgtggttccgaagcagttgctgttttctgatggatttcctgttgccaaggacttcaaccgtattgtatgcacttgtttcaatggtgcttcaaatatttcccaggcaggcggtctggcttgcctttcaccagaaggtcttaaggctatgcgtgatgttattggattctacaaggaaaatactaacataataatggagacatttgattctcttgggtttaaagtctatggagggaaagatgcaccatatgtgtgggtccattttcccggccgaagctcatgggatgtattcgctgagattcttgagaagactcatgtggttacaacccctggtagtggttttggacctggtggtgaaggttttatcagggttagtgcctttggtcacagggaaaatgtcttggaggcatgcagaaggttcaagcagctatacaagtgaatttagaatatctcatttggtttcaagagttgttctcttggactgaagctagggctgtcttatttaaataatgcaattgattttccgtggagtttagattataagatgtaaagacagggtttatcaattgaggaagtttattttgctattgtttgctttatcttctatgctacaacttagatgatgatgtctaaaatctcttgccttatcttctatgaaaaatgtcaaactctagcaatttaacttggttagatgattcagttaaaaaaaaaaaaaaaaaaaaaaaaaaaaaaaaaaaaaaaaaaaaaaaaaaaaaag

SEQ ID NO: 100014 - DNA, 440 bp, Glycine max
  Clone ID: PAT_MRT3847_61328C.1
ggccgggggcacaagaagatctttgcaagaacagaggagcgtgcttagagagaagcaaagatagtatcttgcattttcactctgttactgagtatggaacgaaagggcaagcacatgcgatgaccactctccctcaatctcaggggccctggaccccaagtctcaactgcccctgtgaagaacttgggtggtgggctacccgtgagaccacacgggaagggtgcattgggaactcgacgtgactacagcggtgcatccactaatgagactatggtggcttatacaaccctgaagctgcctgctgaaaggtccggattggctccattcatgcacaagacagccactgccgggctaaagccgcaggtgagggactcaggcatgcagactggcgacccatgctgtccttacccttgctgacaccttggtctgtgggactgttg

SEQ ID NO: 100015 - DNA, 258 bp, Glycine max
  Clone ID: PAT_MRT3847_61329C.1
ccacggaaaaaattttcggaggaatttctataaataagttaacagggggaatatccatccttttttaggtccctaagttaaaaacaaaattctcctctgcggcttttttaaacttttttttttcccaattccacaatggggggccttttttggcgggccaggggattatcattgcccgggctggccccacccatagggcaatccttcactcccgggaaattccactcccccaggggcaattctttttctatcctttgg

SEQ ID NO: 100016 - DNA, 140 bp, Glycine max
  unsure (1)..(140): unsure at all n locations
  Clone ID: PAT_MRT3847_6132C.1
tcgcgataaacacaacgtttaggacgcatttgatcaggnannnntatatagtttggaatagannagggagaactggcctagaaaaaaaaaacagatgcagtctaacaaaggaaagagcccaagaaggaccgacccagaac

SEQ ID NO: 100017 - DNA, 129 bp, Glycine max
  Clone ID: PAT_MRT3847_61330C.1
tctagtaataacgacatcaaggtgagccagttcttattataaattcgattaccttacaatatttaaccaaatcaatacactcgaacacaaacgggctattaattagttttgctcaacgacaatctgacg

SEQ ID NO: 100018 - DNA, 531 bp, Glycine max
  Clone ID: PAT_MRT3847_61331C.1
gttttgatgaaccaccttggccttctctatctgatgaggcaaaggattttgttaagagacttctaaataaagatccaaggaaaagaatgactgcagcacaagcattaggtcatccatggattaaaaattataaggatgtaaaagtacccttggatattctagtgttcaagctcatgaagacatacatgcgctcctcttctctacgaaaagaagctttaagggctttgtctaagacattagctattgaagagctgcaatatttgaaggagcagtttgcacttttagagccaaacaaaactaacactattagctaggaaaatatcaaaacggccttgatgaataatgcaacagatgctatgaacgaatcacgcattcctgattttcttgcatcacttaatgcattgcgatataaaacgatggcttttgatgagtactgtgcaactgcacttaatgttcatcaacttgaatcactctggcggagggagcaacatgcacgctgtgtctatgaactacttgaaaacgatggaaata

SEQ ID NO: 100019 - DNA, 340 bp, Glycine max
  Clone ID: PAT_MRT3847_61332C.1
ttttccctgccgtttgacacacccattgcttgggtactttccagggaatgttcgaaagctatcctttttcagcgatcattttacattgagaggaagaacgcctcaaccttcagtcgaaagagcaaggacctgactgagtgcacgagcatgtgtggaggtgccattatctgcgacttaattccaacgaatcccgccggcggggcgcagcgcgtgccctgctacatcctgtggccgaatttgacgaagcggaactcgaagttcacgttaccctatgactcctaggcagggttcaaacaataccaggatgactcaaaaaactaagatgttcctgactgaggac

SEQ ID NO: 100020 - DNA, 404 bp, Glycine max
  Clone ID: PAT_MRT3847_61333C.1
aatcagagatcattttcatcaaattgttcaaaactcaaagcatcgatttgatgccatttgcgctcctgcttgtcgtagacattccccaatcagtcaccgtcctcccgatccaccagtctgaatggaagaaggtaagaggaagttgacgatgaagagaaagagagagagcacaggtggtggaaaagacagactgagtgagttgcctgactctgtattggtccacataatggaattgatggagacaagaaatgcagttcagacttgtgtactctctcagcgttggaagaacctttggagacgtatgactcgtctctctttcaaccaccctagaacattttccagatatcacaattttgtgtctcatgttctttctggacgagaccattctgtttccctaattgatc

SEQ ID NO: 100021 - DNA, 416 bp, Glycine max
  Clone ID: PAT_MRT3847_61334C.1
attgaaaaatccccccccgttttttttttgatttttatacaagggggggttgggggagaaaaattccttgaaaaggggggccttacccggaaaaatttttttttaaaaaactaattggttgggggggccttttgtttttttaggcctgtttttaaaggattcaggggtgcttttgggcaaaaaaaaagggtgggagccccccaaagttggggggcccttttgggctgcctttaaagaaaccagtttggggggaaaaacccttttttttttttttcccaaaatttaaaaaagggaactttttaaaaaaaggggtttttttgggaaaaggggggggaaaaattttttgggctttggttgggcccccgggaattttcccttgcccaacgggaaacccgcttttcccatacccaaaaccc

SEQ ID NO: 100022 - DNA, 1683 bp, Glycine max
  Clone ID: PAT_MRT3847_61335C.1
aattcggatggcggctcgagcttggatggagtacttacttcatttctaaagcaactcacaaatggaccaggagaaaagatctatctcaccccaacagtcagaaaggtggcactaggaatgtaggatcgggaaatttaaagatgtccttttcctcaacctctggacaactcaaaaggatgtatgattccaaaactggagttgatttacctattcagcaaagctacctttggtatggatctagtgagggcgatagtgatcctcaggcttctggtgcatatatattccggcctaatggatcgcctccaaatatcgtttcaagatcagtgcctaccaaggtaattcgtggaccactagtagatgaagttcatcagaaatttagctcttggatttaccaggttactaggctttacaaagacaaagaccatgcagaaatcgaattcactattggtccaattcctactgatgatggagttggaaaagaggtgatcacacgaatgacagcaaatatggccacaaacaaggagttttatacggattccaatggaagagattttctaaaacgagttcgagatgttaagcttggccccatggaaatacgaactttccttttgacattttaaaattagtcaaatcatcattgatgatattatttgaatgagaaataagagttctcagtgttagttgatcgtgccactggtggagccagcatcaaagatggtgaggtggaattgatgcttcacaggcgtattctccatgatgatagtcgaggagttggggaaccacttgatgaacaagtttgcgtgaacaataataatacttgcgaaggactaacagtcagaggaaattattatatcagcatccacaagcttggagttggttcacgctggcgtcgtacaactggtcaggaaatttattctccattcttagtggcttttacacatgagatctcggaaaattggaagtcctctcatttgacgaaaggaactatcatggatccaaattacagcttgcctcccaatattgctttgataactcttgaggagttggatggtggaattgtgcttctccgtttggcacatctatatgaacgaagtgaagatgctgagtattcgactctaacgaaagttgaactaaagaagttgtttgccatgaaaacgataagggagttgaaggaggtaagtttgtcatcaaaccaagagaaatcagaaatgaagaggatgacatggaaggttgaaggggacaaaggacaagaacctcaggcagttaggggtggccctgtcagctatcacaatttggttgttgagcttggccccatggaaatacgaactttccttttgaaattttaaaatagctcaaataatcattgatgattttatttgaaggaataaacatgtttgatcacatgacttttacccttgtaaaaattggtagagggagaccaagaacgattttgaaggaaaacatgaaaagaaatgagtaaagatcctatccaatgactagaaataatatatttaagactttggttcttaaccaaatctaacgacatcaggtaacagtgtaaccgactccatctaagattgttgttgttatattgtcagataaacatgtttgatgtttccaaaaaaaaaaaaaaaaaaaaaaaaaggaaaaaaaccgactaaagaactcgtcgccccgggaatt

SEQ ID NO: 100023 - DNA, 526 bp, Glycine max
  unsure (1)..(526): unsure at all n locations
  Clone ID: PAT_MRT3847_61336C.1
gttgtttgccatgaaaacgataaaggagttgaaggaggtaagtttgtcatctaaccaagagaagtcagaaatgaagaggatgacatggaaggttgaaggggacaaaggacaagaacctctggcaattaggggtggccctgtcagctatcacaatttggttgttgagcttggccccatggaaatacgaactttccttttgaaattttaaaatgggtcaaatcatcattgatgattttatttgaaggaaaaataaacatgtttgatcacatgatttttacccttgtaaaaaatggtagagggagaccaagaatgattttgggggaaaacattaaaagaaatgagtaaagatcctctccaatgacgggaaataatatttttgagaatttggttcttaaccaaatctaactcagataataatgtaaccatcccgtctaatgaaataagattattgttgttgtcatattgttatcgtcaaataaacatgtttgatgtttcacaaagacngggctgatgatacaacattcct

SEQ ID NO: 100024 - DNA, 536 bp, Glycine max
  unsure (1)..(536): unsure at all n locations
  Clone ID: PAT_MRT3847_61337C.1
ggcgcggggactaagtttccgcgtggcggaggttaaggacttcaagatccgnctgcagggcgcgccgaagggaagaaaaggaaggctggcggtcacggctaaggtgttcgaggtggcgccgaaggtcgccgttgttgagttttcgaagtccgccggcgacacgttggaatacgcgaagttctgtgaggagaacgtgaggcccgcggtgaaggacaggggatgccacgtgtgctgctaacgttcccgcctgtcacggtgaggagtgtcataagcaggttgttgttgttagtactatataaattaattaattataattagcgtgacagtccacggagagggttctagaaacggtaatgttctaacgacttttctttcttttgctttgggtttgtcgctttcgtctttattccctgcctgattttttggaaagatagggttttgcaccttttgaaggtgaggctgtacataaactgcaattaaatatattgtgctgctgctacattcggaatggaaattatttctgtgacactagtaaa

SEQ ID NO: 100025 - DNA, 204 bp, Glycine max
  unsure (1)..(204): unsure at all n locations
  Clone ID: PAT_MRT3847_61338C.1
tnnnggggntttctttgattttttttctttttttcccctttttattcaaggggcttccttgtccttttcgcagggcacacaccaataaaataattggtcctggtttacatgactttacaacgattttttttttcgggaattgatttacccccatcctaaagatcaagtccgggttaatgcattccattcttctaaaggtaattt

SEQ ID NO: 100026 - DNA, 647 bp, Glycine max
  Clone ID: PAT_MRT3847_61339C.1
aaacaaccaaatcttatccatcacaagatcaaggtcctatgaatgttctgccaacccctcatctgatcttaactacccttcgtttatagttttgtatagtaacaaaacaagatcaacagtccgagagtttaggaggatcgtgaccaatgttggagatggtgctgctacttacaaagtcaaggtgacacaacccaagggctctgttgtcaaggtgtcacctgagacattggcatttggctataagaatgagaagcagagctactctgttactgtaaagtacacaagaaacaagaaagaaaacatctcatttggggacattgtttgggtcgaagatggtggtgcacgcacggttagaagccccattgtagtggcacccaatgaacttgcatgagttcaagtttgttcattcttctagtggccatcacatcctctccctcaacggtatagaccatatattatattatacagttgttgtataatgttgtttgacaaggatttgaagaacaactctgaataaggacaaaaactttggtatcggtgaattaattttgttgttttaggcatcaaacatgtgttttaaactttgtcgtctccacctacaaggaaatcttttccaaatcacatctagataaccattttagaatgga

SEQ ID NO: 100027 - DNA, 376 bp, Glycine max
  Clone ID: PAT_MRT3847_6133C.1
ggctcgagggcggagctgcccgatgggtataaacatattaatgcctggaggatgtgaaactgacacggatctccttagtgacggtgatcgaaccgggaaaagcgtaccatgagaacgctctgtcctgcgagttcgaaatgtagtctggagaagctttgtaagcgctggaccacacccaagtggtgtgggaggtcgcgccgtacagggtgagagaccagttgtgctcggaccttgtcgtatcactaggggctgcaagcgactcgagttgtttgtgattgcagtcccaataagccgttcaattacagacaaggctgaatactgacgagagaccggtcgcgaacaagtgccgcgagggcaaagatgaaaaggactctta

SEQ ID NO: 100028 - DNA, 236 bp, Glycine max
  Clone ID: PAT_MRT3847_61340C.1
gccacgcgagcgaacacattcacgatcagattctctattaactgaataaagtgatggttgcatgaccagtaaggagactcatttccgatttgtggaacctcacgctcacctgttgcagcttcaacatcagcatcaactgaagcgtctttaacctcattgatgaagcgacattgtctaagaaaagtcgcgtactcggtgaggagttgtcagacggcgcagtggatccagtccgcaac

SEQ ID NO: 100029 - DNA, 262 bp, Glycine max
  unsure (1)..(262): unsure at all n locations
  Clone ID: PAT_MRT3847_61341C.1
cttcttctctctttttcagttgcaacatgagatgatgacagagancncaaacctaagcacagacctcatagagntgatcctgtccctcctcccaatccccatccnaatcagagnctccacagtgtgcaagcnanggcantccataatctcctcatctnccttctccagcnnctccaannanctcaancaaccatggttcttcctccatggcatccacaacatctcctnnangaacaaccaatcctttgcntttgaccctgcc

SEQ ID NO: 100030 - DNA, 531 bp, Glycine max
  Clone ID: PAT_MRT3847_61342C.1
ccacgcgtccgtgttcctccactagctaagctagtcgctactcccaatctcagagcgcgccgccggtctccaccgcggccaagaacagtgctactagccaagaaagctggggaacaggctgcttcctgggacgaggagcaggacgacaagggatctggagccggagcccccgatggcggtgacgggaacctcggtggcagccgcggcgacgatgctggcggcggcggcggccatcttcatcaccttcgtcatctgcttctacctcttcctgtgcgcgaagcggtaccgcggggccgccccgaccatcggcggcgacagggcccggccccgcttcgtgttcgcgggcggcgcggggtgccacggcggcctcgacgaggccgccatcgcggcgctgccgagggaggaggcggcggcggcgggcggggactgcgccgtgtgcatcggcgagctggccgcgggggaggccgcgcgggtgctgccccgctgcggccacgcgttccacgtggagtgcgtcgacatgtggctgcgctc

SEQ ID NO: 100031 - DNA, 560 bp, Glycine max
  unsure (1)..(560): unsure at all n locations
  Clone ID: PAT_MRT3847_61343C.1
cgaaactatatctgatctcattacgaaannccnnnnnnnnnnnnttnnnnnnnnnnnnnnncnnnnnnnnnnnnnnnnnnnnnnnnnttntnnnnnnnnnnnnnnnnnnnnnnnttttnnnnttttttntnttnnnttttnttnntttttttttgtgtttttggtggttttttttttttttttattatttttttttattttttttttnttttttgtttttttttttaattcaaatttttttaataccaaaggatattaacccttgttgtttaaaggtcaatctattcacccatgtgcccaaaatcttcccttgttcactaaaccaaaaactaattaaccccatcttttaataatcaatccccccccccaattggatcgggggcaaacccctacaaaaaaatcccttgcatattaaaaaccagtcgctccaatatgtgccatcggtgataaatccctcccccaaaaatcacgtttttcccaacaaaaactataaacgattcaacttattattctgactttatccaatatatgttggaaaaattttaatagagcttcaaata

SEQ ID NO: 100032 - DNA, 215 bp, Glycine max
  Clone ID: PAT_MRT3847_61344C.1
acaagcacttgcccataaactttatatgccccttatcggtgggaatgctgttgtaactagttcgtacaaaaccaatactaaattcatttgcgtgctgatcacacactaaacagggcgtacgaatgggattaatttgaggacagaatgagtgattgccttattttctaacaaaaaggatgttcataaagcttatcgcctatagggcgcgacactta

SEQ ID NO: 100033 - DNA, 243 bp, Glycine max
  Clone ID: PAT_MRT3847_61345C.1
ccgagagcaagctctacgccatcttggacgatcattacaggatgatgtttggtgttgagcctgaggagacttatgatgaacgcccacagcagaacaggcctgtgagctggcatccctcttcaacacagttccaggcatcgcaggcaccttcctacttcgagtctcagcaagattggtcttccgcatctccacaacagtcggtgccaggatcagatttctactctctttctacacgcaattcga

SEQ ID NO: 100034 - DNA, 382 bp, Glycine max
  Clone ID: PAT_MRT3847_61346C.1
aaaatgtgtattgggttttttactagtaatagttacattggacctctattttctgctaccttatactttactcttcgaccaccttctcgattccttttctgttttctgtcactgtttgtgataggtggaaaacatgttgcatttaattattcatttattagagttggagtggtgaagatagaaagatgcttctgaaattctgatctcaataaggcccttaagtaaaaaaatactactactactactgtcgtcacagatctgaatctgatcccgtctggtattttagttgcatctaataaatgaggatacccaaaaggttgatttaataaatgttcaccaacttaacataaggttaattaattattcatttattgagaattat

SEQ ID NO: 100035 - DNA, 110 bp, Glycine max
  Clone ID: PAT_MRT3847_61347C.1
tggaaaacccttaccctagtgttgagcccactctatgctggctaccaaacagaccctaatacacacatgttagccactgcagtgctgcagaaagcagctcacatgggtgc

SEQ ID NO: 100036 - DNA, 1048 bp, Glycine max
  unsure (1)..(1048): unsure at all n locations
  Clone ID: PAT_MRT3847_61348C.1
aaagctcggaattcggctcgagggaatccacgacgaaacttatctctcacaccgccggaaacttcgccggagtcttttgccatggcaaggcctccgctattctaccaatcgccccgccaattcttcccttctttgccgaacctctctttcgatctcgccacggtgtcttcttcgaagctctcggttctcttctctccttgctccactccggagcacgagatgcttaccgccagtttttcgtcgattccatgtcgctcattcaagatattctatacgtgtcttcactcagtgttaatggatcctccaggtccagggtgacgctcaagtgtttttccgattccttctctggagttgaagaccttccatccaccaacaggcccgtcgatggacgtggtttattgattgacctcaccgccccaaccagatggcaaccctttgcaacttggattttgaagcttgtctgtaaaagtctaactgaaggaacactctatgttgagggattgatccgtgcgtcctttatttctgctgcgtgttctcttttatgctatgggaatgctgacctgcatatggcgtgctttgactttgtacatatcattgggatggtcacaaactatgatgccattagctactatcttgaatttggacaaggggggcttcctgttttcaggtttgattatgtttgcttttttctgaaaataaattattcatataattgggctttaatagtaaactatggctattcttgtttaaaagctgatttagtcagtgtattcctttaatcgatgcggagaaccaaaagccagcaagttaaggtacttaaagaaagataatgagaaggttaagaaatttcttcccatatctcttggtctattgtcatgtctttatggatttagaagatctgtatctgattcacatatnaatgaatgcaaattatttgtaaatgtgaaaaatggaagaacatgttggacagnagattgtttattgcaaagnttctgctgttcaaaatgcaatagcaattttatttgcaatctcgatgagcagcaaattc

SEQ ID NO: 100037 - DNA, 736 bp, Glycine max
  unsure (1)..(736): unsure at all n locations
  Clone ID: PAT_MRT3847_61349C.1
agttatctcaagttcgaatctttggaaaaatttctaaactcggacagatattttcacttgagtgaaccgtttgagaaataaaattacggtatctgagaaatcacagagctatggttgcagttctacttctcaatccttatgggaatgaagggtttgcgaagccttgaggtctggaaactaggagttgtcaactctttggatgcattgaaactgcaggaaaaactggccttggatagaaaacttcataggagatgtgatactattcttctgtctttgcaacacccccctacatacactgttggcaaaaggcaaactgttcacaatttgttaatcccccaatccgagtttgttacatggaggaatttatgatggcatggcgctgatgtgaaagccaagagttgggctaattctttccctgaggatgcaacttgggagttcctgtatgatttgcaattacgttttccagattttcaaccttgaggacaaggttgtttttgagggggaccatatgttacatggaggaatttatgatggcatggtgctgacgtgaaagccaagttgacaattctgttatttctgttattcagttgtttgaaggttgttaagaatcagtttcattaattagcaaattgtatatgatttctctaaattgagcaagtataaaagctcaattctactgtgtaatcaaggatccaattttcataaatacaattgttactgattcacccccnnnnaa

SEQ ID NO: 100038 - DNA, 576 bp, Glycine max
  Clone ID: PAT_MRT3847_6134C.1
ctcatacctcttaaccccaccattcctcattcgcctcttcgttcaaataatgcggggtcaccaaacggattgtgttgttgcgacaatctcaatcgtgcctgtaaggtaaataatgcgctaagtgatggtgaagaccggagatacagcgattatggcagacgtcaaagaggagcagggaaacatggctctgtcaaatcctctggaagagagaatcttcgtttccatcagagtaagacctttgaacgatagagaaaaagccaggcacgatgttcccgattgggaatgcatttctggcaacaccatcagatacaagaacaacggccatgcggaaccgcgaccactctcaatggatacctacgcctttgatagggtgtttggggaaaggtgcaatacaaagcaggtttatgaacaagggattaaggaagttgccctttcagtagttaggggtattaactctagcatttttgcttacgggcaaacaagcagtggaaagacacacaccatgtctggcattactgaatatgctgtgagggatatctatgaataatagagaagcacaaagacagagaatttgtt

SEQ ID NO: 100039 - DNA, 326 bp, Glycine max
  Clone ID: PAT_MRT3847_61350C.1
caccgcacatacttgccctatagttggctttttgggtgtgcatggttttaaaagatggctgaagctggggaccttcaaccttttgctggtgataacggaactggcatgacccaggctgattttgcacgtgattatgctcctaggccaagttccccatcctccttgggagaccacgcctactagtgtatggtgggatgggcaaaggatgccacgtggtgaatgcagcccacttgtaatggggtatgctcaccttgaagtctcctatagagcatggcatagtcagctaccgggacgctattgagaagatgtggcatcacacatcatac

SEQ ID NO: 100040 - DNA, 597 bp, Glycine max
  Clone ID: PAT_MRT3847_61351C.1
tcgagagcacggctgcgagaagacgacagaagggggggacccctttattgctttgtgcatcttcatctccttcttcgatcatcggtgatctttttctttgtttaaagcgagtttcgaccgattgttcataccgtaatctcgtttaatcaccattaaaataaaattcaacagattgtttctattgtaatctcacttaatcactgtttaaatgaatttcaaccgatcgtttgtgctgtaatctcatttaatcactgtttaaataagttttgatcgattgtttgtgtcgtaaacttttttcatcaatgtaaaataagtgttaaacgatcattaatgccacaagttattttaaaaaagggattgaagattagtgagccaaaaccaaataaaaccaactcataaacttcttcatttcataaaaaaaaatcaagagattgttcaaaggttcaacaccttaatgattctctcctttaaaaaataaagaggtcgtttcaagggccaacgccttaacgtttctctcctttcaaaaatcaagaggtcgtttaaaggtccaacacccttaacgtttctccgccttttaaagttgagaaagatcttttc

SEQ ID NO: 100041 - DNA, 167 bp, Glycine max
  Clone ID: PAT_MRT3847_61352C.1
ttaccagctcactagcctactggcgggctgtcgtcctttttttaaaaaaactattttatagtttcacccttgaataaagaattgggttttacttgtcttaaaatagctatgctctgaatgggaaaacagaaatccccatcagggatatttaaacgaaagtcttacac

SEQ ID NO: 100042 - DNA, 881 bp, Glycine max
  Clone ID: PAT_MRT3847_61353C.1
ccaacgcgtccgggggctttgatttcggttccgaagcgaccgccaacgaccaccctctcttctgactcacttctcgaaccttccaaacatggaacgcatcgttggcggcaagtacaagctcggccgcaagatcggaagtggatccttcggcgaaatctacctcgcgacgcatattgataccttcgagatcgtcgccgtcaagatcgagaatagtaaaacaaaacatccacaactgctttacgaggcaaagctatacaatattcttcaaggaggaagtggcattccgaacataaaatggtccggcatagacggggaggataatgtgcttgttattgatttgcttgggccgagtcttgaggatctctttgtgtattgtggaaggaagttttcattgaagactgtattaatgttggctgatcaaatgatcactagaatagaatatgtgcattctaaaggatttttacacagggatattaaacctgataactttctcatgggacttggtcgaaaggcaaaccaggtttacataattgattttgggcttgcaaaacgatatcgggattccactactaatcgccacatcccttacagggagaacaaaaacttaacagggactgcacgctatgctagttgcaatactcatcttgggattgagcaaagtcgacgggatgatttggagtcacttgggtatgtgcttttgtacttccttagaggaagccttccttggcaaaacctaaaggctgcaacaaagaagcaaaagtatgataaaatatgtgagaagaaagtatcaactcctattgaggtattatgcaaatctcatcctgtagagtttgcttcatactttcattactgtcacttctgacctttgatcagagaccgga

SEQ ID NO: 100043 - DNA, 800 bp, Glycine max
  Clone ID: PAT_MRT3847_61354C.1
ctcgagccgattcggctcgagctttgatttcgcttccgaagcgacaagcagcacccactctctcttctcggaccttccaaacatggaacgcatcgttggcggcaagtacaagctcgggcgcaagatcggaagcggatccttcggcgaaatctacctcgccactcatattgataccttcgagatcgtcgccgtcaagattgaaaacggtaaaacgaagcatccgcaattgctttatgaggccaagctctacaatattcttcaaggaggaagtggaatcccgagcataaaatggtgtggtgtagacggggaggataatgtgcttgttatggacttgctgggacctagtcttgaggatctttttgtctactgtggaagaaagttctctctcaaatccgtgttgatgttggccgatcaaatgatgactagaatagaatatgtgcattctaaaggattcctacacagggatataaaacctgacaactttctcatgggacttggtcggaaggcaaaccaggtttatataattgattttgggcttgcaaaacgatatagggactccacaactaatcgtcacatcccttacagggagaacaaaaacttaacagggactgcacgctatgctagttgcaatactcatcttgggattgagcaaagtcgacgggatgatttggagtcacttgggtatgtgcttctgtacttccttagaggaaggccttccttggcaaaacctaaaggctgcaacaaagaagcaaaagtatgacaaaatatgtgagaagaaagtatcaactcctattgaggta

SEQ ID NO: 100044 - DNA, 836 bp, Glycine max
  unsure (1)..(836): unsure at all n locations
  Clone ID: PAT_MRT3847_61355C.1
ggctcgaggttattattatagcaggcagctaatacatagatagatctaaaggtagggatagggttaaggccatggagcgcatcatctgcgccaagtacaagctaggtcgcaagatcggaagcggatccttcggcgaaatctacctcgcgacgaatattgataccttcgagatcgtcgccgtcaagatcgagaacggctgtgaagaaagttctccctaaatctgaaaacgaagcatccacaattgctttacgaggccaagctctacaatattcttcaaggaggaagtggcatcccgaacataaaatggtgcggcgtagacggggaggataatgtgcttgttatggacttgctgggacctagtcttgaggatctttttgtctactgtggaagaaagttctccctcaaatctgtgttaatgttggccgatcaaatgatgactagaatagaatatgtgcattctaaaggattcctacacagggatataaaacctgacaactttctcatgggacttggtcggaaggcaaatcaggtttatataattgattttgggcttgcaaaacgatatagggactcctcaactaatcgccacatcccttacagggagaacaaaaacttaacagggactgcacgctatgctagttgcaatactcatcttgggattgagcaaagtcgacgggatgattttggagtcacttgggtatgtgctttttgtacttccttagaggaagccttccttggcaaaacctaaaggctgcaancaagaagcaaaagtatgataaaatatgtgagaaagaaagtatcaactctaattggaggtattatgcaaatctcatctg

SEQ ID NO: 100045 - DNA, 395 bp, Glycine max
  Clone ID: PAT_MRT3847_61356C.1
aattcccaaaattcacagacaccaaccaaccatgttcactcaaattcttagatagttacttagttagctctttccgccatggaaggtaacaaggacgaagcattacgctgcgttcgcatcgccgaagaagccatcgcgtcgagaaacaaagaccgcgccctcaaattcctcaaaatcgcgcaacgtctcaaccgcgatttgcccctccaatccctgctcgacaagtgcaaccgcctcgattctcacaccgcctccaccgcaggcggcagcggcgcctctctggcgaacggccactctcctcgtcgcgagggcttagacgtggaaagaaattacacggacgtgcacttaattagggaaatcaaaggaaagagcgattattacgcgattctaggatt

SEQ ID NO: 100046 - DNA, 206 bp, Glycine max
  Clone ID: PAT_MRT3847_61357C.1
aaaaaacaatatttttaggcttattgggttgcggttatcaaagatcgaaaggatcaaattaccatgaaagctgattactcattacccaaacagccctacacaaagccttatcgaaagcaatgacaaattcaagccttaaccttcagccccatggcatagagatcctactaaaaacagaaacaagaagctcctatgctaccacaaat

SEQ ID NO: 100047 - DNA, 741 bp, Glycine max
  Clone ID: PAT_MRT3847_61358C.1
cgcgagctaaaatccgttaaagcagatttggcttttgctaaagcaaggtgtgctcaacttgaggaagagaacaaagtactccgggaccgagagggcagcgataagggacagaaccgtgaagatgatgatctgataaggcatcaattggagacacttctagctgagaaggctcgtctggcaagcgagaatgagaaatattctcgggaaaaccgtttcttgagggaaattgtggagtaccatcagctgactatgcaggatgtggtgtatatagatgagggcatggaagaagtcaatgaagtttaccctgtggatgacagtaggatcacacggttactatctgtctctccacactcatctgatgaggatgttctggtctcaccaagtccacctatgctgtcaaaagaaatatttactgtgccggaagaagatagtaagagcatatcaaaagatggggctccttctactgtctcagtttctccacatacaaaatgatctcttttctttcttttttcttttcttttcttttcatggtttagccttagattaggttctcttgttttgaggaaaatgtgtatgcatgcttttggaacgtttatttatttattctaccttgttgcaatgtgaggaagagagtgaggtatatgaagagaaagccatatatgttttgttttgtgtgtgactttcctttcatggtaaggttggtttgccaaaagaaaaaaaaatgtattgattgatcataaa

SEQ ID NO: 100048 - DNA, 366 bp, Glycine max
  Clone ID: PAT_MRT3847_61359C.1
aacgggggcaaacaacttttttggtttgtaaatgattgggggaaacccccccctaaaaacttttttttttgggggccgggggccctttgtatatgcaaaaaaaattctttgcccccccatgatctaggggaagggaaaatcctacttgattaaagggggggaaaaaaaatttgggcagggaagggaacaaacaagggggcccaatttgtttcccccaagggaaaaaaaaaaaacattttaagtttcttttttgttttggggcatgacatcttggaaaaggggggggacattggagggaaaaaacccacctttttaaacagtttttttagccatttttgaaagcccattaaccctttccctaatttt

SEQ ID NO: 100049 - DNA, 743 bp, Glycine max
  Clone ID: PAT_MRT3847_6135C.1
acgagtaaaggttcaagaattatgcattattagttctcatgcttgatatatatatatatatatatatatatatatatatatatatatatatatatatatatatatataaatacaagcctacaattcacatctttgttatccttgtcttcaagtaaatcggcatcttctcgagtatattttctaatataataaaagctgcaggtggatatcttctcatgaactatagtatatgctgctgagttacatttcggccctgctattaagcttatataggcgtctatatcagaataatgcaggttcattctttcatttgtcatgtgccttcattctcgtccatctatcataatgttgccttatgtttcgcttccttttgtaatggttctgtctgatggatttcgttccctttgttatctgcccttgctttacaattcaaagtaatcaaaggagaaaaatgtttggttgttttattaagcaatatatcatctttgatactgttcagttgcttcatgtgatcattgcttgtaatttttttttccaaagtgggacatgtctggttgctttctgtggcaactggacgctatctaagtcgctcgagggccctccaaaactcccaaccttcctggatgctgttccgcggccccgtgtgtgcttggcttgtcaatcctccaagatcaacatcaactctggaaattctgtattaacgattaacattttcttcccttataatggagggttattaggta

SEQ ID NO: 100050 - DNA, 902 bp, Glycine max
  unsure (1)..(902): unsure at all n locations
  Clone ID: PAT_MRT3847_61360C.1
tgttaggattagggattctctcaaatcgccctctacaattttaaatccgaacttctctacgatacataccccctccccaataaaaaccgatgcgagaaccaataaaggtagggatcaaggttgaaaatactatggcatgggaatgaaatgaacatggatatatctgtggagcagaacgaaacaacctggtgccgaagaccctcgagccgattcggctcgagcgaacccagactacttcgacaacataggtgctggtacctactcgccatcttgcaagagcttcaggtgtaatcttgcatcttcgttggtcactctctctcctctatggtgggcctcctcgcttccatctctcaccctcatctcttcaccaaactcatcctcgtctctgcttctcaaaggtttttgaatgattcataatactttggagggttccagcaagaagatctgacccaactctacgacggaatccgatcgaactacaaaacatggtgttcggggttcgctccgcaggtgatcggcgcgacatggactcggtagcggtgcaggaattcagccgaaccctcttcaacatgaggccagacatagccctgagtttggcgcagaccatattccagttggacatgaggccaatcctatcccacctgaccgtgccgtgccacatcattcagaacaccaagtgtgtttgaaaattacattttaatgataaaatgattcaacaaaatttaacaatataacatagttgtcacacttttttcatacttaagaactaaattagaatnttggttcttttagctatgactaaattattactagnttatttaaaaaaaaaaatgtattagtttatacatttaaggaccaaatggtaatttatcaaaaagtgtacaaactatgccccaattact

SEQ ID NO: 100051 - DNA, 968 bp, Glycine max
  Clone ID: PAT_MRT3847_61361C.1
ttcgaaaattcctgaaaatctaattaattgcaaatttttataagaaaaaaaaaaaaaaaaaaaaaaaaaaaaaaaattggacacattcttcagcgactgcgtttttggatcggaacctcttctgcggcgtagcaatgggacactccaacgtttggaattctcacccaaaaaactacggtcctggttctcgcacttgccgagtgtgtgggaatccacatggattgatcaggaagtatggccttatgtgctgcaggcagtgcttccgtagcaatgccaaggaaattggcttcatcaagtatcgctaaaagagctgttgtcacctacggaccaatattatgttctggcactaggatgttttgaagatgttatgtttgaagaaacttgagacttgtttttttcatctattttattatcagacataatgtgtggaacgaagaatacttttatataaattgtcttgcgcacggctgcgaaaaaaaaaaaaaagggggggttattggacacattcttcagcgactgcgtttttggatcggaacctcttctgcggcgtagcaatgggacactccaacgtttggaactctcacccaaaaaactacggtcctggttctcgcacttgccgtgtgtgtgggaatccacatggactgatcaggaagtatggccttatgtgctgcaggcagtgcttccgtagcaatgccaaggaaattggcttcatcaagtatcgctaaaagagcagttgtcaactacggaccaatattgtgttctggcactaggatgttttgaggatgttatgtttgaagaaacttgagactttcttttttcatctaattaattatcagacgtaatttgtggtactaagaatacttttatataaattgttttgaaccatattaaattcccgtctgatcctttaacaattctgcagtgcatgcgtatcatacaggtacatgcttgtgcaatcttgcattcgc

SEQ ID NO: 100052 - DNA, 611 bp, Glycine max
  Clone ID: PAT_MRT3847_61362C.1
ccggggctcctacagattcttcagcaactgcgattggcgatcggaacctcttctgcggcgtagcaatgggacactccaacgtttggaattctcacccaaaaaactacggtcctggttctcgcacttgccgagtgtgtgggaatccacatggattgatcaggaagtatggccttatgtgctgcaggcagtgcttccgtagcaatgccaaggaaattggcttcatcaagtatcgctaaaagagctgttgtcacctacggaccaatattatgttctggcactaggatgttttgaagatgttatgtttgaagaaacttgagacttgtttttttcatctattttattatcagacataatgtgtggaacgaataatacttttatataaattgttttgcactattggcctctctgtttgatcctttaataattctgcattgcatgtgcatgcgtatcacacaggtgcaagcttatgctaacttgcattcgcattgtcgtttgcttttgtgggtgttgtacaaattagaatcatacgattttagtttaactgttactactgctcaaacaaaatttaagccgatggcaaaagctttttttcatcttgttattttaaggtt

SEQ ID NO: 100053 - DNA, 1290 bp, Glycine max
  Clone ID: PAT_MRT3847_61363C.1
tcggcaatgggtccaattccttcctatggtgcaggttcccacgttcttcttttcccgttcatgtccaaaggtcacaccgtaccccttatccacttggcccaaatcctcctccgtcgttccatatcggtcaccgtcgtcacaacccctgccaaccactcattcatggccgaatctctaaacggcaccgtcgcctccatcgtcacgcttccattccccaccgccacgaatatccccgccggagtggagagcacagacaagcttccctccatgggcttgcctctgttctacgagttcagcaccgccacgtcagccatgcagccccacttcgagcaactcctcgaaaccctagttccacgtgtcagcttcatggtcaccgacggcttcctctggtggacccttcactcggccaagaagttcagaatccccaggctggtctacttcggcatgagctgttacagcactagcctttgcatggaggccaggagttcgaaaattttgagtgggccccagcccgatcacgagttagtcgagttgactcggttcccatggatcagactctgcaaggaagactttgacttcgaatatagaaaccccgaccccaatactcctggatttgttttcaacatgaaaatcattgaatccacacgcgaaagttatggtattttggtcaatagcttctatgaacttgagcctacctttgttgattatgtgagcaaagaatgttctcccaaaagctggtgcgttggccctttatgtttggctgaatggacaagaaaaagtgtatgaaggaggtgatgagaaagagaaaccaaggtgggtgacgtggctggatcagaggcttgaagagaaaagttctgtattgtatgcggcgtttgggtcacaagcagaggatttcaagggagcaactggaggagatagcgaaggggttggaggaatcgaaggtgagtttcttgtgggtgataaggaaggaggagtgggggctaccagatgggtatgaagaaagagtgaaagacagagggatagtgataagagagtgggtggatcagagagagatactgatgcatgagagtgtggaagggttcctgagccactgtgggtggaactcggtgatggagagtgtcacagcaggggttccgatagtggggtggccaataatggcggagcagtttctgaatgcgagaatggtgcaggaggaggcgaaggcttggtcgatagttctcaactacctagctgctgatgagcttgagttggctgttaatgctgtacgtgacaacatgatgaacaggatta

SEQ ID NO: 100054 - DNA, 475 bp, Glycine max
  Clone ID: PAT_MRT3847_61364C.1
acaagacaccatttttttgtggagctattgacttgcatataattaataactattcatccatatctcaaaatactaaactaaaaatgtttacatgtatacatatacatggatgatggatgtataacaagaccatggcacatattctttataggaggggaatgcttctactgtgaacaggggtgagcattcgaccatcaccatgataaagacatgcgccattgcttgcattatttttcgaaaaaacatggcagggttagtcctaatttcatcaatggctaggctaatagacatgtttactaagctagagttgattaactctgagtacttaccggcctcgagaactaggaaaatgaagctcctataaaaaggtatcgacctgtttgagctaccatcaggggcaattgctattggagctgggccataccttaaggcggtgaactaaacattcagttttaaaaattagataattcccccc

SEQ ID NO: 100055 - DNA, 151 bp, Glycine max
  Clone ID: PAT_MRT3847_61365C.1
tggcatgagaaatgaagatggcggcttgctctcaaaagttattgacatacatgtaacactttggggcgacttgatttatgagaaagtgttttctattttaaaaaaaaaaaaaaaaaatataatttctgaaaaaaagatttatacctatttg

SEQ ID NO: 100056 - DNA, 213 bp, Glycine max
  unsure (1)..(213): unsure at all n locations
  Clone ID: PAT_MRT3847_61366C.1
tccggccgccgcggcgangggaagaagaagcaccacntcttcggctgatcgggctgctgctcgatcgatctacttgcgtacgtaggctgctccccaggaccagaaggagcatgcatggagggcgaacgaagtcacgggggtttgattgcccgtctatgtatatcatgtgtagttactgatgatgtgtgtcatggtacttcgtacgcgtgtttg

SEQ ID NO: 100057 - DNA, 779 bp, Glycine max
  Clone ID: PAT_MRT3847_61367C.1
cgggatggcacttaagagcattggttacagatcagtaccagttgatggcttaccttttgatcataagaaaggtgtagttccaaatgatagaggtcgagtgttgagtgaccctccggatccttcagttcttgaaaagggcttgtatgtatgtggatggctgaagagaggaccgactggaattattgccacaaacctctattgtgcagaagaaactgtttcgagcatatcagcagaccttgaaaaaggagggttgatttggtcatcaaccttgcccaaacctggcagggacggacttctccagcttctgcatgatagaaatgtcagagtagtttcattaagtgattgggaaaagatagactctgaagaaaggaggcttggaagttcaaggaacaaacctagggaaaaactagccagctgggatgaactatacaaaactacctcataatgaatcaattatttcacatgatacttcattattttagcttgataaacatcttatcgtacaccaagaacagtaaataatttatacacatttgttggggaagtcatcctctttatctgttgtaatgcccccactttattttgttacattattttttaaaagcagaaatccctttgaagagttcttttagttttaattttcagttctaatctttgtcgtcatgcatacctgcggacagaggcatgaatttttggattgatcacaaatcatgtatcaaagaacctgttgagcaatgataattgtcttgttgttgccttactgaaacgctcaattgttt

SEQ ID NO: 100058 - DNA, 713 bp, Glycine max
  Clone ID: PAT_MRT3847_61368C.1
attcaaaaatcgaaatcaatgaacctccgttgattcgatgaggcagctaaccgacgacgccctgatgatatcagaggttctgtagaaaagaacactctccacatgaaccgtcgtgtatgcatgcgatcacagggttccccgctatgggctgcatcgccgttggctacacggatgcgagagtccaacactattctcacctgcgttcgagacacctcacggatgactacaatcactcccacaacatgtcatcgacggcgagctcaccaaagccacacccatctgctgagcatgccccgacgacgtcgactcggagtcgaccaccagatatcatgtcaatcatcacttacttcttacagcgtagacaaatgtaatagcgacacacgtttgacaacaccagaatacctcaacttatgtgataaagatgcacagtgactatatctgactggcatcttgacatataaactgtgactattacgagctgcttgatgcctcatcacgtcacggatttgtcagactcatcatgtgaaatgcactgtacgtcacaggatcatgatatagtaaatgattgactcttctgactcttatgactatgattttcaccttcgtgccgagcgcctcatgcgggctccctacatgaaccgccgcactaatcaggttattaggggtcgtgatggcgtcaaacaccatgtccttacccacaaggaaggcgccga

SEQ ID NO: 100059 - DNA, 831 bp, Glycine max
  Clone ID: PAT_MRT3847_61369C.1
ggctcgagctttgattccaaagcaagttggaaacatgtacactgcgtctctttatgcagcatttgcctccctcattcacaacaaacatagcacattggcaggtaagagggtgatattattctcatacggaagtggcttaactgccacaatgttttctttgcaattacgagacagtcaacatccgtttagcttgtcaaacatggctagagtgatgaatgtcgatggaaaattgaagtcaagacatgagtttcccccggaggagtttgttgaaaacttgaagttaatggagcatagatatggtgcgaaggaatttgtgacaagcaaggacagtagccttttatctccgggcacattctatctcactgaagttgactccatgtatcggagattctattcaaagaaaactaaagaaagcagtttgactcacgctgagaacggtgtgattgctaatggcgtgtgctaatggccactgatgttgagcatgtacaatcagcagtcaacttcgcctagaatgagaagggtattgttatttgtgatagttctgtaggtaaattgtttctgggtgataagtattctcggttcaaatattttattgtactcttttaagatgtagctagttactcgagtccaaaatttatctttttctgtttttttttttttttttttttttgcattttagtgaatggaaattagtctttgaataaaaaaagaagttgcaatagctttttaaaaaaaaaaaaaaaaaaaaaaaaaaaaaaaaaaaaaaaaaaaactcaattaaagatcaaatttttaggattatttatccttggataaaccaagcccaacaca

SEQ ID NO: 100060 - DNA, 1040 bp, Glycine max
  Clone ID: PAT_MRT3847_6136C.1
aattcgcggcgaccccatttttgttggaagcagaagccatggaaaccaacacactcccaaaccagcagacaccaaaaaccaaaaggcaaatcttcatactctcaggtcaaagcaacatggccggtcgtggcggggttatcagggacgctaacaaccgtaagcggtgggacggcgtggttccgccggagagccgctccgatccatccatcctccgcctctccgccaccctccaatgggaacccgcgaacgagcccctccacgtcgacattgactccagaaaggcttgcggcgtgggccccggcatggtcttcgcgaacgcgctgctgcggcggcgcgtggtggtgggcgagctgggtctggtcccctgcgccgtgggcggcaccgccatgaaggagtgggcgcgtggggaggaactgtacgagaacatggtgaagagggccaaggaaagcgtgaaggagcgcgagaatagcagcgagatcaaagcggtgctgtggttccaaggtgaaagcgacgcgatcaacgaggaagacgctgcagcttacaaggtcaacatggagaccctcatccacaatgttcgtcaagacctcaatttgccatctcttcccatcattcaggttgcattagcctcagggtccgattacatagagaaagtgagagaagcacaaaaggcaattgatcttccaaacgtgatttgtgtggacgcgaagggattgcaattgatggaagataatcttcacttaaccaccgagtctcaaattcagttgggtcacaagctggctgaggcctatcttacccattttcatgcctgaactactgggaaattaagctccccaatttgaacccactttttccaagttcatttctggtttttaatgtaccgttagtgattctgttgccatgtgtgtgagctggtttctgcttgtatcaaataacttcttgtttgcaatgtgcaaacattattggctgtttagtataacttggttgagtcccgctgtgccgacagtggcagaataattgcaattctagatttcttccgtact

SEQ ID NO: 100061 - DNA, 280 bp, Glycine max
  Clone ID: PAT_MRT3847_61370C.1
ggtttatcgctctagcaactgccattcattccttgtccacttttcatgcatgcaggactctttctaaagaagaggaaagctccatgtgcacccagagaataagcaactcgctagaaggaatagatattggctcttgacgtaaggaatagaaggaaggttctttgcgagagtagttcatctcgggggaagagggaagtagtggcttctactcccatacgagcgcacattaatctaattgaaatccggtaagagaaggacttgacttgatcacgctgctcag

SEQ ID NO: 100062 - DNA, 271 bp, Glycine max
  Clone ID: PAT_MRT3847_61371C.1
caaatgattgattaatcagaagctatccatataatttttaaattggttattatagaaattaataaagttatatcacagtttgtgattagatagtaacattaacattttattctgtcaataataatgataatgactcttatgagtttttcaactttcggaaataacacatccttttaaagctgccgagaaatgagagctcaccggcaactggctagaatccaaaaaccgatccatatagttgacggcgaggtacgccgtcaaaggctgaaag

SEQ ID NO: 100063 - DNA, 1348 bp, Glycine max
  Clone ID: PAT_MRT3847_61372C.1
gttgttgatggaaagctttcacaaacttgttacctcatggctgttgattcttgctataagaatttctgtcacaagtttcagaaattccagggaaaacaattttctctttttgatgctgaatactttgtatttcactctccttataacaagcttgtacagaagagttttgctcggttgtttttcaatgacttcttgatgaattccagctctgcggatgaggttgccaaagaaaaactgggaccttttgcaactttatctggtgatgagagctaccaaagtcgggatcttgaaaaggcatcccagctacttgcaaagcctctatatgatcagaaggtacaaccaactactttgattccaaagcaagttggaaacatgtacactgcgtctctttatgcagcatttgcctccctcattcacaacaaacatagcacattggcaggtaagagggtgatattattctcatacggaagtggcttaactgccacaatgttttctttgcaattacgagacagtcaacatccgtttagcttgtcaaacatggctagagtgatgaatgtcgatggaaaattgaagtcaagacatgagtttcccccggaggagtttgttgaaaacttgaagttaatggagcatagatatggtgcgaaggaatttgtgacaagcaaggacagtagccttttatctccgggcacattctatctcactgaagttgactccatgtatcggagattctattcaaagaaaactaaagaaagcagtttgactcacgctgagaacggtgtgattgctaatggcgttgctaatggccactgatgttgagcatgtacaatcagcagtcaacttcgcctagaatgaggaagggtattgttatttgcgaagttctgttggtaaattgtttctggggtggcaagtgttatcgattcaaacattttattgtattcttttaagatgtagctagttactctagtctaagtcttgtacacacaaaaaaaaaaagttactcaagtctaaattttatctttttctgtgtattttttgcattttagtgaatggaaattagtctttgaataaaaaaaagttgcaataacttttattcaggtgggttatatgaatcacatgatggggttggactcaattaaaaatcaaatttttaggattatttatcatataatctcttttaatagttttctttagcgtcattcttggacttttttctatccttttttttacaggtacaagactttcttctatcagtatcttcacctgaatcgattctgtcgtccttttcttgacaagtgttatattaataatacatcattgtatatagttgttctgtaaaaaaaaaaaaaaa

SEQ ID NO: 100064 - DNA, 1514 bp, Glycine max
  Clone ID: PAT_MRT3847_61373C.1
gttctggtccggaattcccggctcgacccacgcgtccggacgtggtgtgtgtttgggttgggtcctgcttctacttgtacacctcaccactggctgtttcctttatatatatgctaaagttcccaacacttgccatgtgagtttctctgcactcgatcaaacacaaaatggaaaagaatgtggggattctcgccattgacatctacttccctcccgcttgcgttcagcaggaagcattggagactcatgatggtgccagtaaagggaagtataccattggacttggccaagactgcatgtcattctgtaccgaagtagaagatgtcatctcaatgagtttgacagtggttacttctcttcttgagaagtatgggattgatcctaaacaaatcggtcgtctggaagttggaagcgagaccgtgatagacaaaagcaaatccatcaagacattcctgatgcagatcttcgagaaatatggaaatactgacattgagggtgttgattcaactaatgcatgctatggaggaactgctgctctgtttaattgtgtcaattgggtggagagcaattcatgggatggacgctatggacttgttgtctgcactgacagtgcagtctatgctgaaggacctgctcgacctactggaggagctgctgctattgccatgctaattggtcctgatgctcccatttcttttgaaagcaaattgagaggaagtcatatgtctcatgtttatgatttttacaagcctaatcttgccagtgaatatccagttgttgatggaaagctttcacaaacttgttacctcatggctgttgattcttgctataagaatttctgtcacaagtatgagaaattcgagggaaaacaattttctctttctgatgctgaatactttgtatttcactctccttataacaagcttgtacagaagagttttgctcggttggttttcaatgacttcttaatgaattccagctctgtagatgaggttgccaaagaaaaactgggaccttttgcaactttatctggtgatgagagctaccaaagtcgggatcttgaaaaggcatcccagcaagtagcaaagcctctatatgatcagaaggtacaaccaactactctgattccaaagcaagttggaaacatgtacacggcgtctctttatgcagcatttgcctcccttattcacaacaaaaatagcacattggcaggtaagagggtgatattattctcatacggtagtggcttaactgccaccatgttttcgttgcaattacgagacagtcaacatccgtttagcttgtcaaacattgctagagtgatggatgtcgatggaaaattgaagtcaagacatgagtttcccccagaggagtttgttgaaaacctgaagctaatggagcatatatatagtaaaaaggaatttatgaccaacaaagacactagcgctttatctccgaacacattctacctcactaaagttaactccatatatcagagattctattcaaagaaa

SEQ ID NO: 100065 - DNA, 276 bp, Glycine max
  Clone ID: PAT_MRT3847_61374C.1
tgatcttaagttgagaagccattaacacaccaaagccacagcacttttcacggttcctgttagttgaggtggcagcgccatacagtactgattaacattctttcaattatatggataaaaactatagaaacagtgaagataaaatggatacataaagtcttcctgagatttggatagatgagtactggtgcccagagataccctgatttcttcaaagtcttcctcccagagaggcactctgagagaatgcttataccaaatgcttttgtgaggttg

SEQ ID NO: 100066 - DNA, 613 bp, Glycine max
  Clone ID: PAT_MRT3847_61375C.1
ctaacttttcagcttctattgttctattaaaatttgcaacgaatctcgcacaacggttttaaggtggaagaacatgagcgattggttgacatacatggcaaccggggatgatactcataatgtatcacgcatatttgtaaatggacatatgctgggtgcatagcaacacactgctagcagtgtcaaatgttaaactagtatagagacctgcaagcttgcggacgatatgatgaaatgtggaaactgattggatcgagagcatctacttaactgcatgatacgttgatagtaaggacaagatccgtcctttgtggaggcattatttccagaacactcaggacctcatttttgtggctgatagcagtgatagggatcgagtggttgacgcaagggatgagttgcacaggatgttgaatgaggatgaacttaaaaatgctgttttgcttgtttttgccaccaagcaagatcttcctattgcaatgaatgctgtataaaataactgacaagcttggactttattcactccgtcaacgcccattgttatattcaaagcactttgtgcaactttctggagagggtcttttattgagggtttggaactggcttttttaac

SEQ ID NO: 100067 - DNA, 503 bp, Glycine max
  Clone ID: PAT_MRT3847_61376C.1
tcggttttcatcagagtgtaacatctagtatacatatatagtataacatacttacattgtgtgaaatgagatttgtgctgaagctgaaaatttcattgatatatgaagaaattaatactgatgcaggtggaggaagctgatatgaggagagttgccttcctccctcacatgctcaaaatgcagtggcttatattcaaagcgataccaccaacaagacctgcatcaccaaatggactgtcgagcataaaatggaagctcctatttatatctattatcaactagataattactaccagaaccagttgcagaaaaatcttcttccatatttctgtttgaagttacatataagatatgttaagagtagaaacgacaagcaactgcggagtaaggcagcatagggggaaacaacgaattgttttcccgaagacaagacaaaagataaccagcctattgttccctgtggtctcattgcatggagtctgttcaacgacacatacaaattt

SEQ ID NO: 100068 - DNA, 124 bp, Glycine max
  Clone ID: PAT_MRT3847_61377C.1
agaaaaacgtatagaatttgatagagcaatggcaaaatttaacaataaagtggtaagcaatcgctcatttgccttgctattgagtcgtctcttatttgcccggttatggaatatccaatttatt

SEQ ID NO: 100069 - DNA, 162 bp, Glycine max
  Clone ID: PAT_MRT3847_61378C.1
cttaaatccaacttatataagtttcacagatgtaatctataatcattaggtcaattatatttcaccatccctacttctctttctattaccatctattcctttgaatcacttcacctttttcacatacttctactactacattaatacttcaatcccaccaat

SEQ ID NO: 100070 - DNA, 305 bp, Glycine max
  Clone ID: PAT_MRT3847_61379C.1
acttgatctgtctgtctaaacactcactgattgacacatcacatcataacacactgggaacgttttgtcagagctgcacaagctgactcaagcgagaggatggtaagattacaagagagaagaattgtttgtgaatggatcgacgtggttcaagatgacgcgagatacgtcggcacgctagtgtggggccatcacagacattagtgtgtttgttggaagcatggcatgagatacgctgaacgagataatgagaacatagtttgaactgtctagtgagatattgcaggctgtagtcatcactgaca

SEQ ID NO: 100071 - DNA, 791 bp, Glycine max
  Clone ID: PAT_MRT3847_6137C.1
ggagcctccaaggaccaggggctgccctcccacagaagccagataaggaggcctatggcagctgcccagtcctacctcagcccatcttgaaaacaatcttaggcaacatggaaccaccacgaggccctcctgttagtggggctgagccatctcgggcagttggcactgtcaaagtgtacctgcctaacaagcaacgcacagtggtgactgtccgggaaggcatgagtgtctatgactctttggacaaggccctgaaggtgcggggtctcaaccaggactgctgtgtggtctacaggctcatcaaaggaagaaagacagtcactgcctgggacacagccattgcgcctctggatggtgaggagctcattgtggaggtcctagaagatgtgccactgaccatgcacaattttgtacggaagacattcttcagcctggccttctgtgacttctgccttaagtttctgttccatggattccgctgccagacctgtggctacaagttccaccagcattgttcctccaaggtccccaccgtctgcgttgacatgagtaccaaccgccgacagttctaccacagcatccaggatctgtctggaggctccaggcagcaggaggctccctcaaatctctctgtgaatgagctgctaaccccccagggtcccagcccctttacccagcaacgtgaccaggagcacttctcattccctgcccctgccaatcccccactgcagcgcatccgctccacatctactcctaacgtccacatggtcagcaccacagctcccatggac

SEQ ID NO: 100072 - DNA, 497 bp, Glycine max
  Clone ID: PAT_MRT3847_61380C.1
gccgcccccccgccctaaccgccgggaccgttgccgcccccgggccccgggccttgggggggggccgatcatgcgccgtccctttcgcgcgcgccacgtacttcgcccggccagcctcccgcgagcgaggagctgaccgcccaacgtataacggtataataacgttacacatatagctgactaattaataaggtcgagccggacttatcctgatatgtgttaatttgaatgaatcaaagtgataatagtgtagaaaaagaaccataagtaagcaaacaaaaagaatataaaaaaaagaaccaaatagtaattaagattaaaaaaaaagtctacaaaaagtgaccaagaaaaaaaattctcaaatataataaataaaaaaaaaaactagatctaaataataaaaataatgttataaaatacataatttataaaaaaaataatatatagaaaacacaattgaattaaatataaaaataactgaaaaattttaagattaa

SEQ ID NO: 100073 - DNA, 1014 bp, Glycine max
  Clone ID: PAT_MRT3847_61381C.1
cacgtcactagccacaaacaaaaccaattccattttatccattccaacttcccaacccaaccaacaacaaccataacacaagacagtgtcagcgcgcacgcatacatggccatcacaggcaacctcaacctcaacctagtactccccgtggcacgccccatggcgtgccccccacgcgccccaacgtccctcctcgctcgtggccgtggcgcgtcgtcgtcaccttcgctcctggtcacgcgcgccatcgacgtgaacgagttcctgggggacttcggggcgcgggaccctttccccgcggagcttgagagttccttcggggagaaagtgctgggatacagcaacaccgagcacaaaatcctcatccccaccatcactgctctcgccctctcgcagcaggagtgtgctcccgtttccccttcgcagccccccatctcgctggatgacgcccagacgctcattagaaaggttgtgggttggagacttgtgaatgaggaaggtggacttaaaattcaatgcttgtggaagttaagagattttaaatgtggggttgaactcattaacaggatctctaaggttgttgaggctttgggccatttcccaaatatctacttggagcaaccaaatcaagtcagagcagaactatggacagcttccattggaggtttaactatgaatgattttattgttgctgcaaagatagatgagataaagacatcagatcttgtcccaaggaaaagggtttgggcgtaatgccctcacgaacttcataaaacattttgccacttgattttcttcaatattgaattaccactagtttgtgttatttgattaaatctattattctttactttcattttttagtgttcactccacaagcctgggtacatgtgtcatgtctattcttgtttggttagtgtattcaactttcagcatccaaaaactatattcttaagtctaaaccaccccccacaaaaaccgagagcagtaatggtgggaataagaatcttgtgc

SEQ ID NO: 100074 - DNA, 388 bp, Glycine max
  Clone ID: PAT_MRT3847_61382C.1
atagaaccgctaaaaccaccattagctgttcagactaagactaaagatttgtgtcgaagtggcgagcttcctctgggctgtacgaactctactggtgcaacctgtgtatcagacttgaatcaatcggtattctcctgtctgacacttattgcaaatcctcgtgcagatgccagcatgccctctgttcctgatcaggagcgagctataaatcctactacaacggatttagggttctctacttgcccaaatacttttcacatgacgatgacggacgacggctacgagtgcttgtagatcctgaatctcatgacgcatcttatgagaattgccttccgtatgcgcatgtttcagtccttatgacagctcagactactagagcccttagtgg

SEQ ID NO: 100075 - DNA, 408 bp, Glycine max
  Clone ID: PAT_MRT3847_61383C.1
ggcatgtagagcatcccgttttgttatcatttgtagaacattcaaaccaggaacccggggtatcttgcttaaacttgccattaggacttttttcttttaaaaaaagatcccttgtttacatccaccacaaggtatatacgaccaaccgtctggtgatctacaggacgcccactacatatgtcgcaggaaccctcattccattacctatgtgagaaggaatcttttgaaccacacagcgtatgcctggggggtccttcataaaatgaactggccagccacttatctgaaccccattattgctgggtaccctgcattcaattctaaactttccgattatgaccatgcataatgaccctctaaaataaccacttacttgtgcgcttgataaaagaatctaaaaggggcctg

SEQ ID NO: 100076 - DNA, 389 bp, Glycine max
  Clone ID: PAT_MRT3847_61384C.1
cggtaattcccgggctcgacccacgcgtccgcaatggcttactcccactctcgtatcatgattctgttgtttctgctctccttgggcacagcatcagaagaaaagaagacaacatacatagtgcaagtccagcaagaagccaagccttccattttcccaacgcacaggcactggtaccagtcttcccttgcccttgccgacagcacagcctccattcttcacacataccaaactgtcttccacgggttctctgcaaggctctcccccgccgaggcaaacaggcttcagggactctgccacgtgataagcctggattggggaacaggttgggcggctggcgccacggggtggcgtggagtgctggggctgggcgctgggggcgggggtgg

SEQ ID NO: 100077 - DNA, 107 bp, Glycine max
  Clone ID: PAT_MRT3847_61385C.1
cgacccacatcgttcggagaaatgtgatattaattttcaccaaaggtgacttgagggaagttatgcgaacagattgccaagttcaagtgtcaagataacatagctca

SEQ ID NO: 100078 - DNA, 395 bp, Glycine max
  Clone ID: PAT_MRT3847_61386C.1
gggtcgtgggctctcgtatctcgtcctaaagggctatggagcaggaagacaaaggcgggggatcttggacaacactcaacaatggacaaataaacgtaggtgaggcacaaaaaaggcaacagcagggggaaattgaataattgacagagacagccgcccacccagtagctacaatatgggaaatagctgatgaggatgtccaattttaaatgagagcggaccacgttacttcctatgggacgtccgactcacaggtggcacctccaagggaaacattgggcgctccttaacattcacaattcattccatcttatcatgttagggaccatgaactgctaacaccatgaacaacaaggggaaatggaatcactgacagagacagttgtccacccaga

SEQ ID NO: 100079 - DNA, 414 bp, Glycine max
  Clone ID: PAT_MRT3847_61387C.1
cccacgcgtccgtcggctgcgagaagacgacagaagggggctaacaatatttttataagggctactggctagcaacccagtgtgtgattcctcatttcaacaactctcagcatcatgcacaatcctaccccgccaggcggtccatgccctaaccaccacctccggcccacctgctacgccaccacaatgctatacatctccttcgactactgggccttcacaccaccaccacggcctatccggaccaccgcatgcttattcaacttcttcggcttctgggcctccacaccaccattctggtccacccgaaccaggcttttatcaacaccatggtccacccgggccaccgtatgcttattcaacttcttcgtcttctgggccaccgggacctcccccttcagggtcttcacacca

SEQ ID NO: 100080 - DNA, 274 bp, Glycine max
  unsure (1)..(274): unsure at all n locations
  Clone ID: PAT_MRT3847_61388C.1
gttgnaagcatgggaaaaatgatgcagagcattgactattctagacttttctggctattttttgggatcttctctcacgtaaatcatgaaggaaagcctaggatataggataataccatattgaaattttgttctgctttcattttttcccttcttgttcaactctgcagtctgcacaattaagttgcagcgtaaaaaaattatagtgtttcaataaatataagaggtggttgcgaagttggtgcatataaatacgaatcaaacatgggagaaa

SEQ ID NO: 100081 - DNA, 323 bp, Glycine max
  Clone ID: PAT_MRT3847_61389C.1
cgccgcggacggacccgggtggtcccacgcggccgccctcccgggcgaataccgacaaaccgcgatcgcgggttgtcggaccttaaaaccggtgacaaaagcacacggcacttgatgaaaagaataaagaaagccccttcctactagggccgaggacgcaggcgcaaagggagcgaaaatcacgaactgggcagggtgccagtcttcgagagtgaagatcttttgcaggagaagccgattcggaggacactctgctgactgatccatgcatgaaaggcacagtcaaactcttgactgcatctggaaagggggctgatgacacc

SEQ ID NO: 100082 - DNA, 1164 bp, Glycine max
  Clone ID: PAT_MRT3847_6138C.1
atggaatttcagaagcatcatgaggaagctgagcttgggctgcccatagcagtagcagcaacgagctatgaagagtttggaatgccactgaatcacggcgaacaagagccagtggtggaagtgataccaatggcggtgccaatggcggttccagtggcaccacccaccaacattgtggcccaaaacagtggcaagggaaagtaccaagaatgcctcaagaaccacggtgtctcaatcggcaaacacattatcgacggctgcatcgagttcctgccggggggtcaggagggcaccctggaagcgctaaaatgcgttgtgtgcaactgccaccgaaacttccatcgtaaggagacccacgacacctactcagtgcccttccaccaccaccacccaccgctgccacccccagtgccatttgcagcttactatcgtaccccgccggggtacccacacatgacggggcaccaacgtgccatgctggcacacccgtccttgtcaggaggaggtgggccccagccccccttggaagacctggaggactcagaccctacgagtggtgccaccactcatgatgggtctgggtcgagcagcaaaaaacgcttcaagaccaaatttacccagcatcagaaagacaagatgttggtcttcgctgagaaactcgggtggaggatgcaaaagaatgatgacagcgtcgtgcaagagttttgctccgaaatcggtgttcaacgtcatgtgctaaaggtgtggatgcataataacaagcacaccttaggtaagaagccctagaggctagaaggaaaaaataaatccaccccttttccctctttctctttctctctctctctctctcgctataaacatatatgcttctttgtttttagttaccataacaataataacagccatcattccaagctagaagctcaacgttgaagcctgggagattgcgttgttgaatgtctaataagtctgctcatgctagctggtcaagacattagttcttagggtttttttctctttatgctcaccttgtttaattttaatttcttaggacatgggagaagggtgggggtattttcggtaatccatttggttatgttggttggtataatgtttgaggatccatgattctaattccaacaacattgttgctggtgaactggt

SEQ ID NO: 100083 - DNA, 399 bp, Glycine max
  Clone ID: PAT_MRT3847_61390C.1
attgttccaagtgtcagttttgaaggaatacattgcaaccaaggctgggctccaccatgaaaatggcgccggaattgatcattccaaattgtctgatgcttctatttctagtgctgaatatgaggatgaaatgcaggatgagttttatgatgcaattactgctgattcatcaacatcatacgaagaaagtgattatgatcataagcttgttctgcacgagccaatattttaactaaagaatatttcatgggcaatcacaaccttatctttgaatctaactgtatcttctgatctaaccttaaaactggttcccttttttacttatattacaattccaatttattttctttttttttatcctaaagaaattttgttttttatttaattctttttatcttt

SEQ ID NO: 100084 - DNA, 943 bp, Glycine max
  Clone ID: PAT_MRT3847_61391C.1
gtttaatatttttgtgattagaattgaattgaaagtcttacaattaattgactatacaatcaatttccttcagaagagatcaatgtagattactactagctgtataatatatataaactatgacgtgtttattttcaaaaaaaaaaaaaaaaaaaaaaaaaaaaaaaaaaaaaaaaaaaaaaaaaaaaaaaaaaaaaaaaaaaaaaaaaggtcaaacggtcttggggtttcaatgtagtgctctatggcacgcgtaattgcattaattaaaaatgaactatttagagtcgtcattgagaccaccaatcgtttttaatattggctttgagtttttaacttgttcaataactgaattaaagtggttttggatcatctaaaaatttctaacctatggataatttacgatgaaaaatgtgtaagtgcttagtttgcctacttcaaccagatgcatctaatcccatgttccaatatcttaagttgtaagtttattatttatgttcagcgtatatttactatatatcagcttatatccttattgtttttaatcggatgtaggattgtgcctgtattatgataaccttttagggttggttgatgttttgctgccattttaatgttgcacttgtacttgggtcttttggggatacatgggagtttgatgtatcatgtaaaaaattggccatgggtagcttatgtggcaatgagtacagatggctgtaaataactgcatctagtgtagcttcaaggttccttgcagtcttctgttttggatcataaccaaattttttggtttataacttttgttgagattttcagcttttaactttggtttataggtttttggtaaacttgttagttttcattaggacttaccttaaaatataactaattcaaggatacgctgaattttttatttatttggaaattattttgttcttatttt

SEQ ID NO: 100085 - DNA, 1442 bp, Glycine max
  Clone ID: PAT_MRT3847_61392C.1
tgccgcgtgaatcgtactcggcgcattttccgtgtctcatcgagcgtttgttcggtcaaaaggcgaagtcgcggttcttatttcgccgatcgaaaaccgatctggtttcagggatcgttaattgcaggttctgttgaatctatttcgtcggaggtttcggcggcgccggtgatgatcgtgcgtggttttcctgcggtggatgttgatggtctcgtgtcgaaagacgcgaaacagagtaattaaacgcgcgattcgttgtgtaatttagaatatattggtaaagtcctttaggagtttgtattagatctgattggttgaaaggggagtttatttatatacaccaagaatccaagatagatagttgttcttttcattgttcttgttaatggacctttgccatgtcaggtgcgcttgcatggcgggtccgaaaagcgttaataaaatcattattgctttttgtttgggggagagaaggtttcgggggctgttttttgtattttgccccgattctcttctctctccctctggtgttgtgttttctcctttccctttctctcttctctttcctttgagtttttctatactctagttcgcgtcgcccaaggctcaacagcatgacaaacgattgacaactcggcaaggtacatagtgctgaacgcacgctttaatttattttaatttcgttgtttatacttaccgtattcaattttacaatatataaattaacatgatgactcgcatgtaataagtttatagtctggtaattaaagcaaaaggcaatcgatacaatttacttcatatttaggtatttgttcatagtatatttttattttatggttttagtaaacaaatggtttatttgctcgtatgtatattgtcatgttgtttaatatttttgtgattagaattgaattgaaagtcttacaattaattgactatacaatcaatttccttcagaagagatcaatgtagattactactagctgtataatatatataaactatgacgtgtttattttcatgattaggattgaattcaaagtttcgtacaattaaatgactcgttcaatgttggtaatcggtatacaatctacttcaaaagacatttgcctggcagtacagtgctttatgttcactataatttgattaattaaaaattaactatttatcgtcgtcattgagaatagcaataatttttaatattggctttgagtttttaacttgttcaataactgaattaaagtggttttggatcatctaaaaatttctaacctatggataatttacgatgaaaaatgtgtaagtgcttagtttgcctacttcaaccagatgcatctaatcccatgttccaatatcttaagttgtaagtttattatttatgttcaagcgtaatttaatttttttttaaacccttttttaaaatttttaaaaattttttaaaa

SEQ ID NO: 100086 - DNA, 498 bp, Glycine max
  Clone ID: PAT_MRT3847_61393C.1
agtaacattttgttttgcctctcctgagcttttttcgaagaagcgaagacctaaacggcagggcacagaatgtgcaatgccaaagaacgtgaacctatgtgggcgaacactaaagggctgtttaagttattacttctgatagaacctttgtttttgccgaaatttctggatatgaaccttcaccggaattattgacagattatcatgatgagggtgggagtatacgtacactggggaagagtgacctatacaaagaggtggacatacttacgttctccatgatgccgaataggcccttcttgtgctttctcctttgatagaacttactgttctgtgtgcattttctctaactcctgtgtgattataagagtatactccaataactctggataaggggattttgggcatgatcttggtttatggggccgttacaatgacttggggacatttatccatgttggatgcgccagcctacacgggcctgatattataaggggc

SEQ ID NO: 100087 - DNA, 291 bp, Glycine max
  Clone ID: PAT_MRT3847_61394C.1
gtaaaattagaaaagaccaaatgtttggatgctctgtggatgatgaagctgctttacctccatctaaacgcatccatcgtgctttagaagcagatgtctgccaatgctgccgaagaaggtcaagcttgcatggaatcctcctcctctataatgacatttagtggtagatgctgtatatctgccattaagagatgtccttgtatgactgttaataatcaaggagttaatgagttagaactgcaaaggttggtttcttgtggcattgattcttctcatgttagtgtgtgtagt

SEQ ID NO: 100088 - DNA, 284 bp, Glycine max
  Clone ID: PAT_MRT3847_61395C.1
gccacacgtgctctacaatgactaggtttatccatataacggtgaatagtatgcacgcggggtatttggatgtaatgacttaccttaccctcgcagaagaagaaccggaatatgaaaaactatataacatcccaacagtgagaagcccagtgattgtgtttaccttacgagagatgtaacattaagacacttgaagtgatcagattttctagcttatggaataaaatctgtggaccaagatcactatcctgggttgactgatgcattggatggaaatctattga

SEQ ID NO: 100089 - DNA, 495 bp, Glycine max
  Clone ID: PAT_MRT3847_61396C.1
ctgcctaccgtacaaccaaggtctactacttttgtggtttaagctcagctttagtttaacacttgttcatgtgaaataaaagttgtagttgtttttgcattagatcagctacccagtcagaatgaattttctttgcttattatctatgctgcattgcctttaagtctaatacaaggtatagagtgtaatacatggtagatccttgtcaaattatgcttactatgcttctcccttatttcttaacataatgtattagtatcaggctatcagcagctagatttcctatagtcatctgcttttatttttaatttattatcttggtgatcttatagattaaaatccatacaagttaaaattttgtaatgatatcttgaaaatgtgtaactaacttgtggcatggcattggctgaagcaattcatgtttgttatcaaatataattctacagatgaacaatatgaaagcttgtgtgatgagtttctactttttgcatatat

SEQ ID NO: 100090 - DNA, 565 bp, Glycine max
  Clone ID: PAT_MRT3847_61397C.1
gcggatgctgatagacatcacaaaggggtaccgaaagaggaacgacatggtacttgctgagcatggaggtcccagaacgtggtgttcactgtagaaacactgaacgtactccagttctagctgaaaattaagagatggaaaatgacctagagggatcgagatatcggtgaaaacatgattatagggttctaactggaagtgaatcgagcttgcggaatcagaacagcagcccctctgaactcatacacggagcaacagctctcaggcatggaggcacccacgaggctatgaaaaacttgcacactgataaggctgtggaccactactgctctacatttgatgggagccatcttacctacctcgaatatgagtatcttgccataaagactatcgacaggcaaaggatagcagtgtagctgatggacccaatattggagttgaaaagaagactcctatactcaaggttgtccatgaagacagggcagtgaattatttgaacacgcataggcttggcatagtccattttaaagcagacacatctaaacttcactacgtcagacatcgg

SEQ ID NO: 100091 - DNA, 125 bp, Glycine max
  Clone ID: PAT_MRT3847_61398C.1
cccacgcatcctatcacacatccattcacacttcccctcataaacaaaaccattgatataagtaacttacataaaccatctactcactattacattccatacatgatcatatcacacaatatcct

SEQ ID NO: 100092 - DNA, 1941 bp, Glycine max
  Clone ID: PAT_MRT3847_61399C.1
tttttaaacattttaaaataattacgtaaactaaatcattgaatcaaatacagccttattgcttgtatctttccagcaggaacagtttaatgcttctcatagccaagcattaatttttaaccaagctggaattaatccaactcaatattactgaaataagctcagcctgtataaccaactttggtaaaggagtgtgccagacaataatttggtaccaagtgtttccatgccacggttaaacgccgccaagaattaattatgtgccattaaagaagtatacttcgagcgccggaaaagagctggatccctaaaatttttttattatagtggaatcaacagcggtaaaaatataatatttacactatttttgagtgacacatgttattcttattggtaatacatcttaagcatggtatttgtattgaccaataaaagttattgtgtgaagaactataaactatatcatgctatgaacaagatcagagttgcattagtgtaagaaaacgacctatactcaaaatttgttgtgaaacctagcatgtggagaaataaggagcagtaacgtgcgttcacagaatctgtggaaagccttcccttctgtcttcaacagtagaattggaatcagcttcaaccctcctaaaaactagcttttgttggggaagttgaccattggcaaataccgtgacttctgtgtctactaaaattgtgtcttcttccttgaactctcctctaagaatacccttagcaagttcattctccacgttttgctgaataactcgcttgactggcctagcaccgtagtttggatcataccccaaactaccaagaagttggattgcagcttctgtaacttggattttcatcttacgatctgcaattctcttctgcacacgctccaactgtaacctgacaatactacttatttggttgcggtctagaggctggaaaacaatatattcatcaactctattcatgaactcagggcgaaagatggatcttgcagcgtccattacccgctgctttatagtttcatatgcagactctttgggcacagtgtcatcatctgtgttgagaatgtactgtgatccaacatttgaggtcataatgataactgtgttggtaaaacttacggttcggccctgtgaatcagttacccttccatcatccaagatttgaaggaatacattgaaaacatctgagtgtgccttctcaatctcatcaaacaatatgacagcatatggtcggcgacgaactgtctctgttagttgccctccctcttcatacccaacatatccaggtggagccccaatcaatcttgaaacagtatgcttttccatgtactcactcatatcaatccgtacaagtgcttcttctgtgttgaacaaataggctgcaagggccttagctagctctgtctttcctacacctgtaggtcccataaacatgaagctagcaattgggcgatggggatctgaaagacctgctcttgaacgttggatagcctcagctactgccttaacagcagggtcttggccgacaacacgcttatgaagcacttcctctaaatacaacaacttctccctctctgattgttgaagttttgaaacagggataccagtccacttgcttacaatttcagcaatatcatttcccgtaacttcctcctctcagcatagacttcccagagttcataatattcatgtaactccttctctgcactttcaagttggcgttgcaaggagttaagactgccatactttaattcagcagcacgattaagatcatactctcgttcagcctcttgaatctcaagatttactctgtctatctcctctttaagcgagaaagctttaactcgagtcattacacccttttcatgctcccactgttcagtcagctcagcctgtttctcttttaagagagaaagctctgcctcaagac

SEQ ID NO: 100093 - DNA, 414 bp, Glycine max
  Clone ID: PAT_MRT3847_6139C.1
gtgaagctgcttcttccatggcttattccttaatggatggcgcctgctctcacctcttttcctttgtcttccgctgcatctccatggtggaaaatcactattaaaggaccccattgaagctcaaagatccagcctccatagaagccccacaagcaaacttccatcaccattagctattttcaaacgaataccattagctatttgacaaaccttaaagtgttcttgtacctctataactgcaggtagcaaatcatcttaaccatatggtatcaacccttggaagaaatcctctaatgattttggtgcaagtaaatacgagtggaagaaatcctctgagtttctctaactccttaatagtggtcatcacaccattcctgctaatattttttcttgtgaggttgttttcttggtccc

SEQ ID NO: 100094 - DNA, 308 bp, Glycine max
  Clone ID: PAT_MRT3847_613C.1
aaacggccaaaaggagtgccatctgggtctgacaaaaggcacatcacattgaaaattatctgacctatagtacaccatagactctggctcagcctgcattgtacaatgagggactgtcctttgtttatctagtgggcgttgcttatgacttctttgcatcactgaaacaaaacaaagcagcgaagatggggtcgcattaacacaaacccaggacccatgatacacagacataagacacattggcacaaaacctcttgcacactcaaggttctaaaaacactccacgaccatgatttgggccgcaatat

SEQ ID NO: 100095 - DNA, 327 bp, Glycine max
  unsure (1)..(327): unsure at all n locations
  Clone ID: PAT_MRT3847_61400C.1
gcgggcacacactttgttcaactagcaagattttgttactcaaccgatgcccaacttgtgggcatgaacttgtctatgggagngtggtatcattaaaaaagatagcatgaatcacttgaactgccttgcatatacattttttttggggggtccaaatatttatctatttcagcaaacttaaaacatgaggctttttgttactttaaaccatacaactggctttatgccggatctaaaagcttagtggttggggatattccaagcctttgtcctcatttaagggatgaccacaggggttataatgcattctggatgcactttttaacc

SEQ ID NO: 100096 - DNA, 170 bp, Glycine max
  Clone ID: PAT_MRT3847_61401C.1
acggctgcgagaagacgacagaagggactatattcaaaagtgcttacttccaggcacagttagatgcagaggacccagctagtagtattttttcatcaaatttggtgtgtagatttttacgaacttgggagtcatctattcataacaccacatgacatgggactatgata

SEQ ID NO: 100097 - DNA, 424 bp, Glycine max
  Clone ID: PAT_MRT3847_61402C.1
ggtgtttttttttttttttttttttttttttttttttttgaaaaaaacaatttggtcttttttctttcccaatacaaagaaaaaagaaagggaaggcaaattatttaaccccctttctttcaataatcaggggggatgcgggaactaaggcaaggggaaaagggatggataaagggtcaatcaaactaaaaccccttaatttgccttcggggggcaagggaaaaagccccagagttctatgttcctttggttcacaaggggaggacatgtttggttcttccaagcagaaaaaaacccatctccggcactttttttgggacggactatcttcctggggatctttttttaccacttcccccctgggggtccccaaagtaacaacactggaaatggggggagttcgaggactatgaaaaaatgcagg

SEQ ID NO: 100098 - DNA, 301 bp, Glycine max
  unsure (1)..(301): unsure at all n locations
  Clone ID: PAT_MRT3847_61403C.1
ggaattaggatcctncgaaacaaaacatacaaaatggtccagcctggttttcaaccgggtggaaatccttcaaccacaaaaaacagaatggggaaaccttagcgccagaagaatcatcatgccctctctgtcatcgataacaaccttcattcttcaccctcgtcactcgtcatttctgcttaccacgcctncccttcaaaacttgacaaatttgatttgaagctggggaaggagcatcgggtttagattaacgcaatgctgcaacaagagccaaatctcattcagcattccatacgtacag

SEQ ID NO: 100099 - DNA, 274 bp, Glycine max
  Clone ID: PAT_MRT3847_61404C.1
tattttggcgaccagacctttaggatttagtgggatggtttctttaaattgaattaaagatacaacaatggtacatgaaaaataagggtgggttactttgagatattatgaacaataactcttgtcaaaatctggaatatacttgaatcactacagctgggagctttaagatcttaacaggtaaaaggcggaatcaatctgctcgaggagcaatgcatttgccaacatctttatgaagcatattgctcatagttcaccatgccaaagctgttca

SEQ ID NO: 100100 - DNA, 488 bp, Glycine max
  unsure (1)..(488): unsure at all n locations
  Clone ID: PAT_MRT3847_61405C.1
gcgccagaaatttctataggtttatatcgtttggaattaatttgcgtaatgaattttttgaccaaccatatagcagttgtatttcatacaatcatacagatacccaacaaaaagctcccctcggttcttgtcaaaataaatgggggagggaagggaaatctccaaatggagacaataatgacgtagacccaagaaagccttaaaaaatataagcataagatcaatctggaggaactgaatgcaattttaaactgctaagtttcaagggaaaaagggaagtaggaagctaaactctgtttctagggcttcttgttttgtctctgaactatgatggaggaaataaaacatctgctgctacaaaaaattgttatccgtcacttgaatagactgggagtgaagacttactttgcttgttttttttttctttttggggntgctggctttatttccctttaaacatttcaactagggataaacccttttttttt

SEQ ID NO: 100101 - DNA, 569 bp, Glycine max
  Clone ID: PAT_MRT3847_61406C.1
gtcacaacagtcattagtaattggaattttgttggatttgaattttgacaggtctatatcggttgcacacttaatactccaacaaaaatcaccataatgaaggataaaccaatgtgggaatatctaattttaagatatccttttaagagggagaaccaattccaatgtcactgatcaaaaaggtgaaaaatatttgtactttcagtccgtacagactttgccttggggtgcatgggagtgagcaggactcagttgaggacaaaatggtaccttgagtcgacgtagctctcaacatcccagagaaaggaaccaaaagtaatagcttctaaaacaagtctcttcaaaccaccaaagctaattttgatgctctgatccgtcaaagaatcaattaccccctccggtgttacaacaatttcaggtcttccaaacaatgcttcggtgtgcttctcaatgatgctgagagcctctttggatcttattggtgcatatctctgtaatgtctcgctataaaaggacatcacataggtacgcaacctggacacttttgaaccataacccaaatccccctg

SEQ ID NO: 100102 - DNA, 1061 bp, Glycine max
  Clone ID: PAT_MRT3847_61407C.1
ccgcgtccctcccggaaccctctctctctctctctctctctctgttcactctcactttttgttttcacctcctcctaatttccaagcacactttctttgtttcttatttcttcctgtctcaattataagtaaaagaaaaacatatttttaaggagattactgggacagctagatgacgcgagcgttcagaattctcgggtccgcggacaacgccacctcgctggcagcggtagcggcgccgccggaggcggtggcgcttgagtcggacttcgtggtgattctcgcggcgctcctctgcgccctcatctgcgtggtggggctggtggccgtggcgcggtgcgcgtggttccggcaaggctccggcggcggaagctctccccggcaagccttggcgaacaagggcctaaagaagaaggtgctgcagtcgctgccgaagttcgcgtacgtggacagcaaccccagcaagtgggtggcgacatcggaatgcgcgatctgcctcgccgacttcgccgccggcgacgagatccgcgtgctgccgcagtgcggccacggcttccacgttccctgcatcgacacgtggcttgggtcccactcttcttgcccctcctgtcggcagattttggcggtgaccaggtgtcagaagtgtgggcgttttccggcccccggggccggagcttccagaacgcctgcgaccgaacccgaattgaagtccagagaagacaacaatgtcgctagttacagcaataataatattaataacaacagcgacaggggtggcaataacagtaatagtaattgtaacatggaacatcatcatcacagccatcatgtgaatagtgggttcttgccatgaaaatagtagctactatttattagctttttttttttttttaactttgtacctttttatcccttcaagttgttcaagaagatcagaaattgggcatttttttcccctctctttatagatttttgtttatcctgcaaatattactaagtgcgtatgatataatgatgtataaaaagatgtaatcagtcgaaatgtaaaaagtttaaagtgt

SEQ ID NO: 100103 - DNA, 313 bp, Glycine max
  Clone ID: PAT_MRT3847_61408C.1
acagggaattttttttttttttttacttgaaacaacttaataaaaaaaggagcttttaaaatgatagggtttgtttggaaaaagggttcttcccaccccaacattcattttttttcaccaaacaccgtttttggctggggggtttctttctttaaaagggccaaaaaaacgttttggggaattatttgggtatcccaacacacctttctttaggggggtagggtttttccctcccttttctcccctttgggattaaagaagaaagggcctttttacctgggtcccttttttttgggggggttgggggggggga

SEQ ID NO: 100104 - DNA, 391 bp, Glycine max
  Clone ID: PAT_MRT3847_61409C.1
cgttctttttttttttttttttttttttttttttttttttttttggtttttttttttttttttttttggcggctttattactaaaaattattgcaaacacaacaacagggtccaacaaaaaaatgccccattaaataaaaaagcaatcttccccgcccattttaatttttgaacaaataaattaaagggttcctttaaaaggggctgttcttttaacatttacttggcatttacatttaaaatttttttttcttgttgggatttgcccggcacttgaacacaataagatcaggacgtgcaaaatggcccttaaacaaatagaatcaaccttggtctgaattataaactattggccataaaaatgacacattcaaacttttttttaaagaac

SEQ ID NO: 100105 - DNA, 107 bp, Glycine max
  Clone ID: PAT_MRT3847_6140C.1
gtggaccactttttagaggaaaatacttaaaataaacggggcccaacatgttgtaccatacatacgaaccgcggcaatgtccaactaccataaagctaatttggaaa

SEQ ID NO: 100106 - DNA, 234 bp, Glycine max
  Clone ID: PAT_MRT3847_61410C.1
ggaacacaagttcgccaacgtttgatgctcgtcaagcgtgcacttacatagaataccggaacccgatccaaacgccaacttattcctacacagcttcccggaaatatggtactcgtggctgctcaagatgatagctctcaaccacgccgcattcagagcgggattctttaactacataggttacaaaatgtgcaaaccgccgtgtttacccgataagaccttttgttccgatct

SEQ ID NO: 100107 - DNA, 277 bp, Glycine max
  Clone ID: PAT_MRT3847_61411C.1
gaaaaaagcggcatggggaaacaatttaaaaccttgcatttccctaaggggggaacataaaagctaaaccccctttatttctttttaacattccccccgtcccataaagctttttataatagagggggggggaacaaaacaattttttttttttataacataacaaaataagggttttttctggcccaacaattagtttttttttacaaaaagattttttttggttgttgggcagtaaacaattcataatccgcttggcaataaaatgctttaaaat

SEQ ID NO: 100108 - DNA, 194 bp, Glycine max
  unsure (1)..(194): unsure at all n locations
  Clone ID: PAT_MRT3847_61412C.1
gcccgcgtncgctaagctcttttttcggctcgcgcagttttggggggtggattattcaggtccctaatacgttttgagatggctcacgttgaactgcgagatgagcctgggaacccatttgacctcacaggtgcttatgggaatccggtttggttaacggccgataaaggcttttctggtgctcctcaccggtg

SEQ ID NO: 100109 - DNA, 483 bp, Glycine max
  Clone ID: PAT_MRT3847_61413C.1
gaaatgtacatttgtcataaagcgtgcgtatatacagccgttatttcgtgcttgagccttatcccagcgccggacctccaccattgtccacccagcactttcctccttttgtgcatacaatctagtaggcgaaggtgttgatcgactcgtcagggttctggcggatcttcttgttggtcctcttgagccagaagcacataacccaagcagcagcagcagtcgcgacggagaaggcggccgaagagctgagagcaatggtgtagcgcggcgcgtcagagtccatccacaagtaaggggtccacacgaaggaagcgttcgcgcaggtgttgacaatggcgagcgcagatgctttcttctctttggtctggccgcaggtggaagcgacccagccaagaataatggagttgacggcgtatgtgccgatggcgaagacgaccatggcgaagtacttggcgccggtgttcaggtggcgaaggcgaggat

SEQ ID NO: 100110 - DNA, 207 bp, Glycine max
  unsure (1)..(207): unsure at all n locations
  Clone ID: PAT_MRT3847_61414C.1
ccttttttttcttttttttttgtgcggactcacatctaaattattctaagaccacggggccacagtttctgtaccnnataactacatcactaaaacagcatatttttttcttctgatagggggaaaaaaaaatacacagcctcttttatttttttttaccgcccacaagtgttcgagatcggggttaatggtcccacacaccctttt

SEQ ID NO: 100111 - DNA, 750 bp, Glycine max
  Clone ID: PAT_MRT3847_61415C.1
ttacttttgtgggattacttttttttgttttcaaaaaagttattgttgaacgtgattaaaagattgaaagtttatgttctgcaattaaattaatgtgaatattttacaattattggtagcagtaaatatatgtatatgctacatagcttgaacgtgtttgaatgtaaaaacacaaataaatgcaaatattattttatggtctggaatgaaattaatagaatggctatgaattattaatagcaataagtatgtgcaggccatatatatttggttggaattaaatgtatgttgaatttgttagtcaccaaagtggccaaatttgtaaggttatttaattccaaattaatgattatttcaattatacttggttggaattaaatgtatgttgaatttgttagtcaccaaagtggccaaatttgtaaggttatttaattccaaaattaatgattattttgattactcattcttataatgatgctatataataggaggcgatttgtgtgtatcattagttttatttatatgtccaaaggaaatagatactactaattggtgcatatttaattgccaaataaagttaagaatttttattagcatcattatgtttgtatgttgtgtgttggtgtatcacccaaaggagaacatcaatatacattgactgttatttgaacgaatcatgtgtatgacatgtattttatgtctcaaaacacttacgtgaattttattatgtaatacatgttctcaattcac

SEQ ID NO: 100112 - DNA, 448 bp, Glycine max
  unsure (1)..(448): unsure at all n locations
  Clone ID: PAT_MRT3847_61416C.1
tacggctgcagaagacgacagaagggcagggaaacaagggaggaagcaaatgcagatgtagaagtaatttctccatttgcccaattggatattcctttaattggccaagtgagaaagaagctttgatttatttcttttattattttctttttttttttctttttatttccttgattaggtagagaattttgatcatgattatggaatgtttgaggcagagttacatgatattcttagcaaagctgaagaagcaccatttttcacctggtccagaatcatcagcatgccaactttttccacttgatgatatacctttcaattctctatccttttcatcaatggtggttaccttaagtttggtatgattcacaatcagatatttaaacatgctggctttagttgtttnttttttgtcgcctactcatactgtaaccatgtatttgtcatg

SEQ ID NO: 100113 - DNA, 482 bp, Glycine max
  Clone ID: PAT_MRT3847_61417C.1
caaacctcccttaaataaggcttggcattatttattaaggaccgacctacaccccatttggcaaacctaacccttaattttaaaaccggggaaccttatcctttccttcctagaaaaaaccttaaatgggttaaccggcctaaaacaaaacaggggaggggattggcccgcttaccatataaaaaaccccggtcccttggaccaggactggataaaggccggggtttgggcaatggggttaagcgggggccttaatttcaaattccctggactttctaatgggaggggccagaataagggggtggagaaacctgggaaccggggccaccaaaaccccggggaccaaggtgggtttgaagtggtttaaggtaccggtggcggggaccctaaaccctggggacaaagtggccgttttccaccctgattggaagaaccctttggtttggaagttaacccagaacgccctggtggaggaaccggga

SEQ ID NO: 100114 - DNA, 173 bp, Glycine max
  Clone ID: PAT_MRT3847_61418C.1
gcgaacagcggtgggcctagccctactagtctcaatctccaacacatatggcctagactacgtacataacctaaacctactccaatgctaaaactaatcgtcccaacaattatattactaccactgacatgactttccaaaaaacacataatttgaatcaacacaaccaccca

SEQ ID NO: 100115 - DNA, 1230 bp, Glycine max
  Clone ID: PAT_MRT3847_61419C.1
ggaattgttgctgcagccacaggcacgtgaggacaaataaagacatctgatagggatgaaagagtgatctgttacattgtaaattcagctgaatattgccacaaaacggctggtgaactggctgaaagtgtttctaaaataattgaccctcaatattcagatggggtggatatgtctgaagtgcaggatgaattctcggccgttataacaaagtcattggtggccgttagtgcatggcctggaaactaaatttgaccatggaaatggctgcaatgacgcgtgtcccttggggtactcttgagagtgttggtgatcaatcagagtatgttaatgccataaatttgatcctgaccattttaattcttctccggttgattctgtagcagctacttaccgtcagttctttctggataagcttgcatcatctcttggtccacgcttttattctaacattttcaaatgcaagcaaatatcagaaactggagctcaacagatgctattagatacccaagctgtaaagacgattcttcttgaagttccttcccttggtagacagacatcaggtgctgctagttattccaagtttgtaagccgcgagatgagcaaagccgaggcccttttaaaggttatactttctccagttgattctgtagcagatacttaccgtgcattgctacctgagggtacaccccatggaatttcaacgaatcctggagcttaagggtctgaaaaaagctgaccaacaaagcattcttgatgacttcaacaaacatgggcctggaattaagcaaactcagattgcaccttcaattgtgccagcagctgctccagtagctcctgtggtacctagcccctctgctattggactcatagcgtcgcgagaggatgttcttactagggctgctgcacttggacgaggagctgccaccactgggttcaagcggttcctagctctaactgaagccgccaaagacaggaaagatgggcctttcaggaagctctttaatccataatgacgagagtgctacaaccccgattttttggccagagcgcatgagcttttagttttctgtttctttttgcttttcttctctttgattctttatgtaagtttagtatcgtgttaatctgatttcactcaatcaactgaaagctgttaatgaagagatctatctacaaatttgcataattctttctgtagctcataagggattcttcttgtctgttgct

SEQ ID NO: 100116 - DNA, 963 bp, Glycine max
  Clone ID: PAT_MRT3847_6141C.1
tacggctcgagaagacgacagatggggatacatggtggagggacagagagtcacaacactacactatatggaatcatcatgcatcaatatcatcactagagaatagagatataaagagagagaaagtgtgagagaaagagagaaagagagaaagtgtgagagaaagagagaaagtggagtcttttgactgagcctagcctgcaaaagccgtctaaggttgttgtctggttgatgataatgtttctttttaatgtctgaatacgcgttgaactttcaaacgtaccaccaccacactatttttttagttagccttctgatccattttcacccttaaccttaatcccaattcaaaggtccacttagtctttttccttttatttttttaaatgatggtttataaattgcattagtctccgagtgtttttattgcttgaatttcctctcctttatggagcaatgattcctttatgacagtttgcgatttttgtcggagggttatgaattgtgggtttgattcaagtttgcttctttggaattgggtcgggttggaatcttccagtattggagttttggtatctgattttgaattgggtatgtgcgtatgaaggaaagttttcatctttgcttttgaatagagaaaaaaaaaaaacaaaaaacaaagaaggtactgtgtggtgggtgagtttttagtttttatgagttttggtggagctggtagaagatgtgtttgctggcgaacggtgatcctactttttgaaggataatattgttgtatagttgatgtgatatctttgtgctccaacatgggttgcatatgttctaagagttcagctatagaggacagcaaggaaagtgtcactaagaaatttcaatcgtatagcacacggccttcagagttgaatgttttacggttgaattcaactaggaaggttgatgagggtggggtgaaagatgttgtaatag

SEQ ID NO: 100117 - DNA, 638 bp, Glycine max
  unsure (1)..(638): unsure at all n locations
  Clone ID: PAT_MRT3847_61420C.1
ttcaagggtaaaactttcccccggttgattctggagcagaaacttaccgggcaatgcnacctgaggggacacccatggaattcaacgaatcctggagcttaagggtctgaaaaaagccgatcaacaaagcatttttgatgacttcaccaaacatggccctgaaattaagcaaactcagattgcaccttcaattgtgccagcagctcctccggtagctcctgtggtacctagcccctctgctattggactcattgcgtcgcgagaggatgtccttactagggctgctgcacttggacgaggagctgccccccctgggttcaagcggttcctagctctaactgaagctgccaaagacaggaaagctgggcctttccggaatctctttaatccataatgaagagagtgctccaaccctaattttttggccagagcccatgagctttgagtttttttttttttttttataaaaaattagttttctgtctctttttgcttttcttctctttgattctttatgtaagtttagtatcatgtttattgggtttcgctcaatcatctgacagctgttaataaagagatctacaaatttgcatccaaaacccaaaaaaaaaaaaaaaaaaaaaaaaacaaaaacccag

SEQ ID NO: 100118 - DNA, 308 bp, Glycine max
  unsure (1)..(308): unsure at all n locations
  Clone ID: PAT_MRT3847_61421C.1
tcgcangcacgcgtacgtcngctcggnnttcggctcgngcctncatgtcnttgcngggtgttgtnccctttnttcacnttntnncncacttannancncnanaanggggnggcngccgagtngtgggctcgnngncccgggaattatttcnggncnggnncctgnaggngtnccngttttccctnnngngngncntnttcccncttggngtantcttggncatagctntttccngggggaaattgttatcngntcncaattccacaaaaaaacnnnnnnngaaaanaaagnantccnacaaannaaan

SEQ ID NO: 100119 - DNA, 503 bp, Glycine max
  Clone ID: PAT_MRT3847_61422C.1
tacggctgcgagaagacgacagaagggggttttgaatgaatcattgaccaatctaatgtctcatcaggagcaagccgtgttgtcccttctctccaagctcgccctttccttcgacggtgccgttttgggcgttgccttggccttcgccgccgtccgcaccctcttcaaattcaccgccacctccgcctccctccgcaagctccgccgcgcaccctccatctccgtctccgacctccgctccctcctcgccgagccaccctccgatgccgacgccggcgaaatcgtaattatccgtggcactgtcgacgccaagtccgccgtcgacggcacctggaaaactttgaaacccggcgtattggtttctcgcgagtccggcgataaaggtgtcattcttcaaagaactcaaacgtgtatatacaatgactggaaaggcttattgggatggacttctgaccttcgagccctatgtgcaagatctttgaggcagcaagactctacatctt

SEQ ID NO: 100120 - DNA, 351 bp, Glycine max
  Clone ID: PAT_MRT3847_61423C.1
ggatttagagtgaagagctaagagtatggctcccggggtgtgaatcacttaggctgggtaatgcttcttagcactgtcactgaatcgctgtcttgccgaggataatggacttgtcatgaacttctacaaggattcatgccctcaagcttaaaacatcatcaaagaacaagtcaagcttctctactagcgccacaagaacactgctttatcctggctcataaacatcttccatgactgtgctgttcatagtactgaatccacactgatactagacttcacaacaatgagcctgtctaataaggaaacaaatagaaactctatagttgataaattacaggttccttactacca

SEQ ID NO: 100121 - DNA, 477 bp, Glycine max
  unsure (1)..(477): unsure at all n locations
  Clone ID: PAT_MRT3847_61424C.1
aagctnggaattcggctcgacggattacccaagtcccttttggcttttaatgatgccatctatgcccgccggccccggtccactttttactgctgccaccttaccttaaacaaatatctctcatcacaccaactatagctcaaacctcaccgttcacaccatttttacggaaacaaacactctatgtctagagagcacatcctctgcgaccataagcacttgaaataagcacctccgcccattcctctgagaagttcctaccacagaatgcaggtcccgtcaataaactacttcactagcatcactatatagtccctaagcaataggagttctcctaccccctatacaccacccttcaggttattccctatagcctcaaaaggtagcctccaatacatgggtgtttcccccgaacatcattggcaaaggctgctttctcccccataacctgcaagtgctcataatccccgcccccac

SEQ ID NO: 100122 - DNA, 348 bp, Glycine max
  Clone ID: PAT_MRT3847_61425C.1
ggacacactcatcttcttcctcttctttttggttctctctctcacagtgagtcagcaccagtgggctccatttctgcagtagctcaagataatcataacactacagagaaggccatcatgaccagatgcgatccagcgaacgcatgcacgacatacgttcgtccaagctgagacatcctcgttcaggcaagtagtccacatgctgtccggctcctcggacacagcgagatatgcagccgacgcgcgctcttcgagaccttcgaactcgatcccaaccatgagatccatacgcattattcagcacttttctaagctctaccagcgcatatcaaagtcactgaatctcaa

SEQ ID NO: 100123 - DNA, 420 bp, Glycine max
  Clone ID: PAT_MRT3847_61426C.1
ttgttttcctcaaaacatgaagctttgaaaatcggtccaactggcacaatcaaataagatcaacaaaatttactttaagaacttcatactcctcattcctagtttctgtgctccttcattactagactctgtgacagaccgttaccattgtccgagactaattgaccctgcatctgctgaaatatcaaaggacatgattcgaactacaagaaacatagccaccattgattccaacattctggttactataaactcaaaaatgaatttactaatagatgaaacaggacacatttcccatataccactaatcgcagactgactggtaacatgtctatcataatatcattcagcatcagagtacatgattgtgaacactgttcacaatcaagtcgatggctccaatagacctaggcctctttg

SEQ ID NO: 100124 - DNA, 455 bp, Glycine max
  Clone ID: PAT_MRT3847_61427C.1
ggaggagggcaatgacttcaagcgacaaggaactaatacccagattggataatttaatttctttatccacaaaggagttgggatataccccccaacatggcgggttttacccctaataaatgaacctgaacctaatctcccacctttaaaccaaaaacccccttggattggtgaaaggtaataacccaagattcctaataaaaattaaccctttttttttggttcccaaaatggttaaaaattaaaggcttaaaaaccacccaggggtttttttggaaccggtccaagtggtttattctttggaagttggttctttggcctaaaaaaaaccttccctttttttggcctaattattggttttttttttttaagttccctggggaatggaacaaatttggtttttaattttttttgaagttttggccttttttttttcaagttcttcttaattcttt

SEQ ID NO: 100125 - DNA, 357 bp, Glycine max
  Clone ID: PAT_MRT3847_61428C.1
cttattttatatatatatatatatatcgtctattctctttatacatagtcaatacctctaaaagtgagtccttcacttgacacatcataaaaacggcagcacgttcctacagggccaacaggggggccctctctttgcaacttttggtcacattctctaacccataaacagctgatacacccaggggaacacttcctacttcaaactgtaaaccaatgtgaacgtaccgttgctctgcagccggccacgagaaaccatacacgtactactgtgaaaggtggagaccacaacgcgaagacgttgctgctagtacatagcgctaaccgcaaggttggcgttgctacatcagttgcaaga

SEQ ID NO: 100126 - DNA, 367 bp, Glycine max
  Clone ID: PAT_MRT3847_61429C.1
atccagaatcaggaaatcaaatacacaggtgaaaaatattggtgacgacagacaactgttcagatacggtgataatatatatatataccaaaattttggcgatctgaaagccagcgcccacttgggaatatttcgtggaagtgtaacaaataagccccaatcttaatttcaaaaagaccaaaacaaggcatgggaaagtgatgaatgtaaattctatactttctaatctgatctaaattgcactcgttaaaaactctgttcttgtactatcggttctagaatcaacatcattagctttaccactttgcacatcaaatttggatgttataactcctgcaatactcagtggggtattacttaaagatac

SEQ ID NO: 100127 - DNA, 631 bp, Glycine max
  unsure (1)..(631): unsure at all n locations
  Clone ID: PAT_MRT3847_6142C.1
tctttctactataaaccttctacacctcactcctaccttcagccacccctcaagtcctgtttgacatgcaaggtaatgatcttcaaaatggtgggaaatattatctgttgccagtaatacagtcatcatatgctggaataacattatgcgggagggcaaaanaaanatnccctctcactnttntacaatctccccatccatatnataangnnattccaacaattatttcaaccccatatccacttcctcttatccacaaaaactttcctttcaacattaccttacctaattctacaattatactgccttgtgaaccccttacttctcactacaccccccctaatccacaaccacaaccacccccccccccacatcctccccccccccactccccaacctccccccctcccaccccacaaatccccacctccccccctctcccctcgaagacaccccacaacctcccccaccccgtcgcgcccccactccccatccctcccccccctcgcaaacccccccccccacccacccctccccccctccccccaccccccccccccctcccccccccctccaccccttccttccccccccaacccccccccccacctacctccccccccccccccac

SEQ ID NO: 100128 - DNA, 874 bp, Glycine max
  Clone ID: PAT_MRT3847_61430C.1
tgctaatttaaaacccttcaaattctccacagccaaactgtttcataccatgccaccaccgtttccacacccatatctctcagccttcgaaatttctatcctttccttcggggaactgctccgttcctgaaaccatcatctgggtcgcacattttttttttttaaaaaagaataatctccgatggcttcggcggccatattctcgtcgctacggcggcgccggtctccgtcgctggaggcgtttctggtgccggtcgacctctccgacgtggcgctgctggagactcttatctccgtcgccagcgacgtcgcgtcctgcttctccggccaccggttccccttccagcgccggaactcgcgtgccctcatcggaaaagttgagattttccggtcaatgttggagtgtctgagagactccgctgccgccggagctcttactccgacggcggtgctgtgcttaaaggagttctacctgcttctatatcgctcaaagattcttcttgattactgtgcccaatcgagcaagttgtggctgctgcttcagaaccattgtgtttctggtcacttccatgatctgagccaagaattttcgacccttttggatgtttttcccgttggggaagttggcctcagtgatgatgttagggaacagattgagttgttgcagagacaatccaaaagggctaagttgttcatagataagaaagatgatgttcttaggacaaggttcttttggtttctcgaagagtttgagagtgggagggttcctgattctaaggacttgaggtgtttctttgtggataaactgaggattcttgatgctaagagttgtagggtggagattgaagccttggaggagcagattgtgaaccac

SEQ ID NO: 100129 - DNA, 199 bp, Glycine max
  Clone ID: PAT_MRT3847_61431C.1
gctagcatcctctatagctttcgtttttttttttttttctacaactaatcagcaccaaggctacccaacatatggaccctaccacgagcaattaaattttataaattaccttatacatttatataacaccctatacaaacccttttacttaccgcaaaatccaaagaactggaccaaaatcctttaaaacaaacccaac

SEQ ID NO: 100130 - DNA, 404 bp, Glycine max
  Clone ID: PAT_MRT3847_61432C.1
tttcacgcgtgcgtccacgcgttcgtccactcgttcggtagagagtgccttgcattaatcatagcgtagattcataaacaagatgagagcataagtaggagagtgggagacggatcaggtgttgtggagggtgttgcctttgctgacaaaccttgactcctttgaagtgtacttttacttgcaggatccttacacagcacagatttatgctctcataaagctaccacgggattagagcagactcattgcgcatcgccactggaggatatccagcatacgcattgtgaccccacaggggatcatttctggtgcagagggacaaactacgcgagaatagtctctgttgacgagggacatgcttaccaggggacgcgctatctagatgaattgattgattatggcga

SEQ ID NO: 100131 - DNA, 508 bp, Glycine max
  Clone ID: PAT_MRT3847_61433C.1
tcttacgcgtgggcggacgcgtgggctttttctctctgtcccactgactttgggcgttacgcgtgacaattggaggagggcgctgttgatgaactcgtcctgctggagcagggcccacacgctgcgcttctccgccgcgtccagcgcgcgcccccgttgccggccacgggcactgccggcggggacggcgccgtcgtcgtcggcgagcggcggccaaattcggcgcaataaatgacgcttgtacctgcgaggccatcccagacgaagttgcagcacgtgtttgttgccgctccgtgtgtaatccgccagcgtccaattgcgcggcagaatgccaatgccgtcgtcgacaccggcgcacaaagtgtcgcaaaagtcgcccgagtaatggccgatacgccattccgcgcacagcgcactaatgatagagttggcccttaaaaaacggaatacacaagtacgtttttttgccaaaattgtaagttttttaaattcgctaaaaatgcaaaat

SEQ ID NO: 100132 - DNA, 442 bp, Glycine max
  Clone ID: PAT_MRT3847_61434C.1
gtggaaaatgagattgatagccttaaattatcagatatgagaagacatacagtgtcctacaatcgttgttcagatgaggtaactcactttgagattgaggcctcagcagaattgatggcagacagttcagtagaaaatgcaaagaacacaaaccttcaactagaaggagaagagctaagtaatggaaatgtgccattggaagaagcagtggagcacttaatttgtgcattcgataaagaagatggcaatgatgagaaattggctccagtacaggaaaagtctgaagtggacattgctggaaatgatatagatgtagtagaagagttaaataatggaaactcgttactagaaagagcgaaaaagatttattttctggattggatagagaagaagtcaataatgataactcagctctagttggtgcaaatcctaaagtggacat

SEQ ID NO: 100133 - DNA, 754 bp, Glycine max
  unsure (1)..(754): unsure at all n locations
  Clone ID: PAT_MRT3847_61435C.1
ccacgcgtccgcaagcccacaaaccgagtctatattccaaacaattcttcctttacttcgttttcaaccttcttcttccccacctttttcctcctttttgatccttctcttgcttgcctccagcactatcccacaccacaccccatttttttctttcttaaaaccctctcctttgtctctcacaaccgcacatagtcttccactaccactatatatacttttagttgcatgattagcccacaaaacaaccatcttcccttttttcctctctagttcatcatatcttcctttctctttcattgaatcaaaggaagaactactattactggggaaccacattgaaaaagaagtgagagaggagaagcaagtgccacagaagaagaagctgaatagtgagattaaagatgaaaaggagtgtattttactatgtaatatttctcctaatgtgtcatttcctctgttcaggttcaattaggacacaaaaggaagtacctggacatgtgaatgtactactaggacatgatcaaaggaaacaagaattaactgcctcaatttctacagtccaaagggatattaccactcccatcaccaccattccaaacttagttcccaccactcccaccatttcaacatctccattcctgaatcctaattncaaccctgacacggtctcttcagccttcacaatcccatttagcactccaaccacntgtgaattccccaatgttctcaggtgcaagtttggtgtattgca

SEQ ID NO: 100134 - DNA, 421 bp, Glycine max
  Clone ID: PAT_MRT3847_61436C.1
cgcgtctgggattgacgtttctggcgaggtacatgtacaatgccttcggctactcgcgcatgatgctagcaaagtacctcaccattgcatgtaccgcgtctcgctcgctatgaggcataatgcggatcaaagaactcttgtggaaacatgggggcataatctcgagaaacatgcgccgatactacatttaatcatcatgatggctattggaagaagcagtcaacaacggtggaaatggatgaccaggactcaattggtgcaagatacacataactacgtggaaggctctctaccctgggagaaccttgcagtctgattatcagacaataggactaccgagggttgaaaattggaactgatgggaacttacagggagcggacttgcacagaaatggtgaacctacatcatgacatttcgatg

SEQ ID NO: 100135 - DNA, 477 bp, Glycine max
  Clone ID: PAT_MRT3847_61437C.1
aggcgcgcgaacgtcgcgcttggatagctctgagagcggtcgagctgtcgtcctttttttttttttaaatgtttagggcgggttaatatatgagggatactaagcggatcaatggcttgaataaattgatacatccacccgatgaaaatatggccgaacaacctatactattctccaatcacaacccttatgccaaggtttaccattttgaataacgatggtccatgtatgtcttgacataaatgaagcgactacgctctatgctagccgagcgaaccagtattgtgttattagcatcttcttaaaccaatgtattcctaacctgctttaacagttaggatacccgtagtcgaatgcgagacccttgagtgatatctttataatttgcattaaccataccctgtgagaactacaatgatgcattgccatgaaagcgaacattgatgacaatgcaaccaacggattgccttttatgaa

SEQ ID NO: 100136 - DNA, 283 bp, Glycine max
  Clone ID: PAT_MRT3847_61438C.1
gcggctcgctcatgctagagagtagaagagggctccttcttctgctgcatcgatctcacaatgcttgcttggattgggctggcatgtgccagcatcctcactcctagatggctctggtagcatcagagggagccctaccaccctctcctgctaacaagagcactgcagctggcagagagctggacttatggcggaccactatggtgtgggcacctgtcctggatgccaagaggactgctgtcctgcgcctggttccggttcacgcgagagatctgacggatgg

SEQ ID NO: 100137 - DNA, 512 bp, Glycine max
  Clone ID: PAT_MRT3847_61439C.1
ggtcgagagctgataaaataaaccccggcagttgcagtctctgtggcagaccaatgcaatttgagatgcagctgatgcctgcattactatactttcttcaggaagcacttggtgaccagagaaagatggtggaaaaatgggattggatgacccttattgtatatacttgctcagaggttggtattcttccattgtcgacttcataagttttccttacccatttacaagtttcactatataagaaaggctttgcagtgataaagctgttagatgccaattgtatctatagtatgtaccatgctagttatatcagccagatgcttgcttattaaaaaatgcagccatccctcgaaacctggttgattgtccagccattttaccccttcatattagccttagttgctatatttcctcctttaaacattttgcattttctgattttgattcaactatcttcattggtttcattgatgggagtataaggtgtctgtgttttgtgcaaacaatgtatg

SEQ ID NO: 100138 - DNA, 306 bp, Glycine max
  unsure (1)..(306): unsure at all n locations
  Clone ID: PAT_MRT3847_6143C.1
actcntacgtaatctcanaattcntctcnatcctcangcaacntatcnntaancacacccacattntnagaacatccatcattcnnancncataacacnntcaatccaancaactannatcntcgtccanactacanngcctaacattctagatannanntttcaacacaaacatttcatatacgncanancnttatacgccaaaaannctnctcaanatancatcaacaantttcngancacttccaaacttgnaaantccaattcttncattaatncnnaaaatatnntncncatcagnacctt

SEQ ID NO: 100139 - DNA, 506 bp, Glycine max
  Clone ID: PAT_MRT3847_61440C.1
aaaaaaattaaaaaaaaaaaaaaaaaaaaaaaaaaaaaaaaaaaaaaaaaaaaaaaaaaaaaaaaaaaaaaaaaaaaaaaaaaaaaaaaaaaagaaaaaaaaaaaaaaaaaaaaaaaggtttactttttaaaaaaaaaccaagttttagttttgtgtttaaggaaaattaaaatttttttattgggggacctaaataaaattaaatgaccggaaattccacacctttaaaaaggtaaaacccttgggggaccatactaaattcctttgctaacaaaaccctttttagaacctgacttattttcttaaaggcccctaacttaaccttttttaaaaatttttcaaaccttataggggaaattaaacccccttttttgggttaattaaacccgggggaatgggtttttttccaaaggggttactttaaattttttaggctttttacccttttttttttgatatttttcccttttttttttggaaatttttaatttttttgcccctttaa

SEQ ID NO: 100140 - DNA, 257 bp, Glycine max
  unsure (1)..(257): unsure at all n locations
  Clone ID: PAT_MRT3847_61441C.1
gaaaaaatattcatggnaaaagaaaagtgaatcgcacaaagacattacaaaatgaagactttaatctcttattcttctctctaacgcttganaattctatcaaagcaaatcagaggaaaagctcgagggatctcaggaaattgctagagatgtcattatcactgtcagaatacacacgtaagcctgcttngaggagggagaggccctgacggattctttgaagtgtaggccttagagatgattaaatgaatgactat

SEQ ID NO: 100141 - DNA, 219 bp, Glycine max
  Clone ID: PAT_MRT3847_61442C.1
ttttggttttgacagagacgatcagcgaagagtatggggcgatcatgactctatataacctgacttagttctatccttgaaaccgacgtgatcaggatgcaacgtgtccatcagcttggttcgcttgttggactcaaggggtcagccacctgggacacaaggaggagaaattctatatatacaccccaccggcatcaactgactcagtccatatacaca

SEQ ID NO: 100142 - DNA, 372 bp, Glycine max
  Clone ID: PAT_MRT3847_61443C.1
ggggggaaggaaaaaaatttttccccctattttttttaattttttaacctccctttaatcggtcccattaattaggggggaaaaaacccccataagacaccaatttttaattctttggtaccaatagcgcaaaacccccgccgtttttttggccattaaaattatttttgggcttgactaaggggggaacagggctgccttctttttttcgggggtgttccttatagacctcaacccaaactttgcccaaaagaaaccggattctcttattacccaaaaaaatattgccgccctttagggccatggaagcccctaagacaaccccgggggacaaaatctccctcaacttccaacaggttgggattgaagagg

SEQ ID NO: 100143 - DNA, 939 bp, Glycine max
  Clone ID: PAT_MRT3847_61444C.1
aatgactacgtagttaagagaagccagggaagatctccaaaatataacagccccggatgaaaccatatgcaaggagatgaaagtgaacatcaaagagacaatggaaaaggaagaagaggatcgtagaagagaagctgcaatcgcatcctcatcctgtctccgacccaatttcaaccctaaaggcataacccaagaccaactctcaaaatttcgtgaactacacaagaggcgcttgcaactgaagtcaaaatcgaagttcaaaatgaaatccaaagatagggccaacaaaaagtcacatggtgatgttctatcaagccaaaacggtggaactcaaggttcaaatgttgatcacaaagaatcaaacttgtggaatgattgtgaaggatttgattctagatatgaagactcaaaggatgatatacctgtgatgtctgcaccaaagaagcaaaagttacattgggggcttgacaccaagaacaggtgggagaggaaatccaacatgtagatatcaacatggaactgaagtgaggaatcctcgaatttggtttaaacgattatgaaaaagggtattattcgaggcaaaaacaccatggaagtgctcatgacattgtgttgcagttgtacatgttgcacatgctaataagagaagatcagtaacactgccttgttgtttatagcaaataatgttggtaaataagaagctaatgttatatttgatatattagcattattaatagtgtatccttcaaacaaatagattgatctttagagcgaaaaagataacttagaatttttttatttaaggttcttattttatttgtcacagtgccaccttttccttctgatatgtttctatgtggttcattcatctatttactaaacaaatccaatattattatttgcttcttacacgtttattatatcaaaggatggtcgtgg

SEQ ID NO: 100144 - DNA, 381 bp, Glycine max
  Clone ID: PAT_MRT3847_61445C.1
tttttttttttttttttttttttttttttgcagcaggtttttgctttttcttataaaacagggggggcactaaaattttaatgtggtaacttataaaaactactacttaagccccttaccacaattacaacaactagttggatgatataaaagaatgctacctttaaattcccacgcatccagcatttttttatcaacggcctataacagtgctcaatctttaaactttcctattttaaacgatttacatttgaaaatgatgtttatttgcaaataaaaacaattatgcggttaacccattaactttcactggctcaaagaaagcccttaaaccctgggattttttcctggtatgggtgcaaaagattaaattttctagac

SEQ ID NO: 100145 - DNA, 1816 bp, Glycine max
  Clone ID: PAT_MRT3847_61446C.1
tcgcttcgggatgttttcttggttaccaagattatataggatcatgtgtagattttagatggcagaaatcttggtttatgaattttgtcttgtcccttgcaatattttcatgccgataataattaacaagctgacatggctcctgttaatgcagttgagacatttttcaagaagtagcaaagctccttctacaatattttttgacttggtgctttccttttggatcttacaatgggaaacagtgaggaagagaaatctaccaagactgaaaaaccttcttcacctgtaacagtggatcaagccaatcagaccaaccagaccaatattcatgtctatcctgattgggcagccatgcaggcatattatgggccaagagtcaccatgccaccatactacaactcagctgtggcttctggtcacgctcctcacccatacatgtggggaccaccacagcctatgatgccaccttatgggcctccttatgcagcaatttacccacatggaggggtttatactcaccctgcagttcctattgggccacatacacatagtcaaggagttccatcttcacccgccgctgggactcctttaagcatagagacaccacccaaatcatctggaaatactgatcagggtttaatgaagaaattgaaagagtttgatcacggggacttgcaatgtcaattggcaatggccatgctgaaagtgcagagcgtggaggtgaaaacaggctctcacagagatggagaagggaaaactgagatacaaggcagtccaatttccaaagagactgcagcttctaataagatgttgggagttgtccctgccagtgttgcaggaacaatagttggacatgtagtttcttcaggtatgaccactgcactggagctgagaaatccttccagtgttcattctaaaacaagtgccccacaaccttgtccagtattgcctgcagaagcttgggtacagaatgagcgtgagctgaaacgggagaggcggaaacagtcaaatcgagaatctgctagaaggtccagactaaggaagcaggctgaaactgaagaactggcacgaaaagttgaatccttgaatgctgagaatgcaacactgaaatcagaaattaatcgactgactgaaagttctgaaaaaatgagggtggaaaatgctacattaaggggaaaacttaaaaatgctcaactgggacaaacccaagagataactttgaagataattgacagccagagggctacacctataagtacagaaaacttactatcgagagttaataataattccggttctaatgatagaactgtggaggatgagaatggtttttgcgaaaataaaccaaactctggtgcaaagctgcatcaactgctggacacaagtcctagagctgatgctgtggcagctggttgatacagaaaaccagtaattgtactggctgatcaggtagttttggcatattacaagcccaaaattactgctaacaatttcctgagggatggatcagctgaattttagtatccaaatccatcaaaatcagaactaattcattgtttacttaggacctaaactctgtattctattagatttgacaaaaatggatgaccaagtttgtaaaatgaagagaactagagatttcagattggagggggtttgttgaaacgctacataattgcgtatgtattaacgattggtgtggagactttctaatgatatctaagtaattattctgccttattatttgtttggtttgtattttgtgctagctaaaaaaaaaaaaaaaaaaaaaaaaaaaaaaaaaaaaaaagggcgc

SEQ ID NO: 100146 - DNA, 551 bp, Glycine max
  unsure (1)..(551): unsure at all n locations
  Clone ID: PAT_MRT3847_61447C.1
acgagctcaagttgcttaaaaaccctcattttattgctaagccagcccttcttgacttcacccggagcattattctcactggcggcgctcctactcataatattctctccgctgctatttccantattcaagattcccttaaacattctaactgatccactcacaaagccacatcacttgcactcaccaatattgctttaagcactgcttctttcttgggatttttcaaggcttcctgtcttcantcccttaagtcttgtcaatttaacaaagtgaaaccagttaaggatgcanttatacaancactcaagtattgaactattcttcccactcccccagatacacccaacccttctaaaactgaatcctccttaaaagaaaacatctacagaagtaactcctctaatcttagcantactactactaaatccagacacatacaaaaagtcaatatgaaatcaactataagaaagatccctttctctattaaaaattatacgaagaacaatcaccagaaaccagatgattaagatattcaaattacagtcccc

SEQ ID NO: 100147 - DNA, 419 bp, Glycine max
  Clone ID: PAT_MRT3847_61448C.1
ggttttcgaaacaattaatcaattcgttaaatctgttgttcctttaatagtttaagctgagcgatatatatatatatatatatatatatatatatatatatatatataatgtaaattaaaattaaaaccgatcatctaattaaaatagctggggaattaaaatggaccacacacacgtaccatatgaaattttctttctgttacaacaagatgtgcagtcactatattgattgtgatttaattgttttatcacaaaacactatgtcatttaacatgaatgttgtctatttaggttaaagcatctaaagctagaattcgcttcagattaagatatattgttgttaattaaaggactaactagtcaatagtaaccgaaattattaggatgtatgctgattttgcaatattacgaacgatgg

SEQ ID NO: 100148 - DNA, 176 bp, Glycine max
  Clone ID: PAT_MRT3847_61449C.1
tgagaattcaaacctataacctcttacatctgagacctaattgaaagatgttttcgaccaagttatctcactcattgaatttagtgtataagcacttttatgtggtttggaatggtctagtcttcaaaaaaagattaaactaaaaagttctcaatgcaaaaagtatggtttattgg

SEQ ID NO: 100149 - DNA, 190 bp, Glycine max
  Clone ID: PAT_MRT3847_6144C.1
atttttctgtctccttggtatgacttttctgtccttctgcaactccaacaggtcttccatagggggaaaaagtctagcaatctcctcagcctttacgctccttttggacggttttgcaatctcacacatcacccaagacgaggcagaatgttacgggaaactacttgggctaggtggctatctacactat

SEQ ID NO: 100150 - DNA, 493 bp, Glycine max
  Clone ID: PAT_MRT3847_61450C.1
ggttgtttgaaatgccaatattttttgcaaggcctcttccggccgagaaaaagcttccaattctgaataaaaccccagagccaacagagtcacaaaaggacacgttgagtgacgacggccaagacaaccaggacaggggtgcctcaacttcctcacagaccaacctaatgaaaaatgtgcgaattcttcggaaagaggcggcggaaacatcgctcgagccatacattcagtttcaatgttttgcgcatttcgcaatttcccggaaatgtgttaacgaattgtgcgctgatgtgtcctcggatggcgtcgatgtccacatttttttcgaggatgactttccgcgtcttccccgcattggcttctcctgcctgtctttgcaagagctttacgaagaccgtgctctgctgagtgaaaaaaacgcaacgccagaccaactcagtttcattcaattggtgcgttttgtggacaacgggttgaacgaaatacccaattg

SEQ ID NO: 100151 - DNA, 287 bp, Glycine max
  Clone ID: PAT_MRT3847_61451C.1
agttattccgaatttcggacccctaaactgggtatgaaaacccattggaggcctttactgggggcctaactgggttaaaacctaaattggcccaaatgggtgggcttttgccttccgccttattaaaaatagctttgggtttttaaaaaattggctgggctttttggggaacaagggcacaacccttttccggataatttactaaaacggggaccccattttgggttattttagaaaaaccgcccatcaaggcctttgttaaccattgggttttaaaaaaacgtttt

SEQ ID NO: 100152 - DNA, 202 bp, Glycine max
  Clone ID: PAT_MRT3847_61452C.1
gaaagatgggagacgccagtgaggtttattaagggaagcgtggctagcagagactagagagatagaattagaattaaaaagcgtgaaagacagtgataggtttggtttggaaagaagaagaaaatgaaggccctagtgataaccaggcccggaagtgcccaagtgctcccacttgaggaagtggaagatccccctatcggag

SEQ ID NO: 100153 - DNA, 321 bp, Glycine max
  Clone ID: PAT_MRT3847_61453C.1
attcggctctaggaataaacatctctagatcctcaaaaggcgattattaacagaaaagcggtagtgcccacaactggacactcgcaagataatgcacgatacacagaataaaaaggagtgttactgattacagcactacacacgcgagcacagattaataaaactacgcggctgtgaatatgcagctgaagataccacaagaaaaatctaaaagaagaactaagagagagggggacgggggctaaggtgcagtatggcccggcaattaatctcggaccgagacacagcaggcggaccatgaaccctatactagaccatatt

SEQ ID NO: 100154 - DNA, 192 bp, Glycine max
  Clone ID: PAT_MRT3847_61454C.1
gtctagccatgtttctcacacctgtgttgcacaccctatgcgtgtatcatctggccatctgtaatgaaaacggtatggtgactgttacagggactttggttgttgcggctctggcagagaatctcatggcgaacctgaacaggagggttgaggtggttcctccacgctactgctaggatcgtggtagtgtgt

SEQ ID NO: 100155 - DNA, 2999 bp, Glycine max
  Clone ID: PAT_MRT3847_61455C.1
ccacgcgtcgggtcaaaatcttcttgcttctgaactttcttaattccgtggtgaattcttcactttgatcatcatcatcttcaatttcacaacatgaagcaaggatgtcacagcaaggcgaatcatcggacccgaaatcggggaagaaggacttctcaaccgcgattctggaacgtaaaaagtcgccgaaccggcttgtcgtggatgaggctgtcaacgacgacaactccgtagtgaccatgcatccccaaaccatggaaaagcttcagcttttccgaggggacactatccttatcaagggtaagaaacggaaggatactatttgcatagctcttgctgatgagaactgtgaggagccaaagatcaggatgaataaagttgtgaggtcgaatttgcgggttcggcttggagatgttgtgtctgtgcaccagtgcccggatgttaaatatgggaaacgtgtgcacattcttcctattgatgataccattgaaggtgtcactggcaatctgtttgatgctttcttgaaaccctatttcttggaagcttaccgtcctgtcagaaaaggagatctatttcttgtccggggagggatgagaagtgtagagttcaaggtggttgaaaccgatcctggagaatattgtgttgttgctccagacactgaaattttctgtgagggggagcctttgaaaagagaagatgaagagagactggatgaagtcgggtatgatgatgtgggtggtgtcaggaaacaaatggctcagattcgtgagttggttgagctttcattgaggcattcacagctttttaaatcaattggtgtgaaaccacccaaaggaattttactttatggacccccaggttctgggaagacattaatagcaagagctgtagctaatgaaactggagcttttttcttttgtattaacggaccagagattatgtccaaacttgctggagagagtgaaagcaatctcaggaaagcgtttgaagaagcagaaaagaatgcaccatccattatcttcattgatgaaattgattccattgcccccaagcgggagaagacacatggtgaagttgaaaggaggattgtttcacaacttttgactcttatggatggattaaaatctcgtgctcatgttattgttattggagctactaatcgtccaaatagcattgacccagcattgagaaggtttggtagatttgatagggaaattgatattggtgttcccgatgaagttgggagacttgaagtccttcgcatacatactaaaaacatgaagctatctgatgatgttgatttagagagaattgcaaaagatactcatgggtatgttggtgctgaccttgctgccctttgcactgaagctgctttgcaatgcattagggagaagatggatgtaattgacttggaggatgagactattgatgcagaagtactgaattccatggcagttacaaatgagcatttccagactgcccttggaacaagcaacccatcagctttacgtgaaactgttgttgaagtgcctaatgtcagctgggaagacattggaggccttgaaaatgtcaagcgtgaactgcaagagactgtacaatatccagttgagcacccagaaaagtttgagaagtttggtatgtctccatctaaaggagtacttttctatggtcctccaggatgtgggaaaactatgttagcccaagctaatgctaatgaatggcaagctaacttcatcagtgagaaaggggccagaactttgttgagctaagtttggtgaaatttatgccaaggttagataatctgttgaaagggcccggcaatctgctctatgtgtctttgtcgttagtgagattgaatttagtgatattgatgccggaggcagtgatgcagctgctggtgttctgtttgatagagttctaaatcaactttctactgaaaaggatggcatgtctgctaaaaagactgtgagcataattggggcaactaacagacctgacatcatagaccctgcacttctttgaccaggccgtctggatcaattgatctatattcctctccctgatgaggattcccggcatcaaatctttaaagcctgcttgaggaagtcacctatcgcaaaaaatgttgatttgagagcattggctaggcacactcaagggttcagtggtgctgatattacagaaatatgccagcgagcatgcaaatatgccataagagaaaacatagagaaggacattgagcgagagaggaagagtagggaaaaccctgaggccatggatgaagataccgtcgacgacgaagttgcggagatcaaggctgctcattttgaggagtcaatgaagtttgcacggaggagtgttagtgatgctgatattcgcaagtatcaggcatttgctcagaccttacagcaatcaagagggtttggaagtgaatttaggtttccagagtctggagataggactactactggatctgacccctttgcagcttctgctggtggggctgacgaagatgatctatatagttaggctttattatcacagtgatgtatgaaatcacatgtctacctcacctctcaggagggataactttgaagcctgtcttatattttgcttttcttgtactcaattatcctgaattgttaccgggttaaccttaaataccatatatggatcgtatcttcattttatggaaagatattgtagaaaaaaaaaaaaaaaaaaaactccccactaatgctctcgtctatttttgtacttcgcatccatgcaggaggttgaattaaattatgctgggttgaaggaattgtatgattttgttcaaatctgtagatgatttaaggagataatgttaggtgtttttcctatgtctaagtgttttttctagaaatgtctaaagtatcatcaacgcatgttgcgcgcacttgggaggctgagacaaactcatcaaaacattgtatctcaagagagtagttggcacctccatttaatgctctttt

SEQ ID NO: 100156 - DNA, 1386 bp, Glycine max
  Clone ID: PAT_MRT3847_61456C.1
gttgatgagtttttcttctttgtgatctattttcttattaaatgtctctgttgacaggttgttgaagtgcctaatgtcagctgggaagacattggaggccttgaaaatgtcaagcgtgaactgcaagagactgtacaatatccagttgagcacccagaaaagtttgagaagtttggtatgtctccatctaaaggagtacttttctatggtcctccaggatgtgggaaaactttgttagccaaagcaattgctaatgaatgtcaagctaacttcatcagtgtgaaaggtccagaattgcttacaatgtggtttggtgaaagtgaagctaatgttagagaaatttttgacaaggccagacaatcggctccatgtgtcctcttctttgatgagcttgactctattgccactcagagaggaagcagtgttggggatgctggtggtgcggctgatagagttctaaatcaacttttgactgaaatggatggcatgtctgccaaaaagactgtgttcataattggggcaactaacagacctgacatcattgacccagcacttcttcgaccaggccgtctggatcaattgatctatattcctctccctgatgaggattcccgtcatcaaatctttaaagcctgcttgaggaagtcacctgtcgcaaaaaatgttgatttgagaacattggctaggcatactcaagggttcagtggtgctgatattacagaaatatgccagcgagcatgcaaatatgcaataagagaaaacatagagaaggccattgagcgagagaggaagagtaaggaaaaccctgaggccatggatgaagacacagttgatgacgaagttgccgagatcaaggctgctcattttgaggagtcaatgaagtttgcacgtaggagtgttagtgatgctgatatacgcaaatatcaggcatttgctcagaccttacagcaatcaagagggtttggaagtgaatttaggtttccagagtctggagataggactactactggatctgacccctttgcaacttctgctggtggggctgatgaagatgatctgtatagttaggtttaattattatagtgatgtatgaaatcacatgtctacctcataggaagtgtccctagacttcctctttgaagcctctcttatattttgcttttcatgtactctaattatcctgaattgttactggcttaaccttaaataccatatatggtatgttcattttatggatgatattgttattgtagaaagtagttgagcatgtgcattcttggacgttctcatagtgtaattttcttctggtggggcatgtatgattgaaaaacaaactggtttggattttgagaaaatctttgtatggaaagaattgtgtttgttttc

SEQ ID NO: 100157 - DNA, 649 bp, Glycine max
  Clone ID: PAT_MRT3847_61457C.1
ttcgggactatcggagacattccactactggcatcatatcccgtgaacccatccatcctatgcctccaccgccaccccaacctgacgagacattgctccctaagtagacctctcatgataaatgctgcctcttctgctgatcttaaacatgctgtgtatgacaatgacatgtatcaaaaagaagaacggaataactcgtggtactcctctgcgtatcaataggtgtaagctctcgtgctgtcatctcaaagcttaatgatgccatcccgagaacaccataattcaaaaaaaattatactcctattctcgtcaccatgccaactgctaggacctatcgccactgacgcactataactattatatcactcctgatgattgaaaacgatctctggcttatctataccgcttacctcaattcatttgcccctcaccgaaccacactatcataagactatctacctttgctctctgtccttcgtgtcaccacgtcaatgctgaaccaaccctcgttattacctcacttagactttcttgtgttccctcaccctttcgccgaatgacagcttactacttatcccccttccaatcgaccttcccaacacaatttgcagcctgattggataatgggaattgtgtgcgttaatatttt

SEQ ID NO: 100158 - DNA, 150 bp, Glycine max
  Clone ID: PAT_MRT3847_61458C.1
ctcttttctcttctctgtctaaggggtgcctgagatcacattgaacaatggtgaaggtgtggccgtctggcagatgagggtcatggatatcattcgttcagaggatggcaacacgaactggtcctcgtggctacctgctcaggttcatgt

SEQ ID NO: 100159 - DNA, 426 bp, Glycine max
  Clone ID: PAT_MRT3847_61459C.1
cccttccttttttttttctaaccaacactttgggatactcggtcctctcattatactgggccccatgctcctctggccgattacatcataccgagactcgaggaacttctaccatgccgacccctcttgctttgtttttttcatgaagaaaccatccctcctaacctgcacaatagactaccgaactgggcctgactttgcacgatgcttaaattgaactctgactgtttaaagtgctttttaggcccccttggctcattgatgaccccaaacctcgtctaaaggagcggggcacccactcacagctgtagctcccccaccctgcggataacaccatattcgcgcgaaaaacagaggtctggacacatactggaggggccgcttctggatgcgaacaggagcttctgcagtggataaattggaagc

SEQ ID NO: 100160 - DNA, 483 bp, Glycine max
  Clone ID: PAT_MRT3847_6145C.1
tagccttttaactctttttctctttctctcttttctcttaattcacaccactatctaatttagagccttattggatgcaaagtagagaaagacccctaatgggcaaacttaacgaatatcccaggaatgaggaatgaaatagcttctgctatctactcactcttgccactgagagcttttgaaagtttcaaactctcaaaagcacgcacttatgacttatatccaaaatttctctactggaaaaagtttctctcaaaatcgtttgtaaatatggcacttaaccttcttaagctcatctccctggcaatcaaaatgagcattacaaaaagacccttaatttgaagaagtgggtcccattaacaagacctcgtacccatgttgttttgagtttgattcagcgacagaaagcaacataattatgctcccaaacgatgtcatttcctccggtgaaaaatactcgtttttgatttcaaagtgcattac

SEQ ID NO: 100161 - DNA, 1031 bp, Glycine max
  Clone ID: PAT_MRT3847_61460C.1
aatatacatagacttgcattccttgctggagccggattgcaggcttttcagcaattcataggcataaacacagtgatgtactacagcccaacaattgtccaaatggctggctttcaatctaatgagttggctcttctcctttctctcatagttgccggcatgaatgctgccggatcggttcttggcatttaccttattgaccatgcaggacggagaaaattggccctatatagcttagggggggtaatagcatctctgatcatcttggccttgtcattttttaaccaatcatctgaaagtggtttgtatggatggcttgcaattcttggtttggccctgtacattgctttcttctccccagggatgggacctgtgccttggacagttaactcagaagtataccctgaagaataccgaggaatatgtggaggcatgtctgctactgtgaattgggtctcaaatctcattgtggtacagtcatttctgtcggttgctgcagctgtaggcactggccctactttcttaattattgctattatagccgtgcttgcgtttatgtttgtggttgtctatgttcctgaaaccaagggattgacatttgatgaagtggagctgttatggaaggagagagcttggggcaagaaccctgatgctcaaagccttcttgttcggactgaaaatcattcctaggaatgcaaagcattttagtgcggctcatgtctatatcatgttctgctatgattgatattatgctataaagtgatataaactaattttttttttagtcactattattagtttggctgccacaagtttgcactcaaacttggcgtacacctcttttatttcagaccattgtgaatgtggagtgtgacaagattgcaacgcggacattatgctaaaaatgtaatcttgtaaagtattcattttttctttttctattccaacatgaagaaaagagggttattttcatgttttcttcagtatctaatcaattgtgccaaaatcgacatgaagtgatttacctttaa

SEQ ID NO: 100162 - DNA, 424 bp, Glycine max
  Clone ID: PAT_MRT3847_61461C.1
ggaaggacccagcagctcaacctttttaggtctaaaaaaacaggagcatagcgtacactcatcttgcttgacatcccactacatcaatgcgtcagtagccattgcgcctgactaacttatacaagacgggatacactgctctaccagaacaccatgacaatttctaaatcacagggatgtttaatgcctttcctgatagaagcgcgtagaaccaatcatttggggatgggacattcttttacgaaactcctaaactttccttactgcaagcctaccacatggtagcagctctgaaaccaatttccatgctttgctcggagcctcctgccgaactcgactatcggttgatactttggttatccatgtagagagaacaagctgattacctttgaacagtgacggagacctcacacttactctagcc

SEQ ID NO: 100163 - DNA, 539 bp, Glycine max
  Clone ID: PAT_MRT3847_61462C.1
gctttttcataagaaacaacttatttatagtattatggcaagccttagaattcgaccacctttgaaggacaaggacatcattgggaggttcatgcctgatggtcgttgttgcaagaagcaccccaaacaccgccaatcacccggcgtatgttctctttgtttgagagacaagctttctcaactatcctcggcatgctcatcttcttcttcttcttcgcgtaaaacaacattcatttcttcgtgtcattcgtcttcctcctcttcttctttaacctcctattgctcctcttccgcctcttcttgcgcctctccaacgcttcctttcccttttcataaagattcaaagagtggctccaattcggtttccatctttttgttgagcgcaaaacctggtggaatactcaaaagtaggtcaatgagcgttgttgcaacaaggagaagaacaaaaggtcaagatgaaggtgatgatcgtaataagaagactggcatgaaaagtgggttttggtccaagttgcttcatcccagaaccaaaagcaaga

SEQ ID NO: 100164 - DNA, 305 bp, Glycine max
  Clone ID: PAT_MRT3847_61463C.1
tccaaaagtccggttggacaaccgccaatttccttagaaaggaaggggggcctgcccagggttttgccctggaaaaggggaaaagagccgcttggtattctttcaaagggggtgttgattttagggacacaggcaccccggtggggtggggcccggcccctttttttgcgggaaagacagcgggaaggacccaaggcccgcccatattgtcgagggagcggcctggtatgccgcacataatgccgcggagcttgcttctatgtcggccgctgctgttaaaaggctggctgcttctgctggtgaga

SEQ ID NO: 100165 - DNA, 496 bp, Glycine max
  Clone ID: PAT_MRT3847_61464C.1
gacgtagaatgcacagccgcacgcggacgtagagtccggatcctgtatagcagtcgcgcttcacgcttccgtttgaacagtttgacactgtgtagaatgcgttttagatccaactgaccatttttttggcactcccttgcctaatgttgatgcttatatgacttacattgataacaatgacatgcaccggaaggaacaacacttataactgctggatctacagacctatctatgtatatatatgcatcgaatgaatacactacagacctcacccaacagattcattcgtggaggatgactgagtcacgttacgactgctgtaacaatattttctgacacatcggcaacctctgcctgtcgctctcgctcaaaggcttcctatttgacacccaatagtgtggcaaactatgatctgcggtactgatactctctgtggcatattgcttgaacacacggtcgctatgaatgatgcatgaccgcctcatggggctgtatc

SEQ ID NO: 100166 - DNA, 245 bp, Glycine max
  Clone ID: PAT_MRT3847_61465C.1
ttttcatagagagaatgttattacctagttagggtttttgttttatcttttagttacatagatgctagttcttttaaaacattttatttaagtttttggtgaatattattatttacaaatggctatgattctattgtagccaaatagcatgcatataaaaggaaaaaaaattgtacataaacagtgttataattcagtttcaagttttggcttttgttaatgcatgttgccagttgctaccatgt

SEQ ID NO: 100167 - DNA, 134 bp, Glycine max
  Clone ID: PAT_MRT3847_61466C.1
aaacgatcataagctgcttggtcaatggatcaggtttaccagcgcacaagtggtttctagggctaacagactacacaatcctattatgccaggactatgtatgctaaattgaagaatcaaagggaagccatctt

SEQ ID NO: 100168 - DNA, 301 bp, Glycine max
  Clone ID: PAT_MRT3847_61467C.1
aactttaaccccaaaatgtgctttttttacccatggaaactttattgcaattgttgctaagaatactatgaactagaaattcggtccttcttatgtttatatttcctatctccctttttcacacatttattatcgatcaaaccatttcatgacactacattttttcatttcagtgggattctaccatggggatagtattaaattaatggatgacatagcttctctaatacctactttcttttttattgttcctccgctttataacaaaatatattctggtattactaattcttttaaaaca

SEQ ID NO: 100169 - DNA, 1058 bp, Glycine max
  Clone ID: PAT_MRT3847_61468C.1
tattaagcaagtcaaaatcactgtttgattttgcagacaagtataggggttcttactcgggttcttgtccattctattgctcgtactcaggttaccaggatgaactgttatgggctgcttcttggctatataaggcgagtggagaaagcaagtacttgagttactccataggcaaccaaggttggagtcaggcggtgtctgaattcagctgggataacaaatatgttggagctcagacagtccgaacggaggaattctatggtgggaagaaagacttggccaagtttaagagtgacgttgaatcatttatatgttcagtgatgccagcaagtagctctctacagattaaaacaactcctggtgggcttctatttactagagacagcagtaatttgcaatatgccacgagctcaaccatggtgctattcattttctctaaaatcctaaacagaaatcacattgatagaatacattgtggttctgcgcttttcaccccgtctcagattagagcctttgcaaaaacacaggtggactacatactaggaagcaatccgatgaagatgtcttacatggtgggatttggcagtaaatacccaaagcaattacatcacagaggctcatccatcccttcaatcaatgttcatccgaccaaggtgggttgcaatgatggtctctcagtttattacaattctgctaatccaaatccaaatactcatgtgggtgcgattgttggaggccccgattcaaatgaccgattcagtgatgcaagatctgactattcccacagcgaacctaccacctacatgaatgctgctttcgtggcttcagtgtctgctttgcttggcaaaacgaccgatcgaaaccaaattcaggactctgcagtttccccatatcgatgctagggaaactaatgaagttaattaatgtaacataatcaccgattatatatgtgtcagtggtactagttatttaccctgccatatattgaaactccacttttatgggctggtataataaaatcatacgtactgttttaccaactgccaaaaaaaaaaaaa

SEQ ID NO: 100170 - DNA, 444 bp, Glycine max
  unsure (1)..(444): unsure at all n locations
  Clone ID: PAT_MRT3847_61469C.1
tcccgcctcgacccacgcgtccgtcncttttagcgctcgcgctgttcggtgtgctctccgcagtgtccgttgccttctctgaacgtggggggcttccactctccgatgtgcaatgcttccctcgtggggccctgcgtataatcttttatgcccccggcttgttgggttcctcaccgtgccaacgggcttactgttcctattccgactatgtgggggcgtgcttctctgttggcttgactagaatcatctctcccatctcgcattgtttaacgttcttctttgcggcttctcgtctcgcgggtcagctcactcttgtgttctcatagccttcgccctggttcctagtgcacgctcgcgggaaacaggatgcttgttttgtttgctctttcttttttttattccctctgtcctttcctttccccgtttcgtttgacactattgtcc

SEQ ID NO: 100171 - DNA, 1806 bp, Glycine max
  Clone ID: PAT_MRT3847_6146C.1
ccatttgccattggatggcgctgctagaatttgtactggtgccaccagtttcctctcccttttgtcccaaataaataccaaggggcaaaaattaaatgaaaatgatatatatatatttttttatcagtaaattaagtagtgaattaattaattttaaactgcaagcgttgggagaaaggaaggaagaccttatcatctccgaatttcattttcagaagcctctttgggaatcaaatccgaagcatgatgcattgtgcgagcattgtctcggctccgtcctacgcgttcccttttctctctggctccgcttccactactccaactgcgatctcgctcactaagcgcagttggaagccacctccgagcatggcaaaaggcccagtcagagccaccgtttctatagagaaagagaccccggaggccaatcgtcccgaaacgtttctcagaggagtggacgaggcccagtcttccacttcggttcgggcccgcttcgagaagatgataagggaggcccaggacaccgtgtgcagtgccctcgaggccgctgatggtggggcccagttcaaggaggacgtttggtccaggcccggtggcggcggtggcattagcagggtccttcaagacggtgccgtttgggagaaggctggggttaatgtctctgttgtttacggtgtcatgccacctgacgcatatcgtgctgccaagggtgttcctaccgatcaaaaacctggtcctgtgcctttcttcgctgctggaatcagctccgttttacacccaaagaacccgtttgcccctaccctacatttcaactatcgctattttgaaaccgatgctcctaaagatgctcctggagcacctagacaatggtggtttggtgggggaactgacttgacaccagcttacatttttgaggaggatgttaagcacttccattcaattcaaaaacaagcctgtgacaagtttgaacctactttttacccccgattcaagaaatggtgtgatgattacttttatatcaagcatcgaggtgaaaggagagggcttggaggaatattttttgatgatcttaatgactatgatcaggagatgctcctttcctttgctactgaatgtgcaaattctgttattcctgcttatttacctatcatagagaaaaggaaggatttgcccttcaatgatcatcagaaagcatggcaacaattgcgaaggggacgatatgttgaattcaatttggtatatgataggggtacaacatttggactgaaaactggagggagaatagagagtatacttgtttctctcccactgactgctcggtgggaatacgatcataaaccggaagaaggaagcgaagaatggaaactcttggacgcatgcatcaaccccaaggaatggatctaattcatcagttgaccccccaatttgtcagctttttaatttaataataagggagcttgtttcttttttcggtgtatatcaagtgcttgttatgatgagtcagaatgttagcttgttgtactaggtggattgtaaatcacgtattttgctagagtcatccgcgtaaagcgtgaaaatgcagaaaattacaaatgtctaggctgcgtctgtagtatacctactgccaaccattgttctttctacaagtaactcctcaatcccatgtaagaaaacaaaaggcagcttctttaatgccagtattgcacaacacctcagactagtaaattggtaattctgttgaaggtgatataatacttttgactgaaaaaaaaaagaggggctgctatatgtaagatcctatagtttgcc

SEQ ID NO: 100172 - DNA, 145 bp, Glycine max
  unsure (1)..(145): unsure at all n locations
  Clone ID: PAT_MRT3847_61470C.1
ggaaagaagcatctctaatctatctcacctctntcccctttctccaattcaccattcacacactctctctctnnncttctttaatnnaaganctttcgaanctttctctctcccagcgaaaccctaacaacganaatcgcgtgtt

SEQ ID NO: 100173 - DNA, 295 bp, Glycine max
  Clone ID: PAT_MRT3847_61471C.1
ctcatcgatctacacacatacttagtttctcctactacacgacgcacaagcatggggaagcctgcgaagatcggagagtcgggtggatacgccggcgatcgtcgggatctgagggctactccggaccggctgatcgaggtgaaggtcacggcggacaacagcagctgcatccgctccatctccttcatctacatcggagccgatggcaaaccgtacgaggaggggccatggggtttcggccatgctggcacggagtacaagattgatctgtgcaggttcgacgagagcttgacgg

SEQ ID NO: 100174 - DNA, 300 bp, Glycine max
  Clone ID: PAT_MRT3847_61472C.1
gcccagcgaaaggtcgtagagggaaatcctccttgatattaaatgttttcttaagggcgaaagttgctctccttgccactttgtagtggaaaaacctttgagttgtgtaactggggctggttcccttcttcacaagatttccctgaaaggtagatcggataggccaaagaattgttttcttttgtgctaagaaagatcctcatacaatgaggttcatgctcttatggaaacaagtttgcccaagttggctcttgatgttgttgacactcctataggttccatgttggatcttgttatctc

SEQ ID NO: 100175 - DNA, 505 bp, Glycine max
  Clone ID: PAT_MRT3847_61473C.1
ccctcgcgtcctttgggattactgctcccactctcctatgcggtattggacttcggggggggactgttctattcctctcctttatttcactgtcttcttctcactgatccgcattgccgctcaaagaggtcttatttgaaaaacacttgggcggcggtgcaaatgtctgcttcgttaattttctctggacacaacagggtcactgagacaaccttttttaactgcagagatttggacatctcggttgctcattatacaatagcaactcagtttagaatattgctaccacattacattaggtggcatctgtataccttgctgatctacattctcccatcttttctcactgctgtaagtgaatatcagcgggatcagagtaatattcaaatctccggcgtattttacgacggcagatacagattctggactgaacacgagacacatctcgctttgacagaagaagatagatggaagtgatagaaatagaggcattcctgctgatgtc

SEQ ID NO: 100176 - DNA, 439 bp, Glycine max
  Clone ID: PAT_MRT3847_61474C.1
tcttgtgccactcacatttgcttccaggctctagcattagttttctttcaagtcttctttctcagcaatgggagatgaggtgattctgctgaatttctggttaagcccttatgggatgagggtccggattgcattagaagaaaagggcatcaagtatgaaagtagagaagaggacttaagcaacaagagctctttactcctccaaatgaacgcagttcataagaaaataccagttctcatccacaatggcaaacctgtctgtgagtcactcattattgttgagtatattgatgaggtttggaatgatcaatctcccttgttgccatctgatccttaccagagaaaccaagctagattctgggctaactatgttgacactaagatgtatgaaattgccttgaagttttggagaactgaaggggaagagaaagaagctgcg

SEQ ID NO: 100177 - DNA, 1100 bp, Glycine max
  Clone ID: PAT_MRT3847_61475C.1
cacgccgtacgctaagcctcggcagttttcaactcggctcgtgtccggcctggcagcacaagaatcccatattctcattctcttaagccagtgattagaagccagtttttctgtgcttcatactacaccttcacaaaccccaagaagaatggaacggggaagaagaagcagctcttttggccctatgtcctcaaccgtcccttgttttctcctccttttgttctgtctctcaggatctgctgaggcctacaagaattatacagttggagactctttaggatggtttgacaatactgagaagtccaatgtcaattaccagaagtgggctgacagtaaagaattcagcttgggagatttcctcattttcaactcggacactaaccactcagtggttcagacatacaatttcaccacatacaaagaatgtgactatgatgatgcacaagacaaggacacaacccaatggtcagcttctgatccatccaacacccaaacacatcctgtgacagtggctgttcctttggtgaaggaaggcatgacatacttcttctcaggtgattatgatggtgaccaatgcaagagtggacaacacttcaaaataaatgtgacctatggacaagggttgccaaagagtcttaaatccccagaagatgctccatctcctgctagtcctgttgctggagatgatgattcagcaccagacactattgttccttccaatttcagtcaccccaaagaagaaaatgatgatgacaaagctagtgacgaccagaaatctagtagttctgtttcaattttaatgcatgcacaacttcacattgtcttattagggatactacttttcttgttttaaagagtcaagatttattttttatatatatatatatatatatatatatattttaaatatatgctactatttattgagcgatttttttttatctagtgtgagtgagacagtggggttttgagagattcaactgtgagctaggatataccatatattattattgttgtaaactaaaataatgtaacaattacaatcctttattgttatataagagtttcaatttagatcatataactccctttataaaaaa

SEQ ID NO: 100178 - DNA, 423 bp, Glycine max
  Clone ID: PAT_MRT3847_61476C.1
aaaaaaaaaaaattctccccttaaattgtttcatcccaaaaaagggttacctttttttaagcaagcaaaagcctcctgcctttttttcaaaactggttttcaacttttttgaaatcaattcagacccccctgttttttttcctgtaaagggccatttttttattccttgttacaaagcagcccccccccctgcatgaattcctaaatggggtttttggggaaaaaccaactggtgattctttaaaactggaaaaaaatttctcccactggggggctaaaacgaaaagggctccctcctggctcagataattttatgtttcacttggtttccaacgccgaacggacagaaactggggcttcgttactgtttctactcaaaatgttttgagcttttgctgcccactaacttagaagggtgctggg

SEQ ID NO: 100179 - DNA, 156 bp, Glycine max
  Clone ID: PAT_MRT3847_61477C.1
gcacttacatatctataccccccgtctctgatacgcagagcaacctttttattcccaccggtcttatctacgctctctaaccaaatgtaaaaccccctactgagcgaattctgggccgatggttcccaaagccacggttgctaccggggcctaaaa

SEQ ID NO: 100180 - DNA, 453 bp, Glycine max
  unsure (1)..(453): unsure at all n locations
  Clone ID: PAT_MRT3847_61478C.1
ggaagccacaatcaagagcttgggcacagaataaacatgattttgaaaagaagaaaaaggatgctgctgatgatgatattgatgattgggaacttccacatggtattgctgatacaatgggatgtttgcaaagggagggtcatttgcttcagggagagcataatcttttaggcgaagcatttcttgttatgtcttcttctgctgggtaaggatcaaacaaaagagataattctgttaatttttgtttaatactctgttgatatttgtaagtaaccttttcttgttattgctataaatggctcangatccaacaacaacaagatgttttaaggtggttactagaacctttaagcgttcagtggacacaattggagtggcaggataagtatttgtcaggtccacacggtttggttcagttgtgctcagatgtgcctgttatgtggtcaatttttt

SEQ ID NO: 100181 - DNA, 326 bp, Glycine max
  unsure (1)..(326): unsure at all n locations
  Clone ID: PAT_MRT3847_61479C.1
gggaagagcttttttttccaatcaaaaaaagagatcaattgcccccttcataaatattccgagaagttactcattactgatgggatgtcttactccacaagataaagtgcaagagctagtttcaacctaaaataacacattcaacactccctccccaggggggtgggcacaccccaanaaannaccacaccaaaaaacgcccgcaaccggggggggagggggggaacacaaaatattacctcaagggggggagcccacttaaagtgccacctctgagaagcccttgcaaccaacaccatcgaccccctccatttccacaagggttt

SEQ ID NO: 100182 - DNA, 304 bp, Glycine max
  Clone ID: PAT_MRT3847_6147C.1
aaaaaaagatcatacatagttactgtcggtgggtcgcaaagatgcttgggggccttcgagggaggggtcataagataaaggggacactctgtgttgatgctcaagaatgagtacgacgtgaatagcgtatccagcgaccctggaaggatcgctcaaggtgcttacttaatcaggacaacactccatactattactgcctactagggccgatccacgtttgttcagcttattactgctacccaagctgatggcgactgcaacaggaatcttagaaaggctacactttgtcgaatgtatcattact

SEQ ID NO: 100183 - DNA, 1869 bp, Glycine max
  Clone ID: PAT_MRT3847_61480C.1
ccacgcgtccgattacgttctctaaaattgattcccaaaaaactctatttgattccaccgaaaccctaaccccctttcgacgaacgaagggcaatcagttgctcgctccttggatccattcttgaaattctcgttatcgctcttcgaactcaagctctctcgctcacgatttctgcttctgcaccaatttctgcggtttctcaagtttggggtggctgtgactggattttgcagatttagaggttctaagtggttcatttctttgaagcatgccggggttaacgtgcaacgcttgcaacaccgaattcaaagatgatacagagcaaaagctccattacaaatccgagtggcatcgatacaatctcaagagcaaggtggatgcagtccgtggggtgacggaggccaaatatccggcgtgaaaatctgtatgttctcgggggtaaagacgagtgggtagaattagaagaattctatgattatagcagcagttatgtggatgatcaaggcaagcagcttgttgcatcttgtgatgcatctaacaatgtagaacttgttggtgggtctgagctcataatcaccaggaaatctggtgaaagaccatcaaccaaaacactgtgaatacgtgaatttttaggatagaggtggctaactctgaaaatgaggaaagtgaagatgaatgggaggaggttgatcctgaagaggatttggttgatggtgctgcaaagtccttgactgattgggatgttaatgaggatggagaagatgttgacagggggaggaagatgatgattttgaggagttagacccctcttgttgctttatgtgtgatcaagagcacaaaacaatagaagactgcatggttcacatgcacaagcatcatggattcttcattccagatgttgagtatttgaaggatccaaaaggcctcctcacctatcttggccttaaggtcaaaagggactacatgtgtctgtactgcaatgatcgatgttatccattcagcagcttggaagcagtcaggaaacatatggaggcaaaaagtcactgtaaagtgcattatggtgatggtgatgatgacgaggaggtagaattagatgagttctatgattatagcagcagttatgtggatgatcaaggcaagcagcttgttgcatcttgtgatgcatctaacaatgtagaacttgttggtgggtctgagctcataatcaccacgaaatctggtgaaagatcatcaaccaaaacactaggttcccgtgaatttttgcgttattatcgtcaaaaacctcggccatcactagcaaatatggctatcactgctgcgttggcttcaaggtacaggagcatgggcttgaccactatccaatcaagggagaagattgtgaggatgaaagtgctgaaggaaatgaataggtcaggtgtggacaatatgcgtaccaagatggcgatgaagagtaatgtcatcaggaacctgccaaagaatgtaccatattagtcctcactggtaatagttttacatgagtggtgctgtgtattagttttttctataaggtttcctcatgaaataatttttcatttcttgatcttatgaatcatccacaaggtatccatcaaaggtagtagagtgacatgatatacatgatattttccaatgaggaattaggcattttacttatttctttgtcgttagggttttcatcaacatctggatgataaggacacctttctggttggtgctttttttggggggagtggggcatgaagttgatatttattttatttttgaaaacgatggaaccataatgagtggaaattttaattttaaatcctagaggaattacaattttgcattctgatcgttttttatttgtt

SEQ ID NO: 100184 - DNA, 1142 bp, Glycine max
  Clone ID: PAT_MRT3847_61481C.1
cctcctccatttacctccaagacccctcaacaagtgcacgacgttttccttagctttagaggcgaggacacacgttacactttcacaagccatctttacgctgccctaacaaggcttcaagtgaaaacctacatcgacaacgagttggaacgaggcgatgagatatcgccctcacttcttagggcaatcgatgatgcaaaggtggccgtcattgttttctccgaaaactatgcttcttcgaggtggtgcttggatgaactcgtgaagattatccacgcgtccggaaaaaatgggcagattatagtgcctgttttttaccatgttgacccaacccatgtacgccatcaaacgggtagctatggacatgcttttgcaatgcacgaacaacgttttgttggcaacatgaacaaggttcaaacttggcggcttgtgctgggtgaagtagccaatatatctggctgggattgcttaaccacaagggtggagtctgaactagtagagaaaattgcaatggacatattacaaaagttggactctattacaagcgggggcctagaaagacgcatagcaacgtacaagcaaatggcacagcaaaagctagaaaagtcactgaagacgagtaacatgagagacatggaagacttgatcacgacactgctccaacttggggagctgaaattggagaaggccatgcgcactgatgattcgagcgtttgggatgacctaatggcaacgtacgagcgtgtattgcagcttaaacaggacaagtggatgcgaacgtttaataccaaagacatggaggacttagtagctacaaggcagcatgttatgcagattcagagggagcaatccaatcgtaagatcgggttccgcggtatatagacgcagatttaagttgaatagattttgggtagtgtgtgctaattatgatttatcaataatattcataatcatatgtatcagaattctcaaatgcatgtaaccgtaacaaattgtggccatacatcatagaattcaaagtagaggagaggagtgacattcatttgaggatacatatgattaaaattgataaaagaaaccaaggacggatgcagaaaattttagttgtggaggcaatatcatatatataacttagtgaggac

SEQ ID NO: 100185 - DNA, 355 bp, Glycine max
  Clone ID: PAT_MRT3847_61482C.1
aaaaaaaaaggggattttttatttttttaaaaggaaaccccccgtttttttttccttttaacttaaaaaaaataaaggggccctcttttttagaaagccccaaagataaaacaaatttttggaaaaccccggagggggtccctttttaaaaataaaacaggtcccccaacttaccttgggggctaaccttttaaaagaaaaacacttaaatgtttttgggagggaggggatatttattaaccccacccccttctttgggaaaaacaaaaaagggggggtttaaaaacccttggggggaaaagagggcgcaaagccccttgaatatttttaacagggcgtttttaggggaaaaagc

SEQ ID NO: 100186 - DNA, 190 bp, Glycine max
  Clone ID: PAT_MRT3847_61483C.1
tgaattggggcccatggctgaagctgcggagacttgcaacccaacacagatgactccttgtgggtgggccattaattaagggtctgcacctgcgagtgcttgttgccacaaactggaggagcaaaaaccatgctgctgcgggtaaatcaaagacgctagcttgatgcagtatgttaactctgctaatgcc

SEQ ID NO: 100187 - DNA, 1062 bp, Glycine max
  Clone ID: PAT_MRT3847_61484C.1
ccggaattccactctctcccgcaaagtcaggccaagactctctctctcactcagactcactctctcttctatgtgtctttctctttctagcttggtaatagtagtagtagctcctggtgttgttgttgtgttgtgatctattaaaggttagatatttatgctacattttgatgtttatgcttagtacccaattcgtgaaaattggtttatagctagctaggcatttgatgctcccgtcagagacaccccccagtaaagggaactctgctaaattctgtctctttcagtcatcgcaggatttttgagttagaatttgatgcccttggtcgtgccttgttcttggattccaaattccaatcccagaattttaattgcaagagtttgaagaacccttcctgtcctatcttttaaatcatgaaagaaaagaaacaagaaaagatactcattgttttgttcactcatgtcatgttggagcttcttaattagaagtgtgttgtgttttccactgccaacaacaacaacaacaacaacaaataactcatctaatcttgcttaataccaatgttttgatggaatgggggatttttagatgttgttgagtggacaaaggagaaaagggaatctgctttagttgtagtttgatgagctgttagctaaatctcactgtctatgtcccctttatgctctgaagactgaaaggttcacttttcttgtctgaggggaagcatttttttccccttttactgagcattcttgatcttagggttttagaagaggaacaggtaaaaaaaaaaaaaccaagctggtgagactgactagaagattatattccatttaccttttcttttgtttttctcatttatctaaggctacaatgagggttttcttttactttaacttcctctcagtcctataaagctgccaagttatttgttccttgtttagtcctgcaagatatctctagagccaacttagtcaaaattcactttaccctttaatcatatgcagttgtttatttctagatgcagccctgatgtgatcaaactgtttgagtctgattga

SEQ ID NO: 100188 - DNA, 205 bp, Glycine max
  Clone ID: PAT_MRT3847_61485C.1
gcttcagcggctatgcctagctaactcttccgaccttatttcacattatattccccgccttctctcgcatgtacttcaagtaaggcttctctgatcttatctgtggccactgattctcactatactcacacggtccgatttctacatactgcgaacctctgtgcacctgtgtggtacacgaggtgagccatacttgactctttga

SEQ ID NO: 100189 - DNA, 318 bp, Glycine max
  unsure (1)..(318): unsure at all n locations
  Clone ID: PAT_MRT3847_61486C.1
ccccagntacngaatnacaanctnncctnccaatggtcctntnnggaatcaaccatgtctgtnccggaaccaanagcggagnctaagatgccccctgtctaaatgtcganagcttcggctntggtacacgtnaattttaantaatatgcnatnngggggactgncatnggaatcgcagggatcgtcaanttgtttaacagtcgggttaaggnncgtngcgtactttgtncgggattnaggctngttgccttgtcnaancatgcattacattggttgggggacncttcnnatatgcctgttggaaccnatatngggcnc

SEQ ID NO: 100190 - DNA, 633 bp, Glycine max
  Clone ID: PAT_MRT3847_61487C.1
atactctctctctttctcacttacaggcacacaatctctctcttctatgtgtctttctctttccagcttggtaatattagtacaagtagagtagtagtagctcctggtggtgttgttgttgtgttgtgatctattaaaaggttagatatttatgccacattttgatgtttatgcttagtacccaattggtgaaaaaaattggtttatagctagctaggcatttgatgctcccgtcagagaaacccccctgcaaagggaaactctgctaaaataaattctgtctctttcagtcatcgcaggatttttgagttagaatttgatgcccttggtcgtgccttgttcttggattccaaattccaatcccagaattttaatggcaagagtttcaactttcaacaacccttcctgtcctatcttttaaatcaaaagaaaataagaaaagatactcattgttttgttcactcatgtcatgttggagcttcttaattagaagaagcgtggtgttgtgttttccacaacgacaaataaattcatcatctaatctttgcttaacaccaatattttgatcgaatgagggatttttagatgttgttgtgtggacaaaggagaaaagggaatctgctttactttgag

SEQ ID NO: 100191 - DNA, 419 bp, Glycine max
  Clone ID: PAT_MRT3847_61488C.1
ctgcacgcgtggggttagagccataagagtgatcaactcatctcaagacatgtttgttgacgagtggggtgtacacaacaacatcactgctgttaaccaatttgaattgcactcaggatggacactatctatgttgcactcttttaatgaatctgaaagaatgcacctattattctttctgtgagtagaggcacttatggcattgtttagtgatattcttaagaatcctgtcgtcacagagattgcatagagattgtggaagacaccatcacaagctgcccttatatggggcttgcattcacgtcatattgtgctttctatgagcactattgagcccataatcaagggaatatttgatatctctgacttgcctagaaggaaaacattaatgatgtgtaccttgtttctgagttaatgga

SEQ ID NO: 100192 - DNA, 266 bp, Glycine max
  Clone ID: PAT_MRT3847_61489C.1
ttgtgacaagtcactgaaccttatcagtacgaagaaggacaatcccgcaatgggaacagtggagagcttgaagttcgtggtgtggtcagagtacatcagagatcgtgccactttagtggttgcctatggaatcagcattaatcttgttgaggttacctgaaagtctaagctcaaagctcagtttccgagtcccatcgagtacgcggggtttaccggtgacttcgcacctgcacctggcattgcgacattcagagggatgcgctgtc

SEQ ID NO: 100193 - DNA, 979 bp, Glycine max
  Clone ID: PAT_MRT3847_6148C.1
cttgaaaagcagggctgacaccagaaatttgttagacacacggttaaaagctatcctagagagtgttcggttgaattatcttctagaaagggagggaagcaactgggatgcgaatttaaaatgggaagacattcttttccttggagtacagcggatcggtacccgtgggaaaaagatatatatttcgtgaatttatatacatttttttttaaatatcgtaagggcatttccagacttttttaccccccccctaaatttctcattcttgttgaaggcacaagtttattcaaaattaaaatgcactaactcagatgggaacagatttttctgtgatacaaaagacttttttccctgataaaacacggcatcaaattaagttgaagtacaagaaggaagagcggcagcagcctttacagctaaccgatgctgtaaataacagtgcaaaagatcaccctcattctaagttgtttattgaactactaaaactagcttccaccaaggcagaagaataccccggtagagatgcctcagatttggtgatggcggaggaggttgtggacctaaccgctggaactcatgaagaggttccgaaggctgcaacaaaaaaggaggatgccgatgttaaagcacaggaagattctgtggcagttcctagtccagagcaatctgatgacagtgacgatgactttcaaaaatggtctcagtataaatgtggctattagtgattaatgataaagaatgaaatataacttacttttatctcatttattttttattatagttagtatgaaattcttttaattgctcaataattgtgaaatcatttttccatcttctgattccatagtccagggcatttattattatattttttttcaattttgcatacagtattttctcaagaatgtattgtgaatttgtaatctacattcgagttcattaattccttataattgtgttatttgttcttgtaagaaaa

SEQ ID NO: 100194 - DNA, 460 bp, Glycine max
  Clone ID: PAT_MRT3847_61490C.1
ggctcgagaaacgacatatatgcagcgtcggtgttactgcatcatggttggtctagcctgggggctgtctctcccctggcgcagaaggtggatggagctagtgagatggcagaccatctgcgtgaacgactgccaccctatggctcggacacgcggcggcatcatctgctgctacatctacgacgtctgccaagtgctgcagggaccttcagctggagctctgcatagtcctcgctgtggaccccaggatcgagacttgcatgctccctgttgccgatggaatcactatctgccgtcggatcagctgatcactgatcatcatgctcgtggaccaccagcgcaccgatggctcacgctgtacagatgactgggcaccagctgatgacacctgctactgcatgaaccgcgctcagtacatctggctgcaaagcttgctgtgcatgtgcttcaggctagtact

SEQ ID NO: 100195 - DNA, 678 bp, Glycine max
  Clone ID: PAT_MRT3847_61491C.1
ccacgcgtccgcaaaattcaaatttgaaaagagcgatagagaaatagagaaatggcattagtgtccggaaacatgaaggggttttaccgacagaaaaaaaccatcgccaccaaaaaatctccgattcgacttgaaccctccgcaggaaatcgagctctccccgggcatcatctccctcggcggaaaacccgacctagaagatgagcacaaggagagcgaggtggtgctgcggcaattcgacctgaacatggcgtacgggccttgcctcgggatgacgaggctcgcacggtgggagcgcgcacagaggctcgattctaggaaatcgaaggcttttgaagagtgggaaggttccgaccgagtccttgtgggatggtcgcatttaggatcccttttgttttgtatgaaaaagaaaaaaagaaaattaaatccttatcgcttattgtgtagtttttgggttttgcttaggaaaatcatcttctggctgagttccttgttattatgtgactctaaaccaagcattatggatgctggttttagaaagaaaaaaaaatgttgttttcttgcttccggttgttagctgttgttataaatcatgatttgctctgttaactcactggcgtccatgctgtgatgtgtgtgaatgtgagttattcataaactatgaattaatgccttctt

SEQ ID NO: 100196 - DNA, 559 bp, Glycine max
  Clone ID: PAT_MRT3847_61492C.1
tccgaagttcagaccatttcaaaattcaaatttgaaaagagcgatagagaaatagagaaatggcattagtgtccggaaacatgaagggtttttaccgacagaaaaaaaccatcgccaccaaaaaatctccgattctctccccggccatcatctccctcggcggaaaacccgacctagaagatgagcacaaggagagcgaggtggtgctgcggcaattcgacctgaacatggcgtacgggccttgcctcgggatgacgaggctcgcacggtgggagcgcgcacagaggctcgacttgaaccctccgcaggaaatcgagaggcttttgaagagtgggaaggttccgaccgagtccttgtgggatggtcgcatttaggatcccttttgttttgtatgaaaaagaaaaaaagaaaattaaatccttatcgcttattgtgtagtttttgggttttgcttaggaaaatcatcttctggctgagttccttgttattatgtgactctaaaccaagcattatggatgctggttttagaaagaaaaaaaaatgttgttttcttgcttcc

SEQ ID NO: 100197 - DNA, 505 bp, Glycine max
  Clone ID: PAT_MRT3847_61493C.1
tacggctgcgagaagacgacagaagggacatgatgctaatcataatgtttagttgattaccaaaggaaattttagcattgtttgataattaaacatttgtaaatttctcactggactactggagaacttgtcacgtaagtttcagaaattaacgttgctattcttcattatatttacgaaagtgcaataaaaataagaataaaactaagaattaacctactataatgctcacagcagcaacaaacaacctggtagaacatcattcatctactgaaactgactaccaagcaatagtatatagaagaatgaaactactttgattcacaattgtgtcagagaaaaacaaccgcctcttattgcaggaaattgcttttcttatagaaactcaaacacagacacaaaggaaacaaactccttactttccttggccattgtatatgttgaaaatatttacctgttcttcacttggtgcatttattcgcacattgagacatcgagagcggat

SEQ ID NO: 100198 - DNA, 388 bp, Glycine max
  unsure (1)..(388): unsure at all n locations
  Clone ID: PAT_MRT3847_61494C.1
ggaaaaatagcagcaaagaaaatttaaaaaaaacaccattttgtttaagtagattcttcccttcctcccttctaatccaaaacttctgacgttgacttcttaccaccctttgctgacccaaccttaagccaatgtcaatgccgttttgctttcgatcaccgcccatcccttccaacccaagacaaaaaattaaacccaccattcccaaaagcactttttcttacccctttttaattccccaaaaagcacttttttttcttctctccgtgtctccgttctaattgatgcatgtatagggtgaatgaatgcgctatttttttcttctccactctcacactctgaactcttaaaaaaagcactntccctattntatttccctttcggatct

SEQ ID NO: 100199 - DNA, 357 bp, Glycine max
  Clone ID: PAT_MRT3847_61495C.1
ggttagatgtaaagtgggaattaacccatactccatggtaaggactggtttggcgaatagaatacttaataaggtcaactatattctgttttggaagaatgctagatgtgatggtttgatcaccaagcaaggtattagcaagatggcagaaatgataaacagggtttgcggtggctatgaaaaattgatgcgtgaaaggacacacctgctggtggcttggtgttcaaggatgggaatttgtaagaaagatgtcaggagagtcgaatggggaattccttcttgatattcgttcacagatatttgtaataggatctttaatgagatgctcattagatatagctattagaaattactgcg

SEQ ID NO: 100200 - DNA, 427 bp, Glycine max
  Clone ID: PAT_MRT3847_61496C.1
aaccattgggttgatttatgtgcttgtttatgtgcttgcatggtcgtgagaagatgcatcgaggggataccaccctactggaaaaaagaaaagacatgactccacgacgaggggaagaataagatacgaggaagacgagtaactctgagtcccgcattagtctcttgtgtctgcctctaattcttcctgtctgttctcgctgctgccgatgcctctcgatgaggccttgttgccggtggtgctatggtgctttgggtcgggctagacactgttggtgggacctgttcttccgtcgccgggaacactgtcggtgccgacgtcccgcggactggcgatgcctcctactgggcctgcgccgacgttgcgggcctcgggaccggctacgtctcctcatgctgttggaacttctcttagttctcttgctcct

SEQ ID NO: 100201 - DNA, 434 bp, Glycine max
  Clone ID: PAT_MRT3847_61497C.1
cacgcgtccgagattctacattttacatcaccagtgatgcctcctcatggtttaaccatttcttccacattctgcctaaagggaaaactgtgtcagcaattgcttttggtttttaaagttataggttgctactacatggatgtgactaagaaaatacatagattatcttaaaatgggcatgatgtaaaagactcaatcagtagggtaactaaaaactttgtagtactctagctttggaaatctgagaggcctatatagttcatttgagtgtttgatcaaattcttattgagattacagcctgtgcaaaatatttgtgatgcatttttaagtttacttaagtacactttgaaattctttaaaaattttaaaatctttaaaaggacacaagagtgtaccacattgagattaaaatgtgtttattattaatttgtac

SEQ ID NO: 100202 - DNA, 209 bp, Glycine max
  Clone ID: PAT_MRT3847_61498C.1
aaaaccactttggggtttttaattataataaacccatttccttgttaactgatgcgggatcatttaatccttgaaaaaaaggaaactgagaaaccagtccccaacaggataatttaacaaatgaggagtgaagggcacttagggcttcaccaaatggggggggaagggggaaaaccactatagcgccaccaagggggagggctacccaa

SEQ ID NO: 100203 - DNA, 361 bp, Glycine max
  Clone ID: PAT_MRT3847_61499C.1
attcaaaaacaaaaatattttttgaaaagcattgcctacaaaagcaaaaaaagattttttgggaaaagggcaaaacctttttttaaaaaatttttggaaaaaaaaaaaggtgggtttttaaaaagggggacattttttcaaaggggggactttattgggtaattttaaaaaaaattgggaatagctaacgggggggaaaaaaattgggcagcaacaaccattttagggggggggggtttaaccttaaggtatttgggggtttaaagggcaaaatttgggttgacccaaaaaaagttgtttttcggacccttgggcggaaccctgggcggacccctgggcggaaccctgggtccacccggga

SEQ ID NO: 100204 - DNA, 390 bp, Glycine max
  Clone ID: PAT_MRT3847_6149C.1
cgggggcactacaccctaggttgctacttgaaactaaattttgcttgattaaatagaacgggggtggtggagttcctactacaaattaggcagcatggcaatgccattcgtacaatatgttccctctccgaatgaacactggctatggcgcccgatctcccgaagttaaatgcacaaaatagaaccttcctaacaaaatccctttcatctttaaagtgtgcggcgggtcactaaaaagtgccttttctcatccacggaatacatacctttcgaacaatatatatcagattccaaaacagttaaccaacaatctaacttttatgccacatacctccatttccatcctaaccacatatctgatcctagattatgggcccgctctctctacta

SEQ ID NO: 100205 - DNA, 366 bp, Glycine max
  Clone ID: PAT_MRT3847_614C.1
ggaaaaagaaaaaaagagaagggggaaatctcttcttcaatggcggcagagtcatctcgcagtagcgctaaacgcccctttatggaagaagacgacaatgaattctccaaaaagccaccgtaatttcttttcccttcttcccgctcacaaaccctaatttcattcattcttattgagaaaattccagtaatcggtagaaatgatttttagacttagtttattgcatattggcttctgttattttgattcggggactattatcttgtggatcacctccaacgcctatcaagttctaatttctggcccttaaaattggcattcttcgaaagctagttactttaaattcattatgcttgtgtatgaata

SEQ ID NO: 100206 - DNA, 522 bp, Glycine max
  Clone ID: PAT_MRT3847_61500C.1
cacgcccgtccggtccctgctgtgtccatacacaacagtacgggtcggtacggccatagcgagcgtattaatgtggagacgagatcggcatgactgaataccctatctgtgtttgcgttgattcgatgcgcaccataagactagtcgcacgatgtgacatgtataagggaaggcctcgagagagcctcatggcagctggtgaacgccatattgagtgtccactgctcgtggactcattgtccagatgagcgagtgaacaatggcttcgtcttttatgcatttcggtaggtatcgatgtgggtctgtgcatagtgtaacgtctttagcgcgacgcgaggtctgagaaccattgcaccctattactgatacccttatctgtggtgggggagcaacacggactaatgtgtggagccttagtaggcatcttatttcagtgcgttccatgtcatccattcatctacaatacttgttgtgattcccacatttgggatgacgatcattcatgtgaaaaagacatacgta

SEQ ID NO: 100207 - DNA, 121 bp, Glycine max
  Clone ID: PAT_MRT3847_61501C.1
ggatgaccagtgtatattttgggtaggaccaatggttggaccagcaggggctgcattctaccaccaatacatacttaaagcagcagctgtcctggctcttggatccttaagaagcaacgct

SEQ ID NO: 100208 - DNA, 337 bp, Glycine max
  Clone ID: PAT_MRT3847_61502C.1
tccgcttgatttaggttctataagtgcagcactcaatggcgtggtgggtttggactatatggaaagaattgctcttgccacatctgagggatttactcatgtgctttcacgcacaaatggggaaacaggcaaaaggagatttgaccatggggatggtgaaaagatgacattgcttccactaaccaaagttgaaaacgcttacaacatgctaatacccaagcttctgaaaagggttcctacattgattggcatcgaaagttccaaggattagaaacttccttgtcgcaaaattgttttaaaacgtaggactctcggctttactattctacacatggag

SEQ ID NO: 100209 - DNA, 193 bp, Glycine max
  Clone ID: PAT_MRT3847_61503C.1
tgttgccactaggttcatgtataaccactacataacaatagcgagtcctctagatcaattcgaaataagaaacctatttagtattgatacaccattgttagcggatattaacatatttattacaaatataggactatatattacaatcgctgcgattatagctttttacttaagggttgtagctactaacctt

SEQ ID NO: 100210 - DNA, 682 bp, Glycine max
  Clone ID: PAT_MRT3847_61504C.1
agcatattcaatgaagatacaggaggaaaggttaaacagttgtctgctgcacagaatgcgaaaatcactgtgcccagaggatatacgaatgcaggtgtggatagctctcgcctaaagcgatcagaaatgcttcttggaatgaggcttttcaagcatcttccatcaatttcccttcatcctctgcatgtaccgtctaggccgtgcgggtttgttctcaaaccaattgcaaacttatttcctatttactggtggtgaggctagccttctgagttttacacgaaaaggccaagtttggatttgcccacatcctgcagatgtagttgaaatctttatttatcttggtgaaccttgccatgttgtgccagcgttcttctcacaatatcccatggcgcagatgattcaccttatccatcagcagttgctgtccggacaggaggccacttgatactgggcttaaactggtcttagcagggtgcttctataccacagtgcgcgagcgggaccatccttttaatacccttacctggggcacgtaatgctgaagacatggctataactggagcaaattctcgtctacatgcccaggatgcatcacccttatcattactggacgactctgaggaactcgggggaaactggaatttccttactcgtggagtggcgctaaccttttatccaactg

SEQ ID NO: 100211 - DNA, 319 bp, Glycine max
  Clone ID: PAT_MRT3847_61505C.1
gcgagaagacgacagaagggggtgatttctgcgaaacagaggattgacaatacctccaatggtgtcattacggatgcaggattgtaaaactatgccttcatgctgtaatggttttaatgtttcggactggtatagctagctgttgttgtttaatgtatcaccattgcacacatgtgcaaattttgtgctcagcctaatgtatgtatgtacagtatcaagccttgagaatttacttaaattggtagcatctgttctctccccaatttttgggttctctttgactccaccacaatctattgttttgatcagggtgtttttg

SEQ ID NO: 100212 - DNA, 463 bp, Glycine max
  Clone ID: PAT_MRT3847_61506C.1
tcgttcatatttcctcatcttcagtgtcttcctcttcctttgttatctcaatctcctcttcttctatacctgctttctcttctatattttcctcctctgcaactttatcacattctttttatacactgttgatggctgaaggattattattttgaacttattgctttcatcatacataaaaactaggaagtcatttttttttaaaacagcatatagaaaagactgtttaatttttcagtataaggaaagaatgacttataaatcatcaactttcaactatcaacatgtatgaaagacttgtggtaaagttagagaaagaggggaatatagaagagaaaagcaactgcagaagaaaaaaacagtgcctgttaagtggatattcaaagaaatcaaagatgagactttcttctctgcttgccacaactctcatgcaaaatacacttggaaatgtgaataaatgagc

SEQ ID NO: 100213 - DNA, 220 bp, Glycine max
  Clone ID: PAT_MRT3847_61507C.1
gaattcggctcgagtcgggacggactcttagggtctcagcatggataatggggcgagtgggtgagagaccaccatatgagtacatggtcgcattcttagggcctgtgttcgttagctggacagagaatggctcagcataccacccatcatagcggacagaggattgcgtgcgtgaaatacacatactggatgtcttcacgagatattcatgcagcaagat
